United States Patent Application Publication US 2020/0163878 A1 - sequence listing, part 26

SEQ ID NO: 95710 - RNA, 1575 nt, Artificial Sequence
  derived and/or modified CDS sequence (opt1) from glycoprotein__RABV__KM594035.1
augaucccccaggcccugcuccuggugccccuggucaucagcucccucugccugggcaaguuccccaucuacaccauccccgacaagcuggggcccuggagcccgaucgacauccaccaccucuccugccccaacaaccuggugguggaggacgagggcugcaccagccuguccggguucagcuacauggagcucaaggucggcuacaucuccgccaucaaggugaacggguucacgugcaccggcguggucaccgaggcggagaccuacacgaacuucgugggcuacgugaccaccaccuucaagcgcaagcacuuccggcccaugagcgacgccugccgcgccgccuacaacuggaaggucgccggggacccccgguacgaggagucccugcagaacccguaccccgacuaccacuggcugcgcacggugaagaccaccaaggagagccucaucaucaucucccccagcguggcggaccuggaccccuacgacaagucccugcggagccgcaucuucccgggcgggaagugccucggcaucaccgucuccagcacguacugcuccaccaaccacgacuacaccaucuggaugcccgaggaggcccggcuggggaccagcugcgacaucuucacgaacuccaagggcaagcgcgccagcaagggcgggaagaucugcggcuucguggacgagcgggggcuguacaagagccucaagggcgccugccgccugaagcugugcggcguguccgggcuccggcugauggacggcaccugggucgcgauccagaccagcgaggagaccaaguggugccccuccgaccagcuggugaaccuccacgacuuccacagcgacgagaucgagcaccugguggucgaggagcuggugaagaagcgcgaggagugccucgacacgcuggaguccaucaugaccaccaagagcguguccuuccggcgccugagccaccuccggaagcugguccccggguucggcaaggccuacaccaucuucaacaagacgcugauggaggccgacgcccacuacaacuccgugcgcaccuggaacgagaucaucccgagcaaggggugccucaaggugggcggccggugccacccccacgucgacgggguguucuucaacggcaucauccuggggcccgacggcaacguccugauccccgagaugcaguccagccuccugcagcagcacauggagcugcucgaguccagcgugaucccgcugaugcacccccuggccgaccccuccaccguguucaaggagggggacgaggcggagaacuucgucgaggugcaccuccccgacauccacaagcaggucagcggcaucgaccugggccugccgaacugggggaaguaccuccugauguccgccggcgcccuggccgcccucauccugaccaucuuccugaucacgugcugccgccgggugaaccgcaccgagagcaucaagcgggggcccgaggagucccgccgcaaggugagcgugaccccgcagaacggcaaggucaucagcuccugggagcuguacaagaacgggggcgagaccaagcucuga

SEQ ID NO: 95711 - RNA, 1575 nt, Artificial Sequence
  derived and/or modified CDS sequence (opt1) from glycoprotein__RABV__KM594036.1
augaucccccaggcccugcuccuggugccccuggucaucagcucccucugccugggcaaguuccccaucuacaccauccccgacaagcuggggcccuggagcccgaucgacauccaccaccucuccugccccaacaaccuggugguggaggacgagggcugcaccagccuguccggguucagcuacauggagcucaaggucggcuacaucuccgccaucaaggugaacggguucacgugcaccggcguggucaccgaggcggagaccuacacgaacuucgugggcuacgugaccaccaccuucaagcgcaagcacuuccggcccaugagcgacgccugccgcgccgccuacaacuggaaggucgccggggacccccgguacgaggagucccugcagaacccguaccccgacuaccacuggcugcgcacggugaagaccaccaaggagagccucaucaucaucucccccagcguggcggaccuggaccccuacgacaagucccugcggagccgcaucuucccgggcgggaagugccucggcaucaccgucuccagcacguacugcuccaccaaccacgacuacaccaucuggaugcccgaggaggcccggcuggggaccagcugcgacaucuucacgaacuccaagggcaagcgcgccagcaagggcgggaagaucugcggcuucguggacgagcgggggcuguacaagagccucaagggcgccugccgccugaagcugugcggcguguccgggcuccggcugauggacggcaccugggucgcgauccagaccagcgaggagaccaaguggugccccuccgaccagcuggugaaccuccacgacuuccacagcgacgagaucgagcaccugguggucgaggagcuggugaagaagcgcgaggagugccucgacacgcuggaguccaucaugaccaccaagagcguguccuuccggcgccugagccaccuccggaagcugguccccggguucggcaaggccuacaccaucuucaacaagacgcugauggaggccgacgcccacuacaacuccgugcgcaccuggaacgagaucaucccgagcaaggggugccucaaggugggcggccggugccacccccacgucgacgggguguucuucaacggcaucauccuggggcccgacggcaacguccugauccccgagaugcaguccagccuccugcagcagcacauggagcugcucgaguccagcgugaucccgcugaugcacccccuggccgaccccuccaccguguucaaggagggggacgaggcggagaacuucgucgaggugcaccuccccgacauccacaagcaggucagcggcaucgaccugggccugccgaacugggggaaguaccuccugauguccgccggcgcccuggccgcccucauccugaccaucuuccugaucacgugcugccgccgggugaaccgcaccgagagcaucaagcaggggcccgaggagucccggcgcaaggugagcgugaccccgcagaacggcaaggucaucagcuccugggagcuguacaagaacgggggcgagaccaagcucuga

SEQ ID NO: 95712 - RNA, 1575 nt, Artificial Sequence
  derived and/or modified CDS sequence (opt1) from glycoprotein__RABV__KM594037.1
augauccugcaggcccuccuguucgugccccugcucaucagcucccugugcuucggcaaguucccgaucuacaccauccccgacaagcuggggcccuggagccccaucgacauccaccaccucuccugcccgaacaaccuggucguggaggacgagggcugcaccagccuguccggguucagcuacauggagcucaaggugggcuacaucuccgccaucaaggucaacggguucacgugcaccggcguggugaccgaggcggagaccuacacgaacuucgucggcuacgugaccaccaccuucaagcgcaagcacuuccggcccacgcccgacgccugccgcgccgccuacaacuggaagguggccggggacccccgguacgaggagagccugcagaacccguaccccgacuaccacuggcugcgcaccgucaagaccaccaaggagucccucaucaucaucagccccuccguggcggaccuggaccccuacgacaagagccugcacucccggguguucccgagcggcaagugccucgggaucacgaucuccagcaccuacugcuccaccaaccacgacuacaccaucuggaugcccgaggaggcccgccugggcacgagcugcgacaucuucaccuccagcaaggggaagaaggccagcaagggcggcaagaccugcggguucgucgacgagcggggccuguacaagucccucaagggggccugcaagcugaagcugugcggcgugcccggccuccgccugauggacgggaccugggugacgauccagaccagcgacgagaccaaguggugcccgcccgaccagcuggucaaccuccacgacuuccacuccgacgagaucgagcaccuggugguggaggagcuggucaagaagcgggaggagugccucgacgcgcuggagagcaucaugaccacgaaguccgugagcuuccgccggcugucccaccuccgcaagcuggugcccggcuucgggaaggccuacaccaucuucaacaagacccugauggaggccgacgcccacuacaagagcguccggaccuggaacgagaucauccccuccaagggcugccucaaggucgggggccgcugccacccccacguggacggcguguucuucaacgggaucauccugggcccggacgggaacgugcugauccccgagaugcagagcucccuccugcagcagcacauggagcugcucgagagcuccgucaucccccugaugcacccccuggccgacccgagcacgguguucaaggacggcgacgaggcggaggacuucguggagguccaccuccccgacgugcacaagcagaucuccgggguggaccugggccugcccagcuggggcaaguaccuccugaugaucgccggggcccuggccggccucauccugaucaucuuccugauggccugcugccggcgcgcgaagcggaccgagucccgccggcgcgggagcggcgaguccgagcggaagguccccgugccgccccagaacgggaaggugaucagcagcugggagcuguacaaguccgagggcgagaccggccucuga

SEQ ID NO: 95713 - RNA, 1575 nt, Artificial Sequence
  derived and/or modified CDS sequence (opt1) from glycoprotein__RABV__KM594038.1
augauccugcaggcccuccuguucgugccccugcucaucagcucccugugcuucggcaaguucccgaucuacaccauccccgacaagcuggggcccuggagccccaucgacauccaccaccucuccugcccgaacaaccuggucguggaggacgagggcugcaccagccuguccggguucagcuacauggagcucaaggugggcuacaucuccgccaucaaggucaacggguucacgugcaccggcguggugaccgaggcggagaccuacacgaacuucgucggcuacgugaccaccaccuucaagcgcaagcacuuccggcccacgcccgacgccugccgcgccgccuacaacuggaagguggccggggacccccgguacgaggagagccugcagaacccguaccccgacuaccacuggcugcgcaccgucaagaccaccaaggagucccucaucaucaucagccccuccguggcggaccuggaccccuacgacaagagccugcacucccggguguucccgagcggcaagugccucgggaucacgaucuccagcaccuacugcuccaccaaccacgacuacaccaucuggaugcccgaggaggcccgccugggcacgagcugcgacaucuucaccuccagcaaggggaagaaggccagcaagggcggccggaccugcggguucgucgacgagcgcggccuguacaagucccucaagggggccugcaagcugaagcugugcggcgugcccggccuccggcugauggacgggaccugggugacgauccagaccagcgacgagaccaaguggugcccgcccgaccagcuggucaaccuccacgacuuccacuccgacgagaucgagcaccuggugguggaggagcuggucaagaagcgcgaggagugccucgacgcgcuggagagcaucaugaccacgaaguccgugagcuuccggcgccugucccaccuccggaagcuggugcccggcuucgggaaggccuacaccaucuucaacaagacccugauggaggccgacgcccacuacaagagcguccgcaccuggaacgagaucauccccuccaagggcugccucaaggucgggggccggugccacccccacguggacggcguguucuucaacgggaucauccugggcccggacgggaacgugcugauccccgagaugcagagcucccuccugcagcagcacauggagcugcucgagagcuccgucaucccccugaugcacccccuggccgacccgagcacgguguucaaggacggcgacgaggcggaggacuucguggagguccaccuccccgacgugcacaagcagaucuccgggguggaccugggccugcccagcuggggcaaguaccuccugaugaucgccggggcccuggccggccucauccugaucaucuuccugauggccugcugccgccgggcgaagcgcaccgagucccggcgccgggggagcggcgaguccgagcgcaagguccccgugccgccccagaacgggaaggugaucagcagcugggagcuguacaaguccgagggcgagaccggccucuga

SEQ ID NO: 95714 - RNA, 1575 nt, Artificial Sequence; identical to SEQ ID NO: 94549
  derived and/or modified CDS sequence (opt1) from glycoprotein__RABV__KM594039.1

SEQ ID NO: 95715 - RNA, 1575 nt, Artificial Sequence; identical to SEQ ID NO: 94565
  derived and/or modified CDS sequence (opt1) from glycoprotein__RABV__KM594040.1

SEQ ID NO: 95716 - RNA, 1575 nt, Artificial Sequence
  derived and/or modified CDS sequence (opt1) from glycoprotein__RABV__KM594041.1
augauccugcaggcccuccuguucgugccccugcucaucagcucccugugccugggcaaguucccgaucuacaccauccccgacaagcucgggcccuggagccccaucgacauccaccaccuguccugcccgaacaaccuggucguggaggacgagggcugcaccaaccucagcggguucuccuacauggagcugaaggugggcuacaucagcgccaucaaggucaacggguucacgugcaccggcguggugaccgaggcggagaccuacacgaacuucgucggcuacgugaccaccaccuucaagcgcaagcacuuccggcccauccccgacgccugccgcgccgccuacaacuggaagauggccggggacccccgguacgaggagucccugcagaacccguaccccgacuaccacuggcuccgcacggugaagaccaccaaggagagccugaucaucaucucccccagcgucgcggaccuggaccccuacgacaagucccuccacagccggguguucccgggcgggaagugccugggcaucaccguguccagcacguacugcuccaccaaccacgacuacaccaucuggaugcccgaggagccccgccuggggaccagcugcgacaucuucacguccagcaagggcaagaaggccuccaagggcgggaagaccugcggcuucgucgacgagcgggggcucuacaagagccugaagggcgccugcaagcugaagcucugcggcgugcuggggcugcgccucauggacggcaccugggugagcauccagaccuccgacgacacgaaguggugcccgcccgaccagcuggucaaccugcacgacuuccacagcgacgagaucgagcaccucgugguggaggagcuggucaagaagcgggaggagugccuggacgcccucgaguccaucaugaccaccaagagcguguccuuccgccggcugagcuaccugcgcaagcucgugcccggguucggcaaggcguacaccaucuucaacaagacgcugauggaggccgacgcccacuacaaguccguccggaccuggaacgagaucauccccagcaaggggugccugaaggugcgcgagcggugccacccgcccguggacggcgucuucuucaacggcaucauccucgggcccgacggcaacgugcugauccccgagaugcaguccagccugcuccagcagcacauggagcugcuggaguccagcgucaucccccucaugcacccgcuggccgaccccuccaccguguucaaggagggggacgaggccgaggacuucguggagguccaccuccccgacgugcacaagcagaucagcggcguggaccuggggcugcccuccuggggcaaguaccugcucaugaucgcgggcgggcuggccacccugguccugaucaucugcagcauggccugcugccgccggacgaagcgcaccgagucccggcgccggggcagccgcgaguccgagaagaaggugaccgccgccccgcagacccgcaagguggucagcagcugggagcucuacaaguccgagggggacgcgcggcuguga

SEQ ID NO: 95717 - RNA, 1575 nt, Artificial Sequence; identical to SEQ ID NO: 94565
  derived and/or modified CDS sequence (opt1) from glycoprotein__RABV__KM594042.1

SEQ ID NO: 95718 - RNA, 1575 nt, Artificial Sequence
  derived and/or modified CDS sequence (opt1) from glycoprotein__RABV__KM594043.1
augauccugcaggcccuccuguucgugccccugcucaucagcucccugugccugggcaaguucccgaucuacaccauccccgacaagcucgggcccuggagccccaucgacauccaccaccuguccugcccgaacaaccuggucguggaggacgagggcugcaccaaccucagcggguucuccuacauggagcugaaggugggcuacaucagcgccaucaaggucaacggguucacgugcaccggcguggugaccgaggcggagaccuacacgaacuucgucggcuacgugaccaccaccuucaagcgcaagcacuuccggcccauccccgacgccugccgcgccgccuacaacuggaagauggccggggacccccgguacgaggagucccugcagaacccguaccccgacuaccacuggcuccgcacggugaagaccaccaaggagagccugaucaucaucucccccagcgucgcggaccuggaccccuacgacaagucccuccacagccggguguucccgggcgggaagugccugggcaccacgguguccagcaccuacugcuccaccaaccacgacuacaccaucuggaugcccgaggagccccgccuggggacgagcugcgacaucuucaccuccagcaagggcaagaaggccuccaagggcgggaagaccugcggcuucgucgacgagcgggggcucuacaagagccugaagggcgccugcaagcugaagcucugcggcgugcuggggcugcgccucauggacggcaccugggugagcauccagacguccgacgacaccaaguggugcccgcccgaccagcuggucaaccugcacgacuuccacagcgacgagaucgagcaccucgugguggaggagcuggucaagaagcgggaggagugccuggacgcccucgaguccaucaugaccaccaagagcguguccuuccgccggcugagcuaccugcgcaagcucgugcccggguucggcaaggcguacacgaucuucaacaagacccugauggaggccgacgcccacuacaaguccguccggaccuggaacgagaucauccccagcaaggggugccugaaggugcgcgagcggugccacccgcccguggacggcgucuucuucaacggcaucauccucgggcccgacggcaacgugcugauccccgagaugcaguccagccugcuccagcagcacauggagcugcuggaguccagcgucaucccccucaugcacccgcuggccgaccccuccaccguguucaaggagggggacgaggccgaggacuucguggagguccaccuccccgacgugcacaagcagaucagcggcguggaccuggggcugcccuccuggggccgcuaccugcucaugaucgcgggcgggcuggccacgcugguccugaucaucugcagcauggccugcugccggcgcaccaagcggaccgagucccgccggcgcgacagccgcgaguccgagaagaaggugaccgugacgccgcagacccggaaggucgugagcagcugggagcucuacaaguccgagggcgacgccagccuguga

SEQ ID NO: 95719 - RNA, 1575 nt, Artificial Sequence
  derived and/or modified CDS sequence (opt1) from glycoprotein__RABV__KP723638.1
auggugcugcagacccugcuguucguccccuuccugguguucagccucugcuucggcaaguucccgaucuacaccauccccgacaagcuggggcccuggucccccaucgacauccaccaccugagcugcccgaacaaccucguggucgaggacgagggcugcacgaaccuguccggguucagcuacauggagcugaaggugggcuacaucuccgccaucaaggugaacggguucacgugcaccggcgucgugaccgaggccgagaccuacaccaacuucgugggcuacgucaccaccacguucaagcgcaagcacuuccggcccacccccgacgcgugccgcgccgccuacaacuggaagauggccggggacccccgguacgaggagagccuccacaacccguaccccgacuaccacuggcugcgcaccgugaagaccacgaaggagucccuggugaucaucagccccuccgucgccgaccucgaccccuacgacaagagccugcacucccggguguucccgagcggcaagugcuccgggaucaccgugagcuccaccuacugcagcaccaaccacgacuacacgaucuggaugcccgagaacccccgccugggcaccuccugcgacaucuucgcgaacagccgggggaagcgcgccuccaagggcagcaagaccugcggcuucgucgacgagcgggggcucuacaagagccugaagggcgccugcaagcugaagcucugcggggugcugggccugcgccucauggacggcaccuggguggccaugcagacguccgaggagaccaaguggugcccgcccgaccagcuggucaaccugcacgacuuccggagcgacgagaucgagcaccucgugguggaggagcuggucaagaagcgcgaggagugccuggacgcgcucgaguccaucaugaccaccaagagcguguccuuccggcgccugagccaccuccggaagcuggugcccggguucggcaaggccuacacgaucuucaacaagacccugauggaggccgacgcccacuacaaguccguccgcaccuggaacgagaucauccccagcaaggggugccugcgggugggcgggcgcugccacccccacgucaacggcguguucuucaacggcaucauccucgggccggacggccacgugcugauccccgagaugcaguccagccugcuccagcagcacauggagcugcuggaguccagcgucaucccccucaugcacccccuggccgacccguccaccguguucaaggacggggacgaggcggaggacuucguggagguccaccuccccgacgugcacaagcaggucagcggcguggaccuggggcugcccaacuggggcaaguacgugcugcucuccgccggcacgcugaucgugcugaugcucaucaucuuccugaugaccugcugccggcgcgucaaccggcccaagccgacccagcgcagccucgggggcaccgggcgcaagguguccgugacgagccaguccggcaaggucaucagcagcugggaguccuacaagagcggguccgagacccggcuguga

SEQ ID NO: 95720 - RNA, 1575 nt, Artificial Sequence
  derived and/or modified CDS sequence (opt1) from glycoprotein__RABV__KR105372.1
auggugccccagguccugcuguucgugccgcugcugggcuucagccucugcuucgggaaguuccccaucuacaccauccccgacgagcugggccccugguccccgaucgacauccaccaccugagcugccccaacaaccucguggucgaggacgaggggugcaccaaccuguccgaguucagcuacauggagcugaaggugggcuacaucuccgccaucaaggugaacggguucacgugcaccggcgucgugaccgaggccgagaccuacacgaacuucgugggcuacgucaccaccaccuucaagcgcaagcacuuccggcccacgcccgacgcgugccgcgccgccuacaacuggaagauggccggggacccgcgguacgaggagagccuccacaaccccuaccccgacuaccacuggcugcgcaccgugcggaccaccaaggagucccugaucaucaucagccccuccgugacggaccucgacccguacgacaagagccugcacucccgcgucuuccccggcgggaagugcagcggcaucaccguguccagcaccuacugcuccaccaaccacgacuacacgaucuggaugcccgaggacccccggccgcgcacccccugcgacaucuucaccaacagccgggggaagcgcgccuccaagggcaacaagaccugcggcuucguggacgagcgggggcuguacaagagccucaagggcgcgugccgccugaagcugugcgggguccucggccugcggcugauggacggcacguggguggccaugcagaccuccgacgagaccaaguggugcccgcccgaccagcucgugaaccugcacgacuuccacagcgacgagaucgagcaccuggucguggaggagcucgugaagaagcgcgaggagugccuggacgcccuggagagcaucaugaccacgaaguccgucagcuuccggcgccucucccaccuccggaagcuggugcccggguucggcaaggccuacaccaucuucaacaagacccucauggaggcggacgcccacuacaagagcgugcgcaccuggaacgagaucauccccuccaaggggugccugaaggucggcgggcggugccacccccacgugaacggcgucuucuucaacggcaucauccuggggcccgacggccacgugcucaucccggagaugcagagcucccugcugcagcagcacauggagcuccucaagagcuccgugaucccccugaugcacccccuggccgaccccagcacggucuucaaggagggggacgaggccgaggacuucguggaggugcaccucccggacgucuacaagcgcaucuccggcguggaccuggggcugcccaacuggggcaaguacgugcugaugaccgccggcgcgaugaucgggcugguccucaucuucagccugaugaccuggugccggcgcgccaaccgccccgaguccaagcagcggagcuucggcgggaccggccgcaacguguccgugacgagccaguccgggaaggucaucccgagcugggaguccuacaagagcggcggcgagacccggcuguga

SEQ ID NO: 95721 - RNA, 1575 nt, Artificial Sequence
  derived and/or modified CDS sequence (opt1) from glycoprotein__RABV__KR906734.1
auggugccccaggcccugcuguucgucccgcugcugguguucccccucugcuucggcaaguuccccaucuacaccauccccgacaagcuggggccguggagccccaucgacauccaccaccuguccugccccaacaaccucguggucgaggacgagggcugcaccaaccugagcggguucuccuacauggagcugaaggugggcuacaucagcgccaucaaggugaacggguucacgugcaccggcgucgugaccgaggcggagaccuacacgaacuucgugggcuacgucaccaccaccuucaagcgcaagcacuuccggcccaucccggacgccugccgcgccgccuacaacuggaagauggccggggacccccgguacgaggagucccuccacaaccccuaccccgacuaccacuggcugcgcacggugaagaccaccaaggagagccuggugaucaucuccccgagcgucgcggaccucgaccccuacgacaagucccugcacagccggguguuccccuccggcaagugcagcgggaucaccguguccagcacguacugcuccaccaaccacgacuacaccaucuggaugcccgagaacccgcgccugggcaccagcugcgacaucuucacgaacucccgggggaagcgcgccagcaagggcggcaagaccugcggguucgucgacgagcggggccucuacaagucccugcgcggggccugcaagcugaagcucugcggcgugcugggccugcggcucauggacgggaccuggguggccaugcagaccagcgacgagacgaaguggugcccgcccgaccagcuggucaacaugcacgacuuccgcagcgacgagaucgagcaccuggugguggaggagcucgucaagaagcgggaggagugccuggacgcgcuggaguccaucaugaccaccaagagcguguccuuccgccggcucagccaccuccgcaagcuggugcccggcuucgggaaggccuacaccaucuucaacaagacgcucauggaggccgacgcccacuacaaguccguccggaccuggaacgagaucauccccagcaagggcugccugcgcgucgggggccggugccacccccacgugaacggcguguucuucaacgggaucauccugggccccgacgggcacgugcucauccccgagaugcaguccagccugcugcagcagcacauggagcuccuggaguccagcgucaucccgcugaugcacccccucgccgaccccuccaccguguucaaggagggcgacgaggcggaggacuucguggagguccaccuccccgacgugcacaagcaggucagcgggguggaccugggccugccgaacuggggcaaguacgugcugcuguccgccgggacccucaucgcccugaugcugaucaucuuccucaugacgugcugccgccgggugaaccgccccgagcccacccagcgcagccugggcgggaccggccggaaggucuccgugaccagccaguccgggaaggugaucagcuccugggagagcuacaagagcggcggcgagacgcgccuguga

SEQ ID NO: 95722 - RNA, 1575 nt, Artificial Sequence
  derived and/or modified CDS sequence (opt1) from glycoprotein__RABV__KR906735.1
auggugccccagacccugcuguucgucccgcugcugguguucagccucugcuucggcaaguuccccaucuacaccauccccgacaagcuggggcccugguccccgaucgacauccaccaccugagcugccccaacaaccucguggucgaggacgagggcugcacgaaccuguccggguucagcuacauggagcugaaggugggcuacaucuccgccaucaaggugaacggguucacgugcaccggcgucgugaccgaggccgagaccuacaccaacuucgugggcuacgucaccaccacguucaagcgcaagcacuuccggcccauccccgacgcgugccgcgccgccuacaacuggaagauggccggggacccgcgguacgaggagagccuccacaaccccuaccccgacuaccacuggcugcgcaccgugaagaccaccaaggagucccuggugaucaucagccccuccgucgccgaccucgacccguacgacaagagccugcacucccggguguuccccagcggcaagugcuccgggaucacggugagcuccaccuacugcagcaccaaccacgacuacaccaucuggaugcccgagaacccccgccugggcacguccugcaacaucuucaccaacagccgggggaagcgcgcguccaagggcggcaagaccugcggguucgucgacgagcggggccucuacaagagccugaagggggccugcaagcugaagcucugcggcgugcugggccugcgccucauggacgggaccuggguggccaugcagacgagcgacgagaccaaguggugcccgcccgaccagcuggucaacaugcacgacuuccgguccgacgagaucgagcaccuggugguggaggagcucgucaagaagcgcgaggagugccuggacgcccuggagagcaucaugaccaccaaguccgugagcuuccggcgccucucccaccuccggaagcuggugcccggcuucgggaaggcguacacgaucuucaacaagacccucauggaggccgacgcccacuacaagagcguccgcaccuggaacgagaucauccccuccaagggcugccugcgggucgggggccgcugccacccgcacgugaacggcguguucuucaacgggaucauccugggccccgacgggcacgugcucauccccgagaugcagagcucccugcugcagcagcacauggagcuccuggagagcuccgucaucccccugaugcacccgcucgccgaccccagcaccguguucaaggacggcgacgaggccgaggacuucguggagguccaccuccccgacgugcacaagcaggucuccgggguggaccugggccugcccaacuggggcaaguacgugcugcugagcgcggggacgcucaucgcccugaugcugaucaucuuccucaugaccugcugccggcgcgugaaccggccggaguccacccagcgcagccugggcgggacccgccggaaggucuccgugacgagccaguccggcaaggugaucagcagcugggaguccuacaagagcgggggcgagacccgccuguga

SEQ ID NO: 95723 - RNA, 1575 nt, Artificial Sequence; identical to SEQ ID NO: 95722
  derived and/or modified CDS sequence (opt1) from glycoprotein__RABV__KR906736.1

SEQ ID NO: 95724 - RNA, 1575 nt, Artificial Sequence
  derived and/or modified CDS sequence (opt1) from glycoprotein__RABV__KR906737.1
auggugccccaggcccugcuguucgucccgcugcugguguucccccucugcuucggcaaguuccccaucuacaccauccccgacaagcuggggccguggagccccaucgacauccaccaccuguccugccccaacaaccucguggucgaggacgagggcugcaccaaccugagcggguucuccuacauggagcugaaggugggcuacaucagcgccaucaaggugaacggguucacgugcaccggcgucgugaccgaggcggagaccuacacgaacuucgugggcuacgucaccaccaccuucaagcgcaagcacuuccggcccaucccggacgccugccgcgccgccuacaacuggaagauggccggggacccccgguacgaggagucccuccacaaccccuaccccgacuaccacuggcugcgcacggugaagaccaccaaggagagccuggugaucaucuccccgagcgucgcggaccucgaccccuacgacaagucccugcacagccggguguucaccuccggcaagugcagcgggaucacgguguccagcaccuacugcuccaccaaccacgacuacaccaucuggaugcccgagaacccccgccugggcacgagcugcaacaucuucgucaacuccaaggggaagcgggccagcaagggcggcaagaccugcggguucguggacgagcgcggccucuacaagucccugaagggggccugcaagcugaagcucugcggcgugcugggccugcggcucauggacgggaccugggucgccaugcagaccagcgacgagacgaaguggugcagcccggaccagcuggugaacaugcacgacuuccgcuccgacgagaucgagcaccugguggucgaggagcucgugaagaagcgggaggagugccuggacgcgcuggagagcaucaugaccaccaaguccgugagcuuccgccggcucucccaccuccgcaagcugguccccggcuucgggaaggccuacaccaucuucaacaagacgcucauggaggccgacgcccacuacaagagcgugcggaccuggaacgagaucauccccuccaagggcugccugcgcgucgggggccggugccacccccacgugaacggcguguucuucaacgggaucauccugggcccggacgggcacguccucauccccgagaugcagagcucccugcugcagcagcacauggagcuccuggagagcuccgugaucccccugaugcacccccucgccgacccgagcaccguguucaaggacggcgacgaggcggaggacuucgucgaggugcaccuccccgacgugcacaagcaggucuccgggguggaccugggccugcccaacuggggcaaguacgugcugcugagcgccgggacccucaucgcccugaugcugaucaucuuccucaugacgugcugccgccgggucaaccgccccgaguccacccagcggagccugggcgggaccggccgcaagguguccgugaccagccaguccgggaaggucaucagcagcugggaguccuacaagagcggcggcgagacgcgccuguga

SEQ ID NO: 95725 - RNA, 1575 nt, Artificial Sequence; identical to SEQ ID NO: 95724
  derived and/or modified CDS sequence (opt1) from glycoprotein__RABV__KR906738.1

SEQ ID NO: 95726 - RNA, 1575 nt, Artificial Sequence
  derived and/or modified CDS sequence (opt1) from glycoprotein__RABV__KR906739.1
auggugccccaggcccugcuguucgucccgcugcugguguucccccucugcuucggcaaguuccccaucuacaccauccccgacaagcuggggccguggagccccaucgacauccaccaccuguccugccccaacaaccucguggucgaggacgagggcugcaccaaccugagcggguucuccuacauggagcugaaggugggcuacaucagcgccaucaaggugaacggguucacgugcaccggcgucgugaccgaggcggagaccuacacgaacuucgugggcuacgucaccaccaccuucaagcgcaagcacuuccggcccaucccggacgccugccgcgccgccuacaacuggaagauggccggggacccccgguacgaggagucccuccacaaccccuaccccgacuaccacuggcugcgcacggugaagaccaccaaggagagccuggugaucaucuccccgagcgucgcggaccucgaccccuacgacaagacccugcacucccggguguuccccagcggcaagugcuccgggaucacggugagcuccaccuacugcagcaccaaccacgacuacaccaucuggaugcccgagaacccgcgccugggcacguccugcgacaucuucaccaacagccgggggaagcgcgccuccaagggcggcaagaccugcggguucgucgacgagcggggccucuacaagagccugaagggggccugcaagcugaagcucugcggcgugcugggccugcgccucauggacgggaccuggguggccaugcagacguccgacgagaccaaguggugcccgcccgaccggcuggucaacaugcacgacuuccgcagcgacgagaucgagcaccuggugguggaggagcucgucaagaagcgggaggagugccuggacgcgcuggagagcaucaugaccaccaaguccgugagcuuccgccggcucucccaccuccgcaagcuggugcccggcuucgggaaggccuacacgaucuucaacaagacccucauggaggccgacgcccacuacaagagcguccggaccuggaacgagaucauccccuccaagggcugccugcgcgucgggggccggugccacccccacgugaacggcguguucuucaacgggaucauccugggccccgacgggcacgugcucauccccgagaugcagagcucccugcugcagcagcacauggagcuccuggagagcuccgucaucccgcugaugcacccccucgccgaccccagcaccguguucaaggacggcgacgaggcggaggacuucguggagguccaccuccccgacgugcacaagcaggucuccgggguggaccugggccugccgaacuggggcaaguacgugcugcugagcgccgggacgcucaucgcccugaugcugaucaucuuccucaugaccugcugccgccgggugaaccgccccgagcccacccagcgcucccugggcgggaccggccggaaggucagcgugacgucccagagcgggaaggugaucuccagcugggaguccuacaagagcggcggcgagaccaagcuguga

SEQ ID NO: 95727 - RNA, 1575 nt, Artificial Sequence
  derived and/or modified CDS sequence (opt1) from glycoprotein__RABV__KR906740.1
auggugccccaggcccgccuguucgucccgcuccugguguucccccugugcuucggcaaguuccccaucuacaccauccccgacaagcucgggccguggagccccaucgacauccaccaccuguccugccccaacaaccugguggucgaggacgagggcugcaccaaccucagcggguucuccuacauggagcugaaggugggcuacaucagcgccaucaaggugaacggguucacgugcaccggcgucgugaccgaggcggagaccuacacgaacuucgugggcuacgucaccaccaccuucaagcggaagcacuuccgccccaucccggacgccugccgggccgccuacaacuggaagauggccggggacccccgcuacgaggagucccugcacaaccccuaccccgacuaccacuggcuccggacggugaagaccaccaaggagagccuggugaucaucuccccgagcgucgcggaccuggaccccuacgaccgcucccuccacagccggguguucaccggcgggaagugcuccggcaucacggugagcuccaccuacugcagcaccaaccacgacuacaccaucuggaugcccgagaacccccgccuggggacguccugcaacaucuucgccaacagcaagggcaagcgggccuccaagggcgggaagaccugcggcuucgucgacgagcgcgggcuguacaagagccucaagggcgccugcaagcugaagcugugcggcgugcucgggcugcggcugauggacggcaccuggguggcgaugcagaccuccgacgagacgaaguggugcccgcccgaccagcucgucaacaugcacgacuuccgcagcgacgagaucgagcaccuggugguggaggagcuggucaagaagcgggaggagugccucgacgcccuggagagcaucaugaccaccaaguccgugagcuuccgccggcugucccaccuccgcaagcuggugcccggguucggcaaggccuacaccaucuucaacaagacgcugauggaggccgacgcccacuacaagagcguccggaccuggaacgagaucauccccuccaaggggugccuccgcgugggcggccggugccacccgcacgucaacgggguguucuucaacggcaucauccuggggcccgacggccacgugcugauccccgagaugcagagcucccuccugcagcagcacauggagcugcucgagagcuccgucaucccccugaugcacccgcuggcggaccccagcaccguguucaaggacggggacgaggccgaggacuucguggagguccaccuccccgacgugcacaagcaggucuccggcguggaccugggccugcccaacugggggaaguacgugcuccugagcgccggcacccugaucgcccucaugcugaucaucuuccugaugacgugcugccgccgggugucccgcccggagagcacccagcgcucccucgggcggaucggccgcaaggucagcgugaccucccagagcgggaaggugaucuccagcugggagagcuacaaguccggcggcgagacccggcuguga

SEQ ID NO: 95728 - RNA, 1575 nt, Artificial Sequence
  derived and/or modified CDS sequence (opt1) from glycoprotein__RABV__KR906741.1
auggugccccaggcccugcuguucgucccgcugcugguguucccccucugcuucggcaaguuccccaucuacaccauccccgacaagcuggggccguggagccccaucgacauccaccaccuguccugccccaacaaccucguggucgaggacgagggcugcaccaaccugagcggguucuccuacauggagcugaaggugggcuacaucagcgccaucaaggugaacggguucacgugcaccggcgucgugaccgaggcggagaccuacacgaacuucgugggcuacgucaccaccaccuucaagcgcaagcacuuccggcccaucccggacgccugccgcgccgccuacaacuggaagauggccggggacccccgguacgaggagucccuccacaaccccuaccccgacuaccacuggcugcgcacggugaagaccaccaaggagagccuggugaucaucuccccgagcgucgcggaccucgaccccuacgacaagucccugcacagccggguguucaccuccggcaagugcagcgggaucacgguguccagcaccuacugcuccaccaaccacgacuacaccaucuggaugcccgagaacccccgccugggcacgagcugcaacaucuucgccaacuccaaggggaagcgggccagcaagggcggcaagaccugcggguucgucgacgagcgcggccucuacaagucccugaagggggccugcaagcugaagcucugcggcgugcugggccugcggcucauggacgggaccuggguggcgaugcagaccagcgacgagacgaaguggugcccgcccgaccagcuggucaacaugcacgacuuccgcagcgacgagaucgagcaccuggugguggaggagcucgucaagaagcgggaggagugccuggacgcccuggaguccaucaugaccaccaagagcguguccuuccgccggcucagccaccuccgcaagcuggugcccggcuucgggaaggccuacaccaucuucaacaagacgcucauggaggccgacgcccacuacaaguccguccggaccuggaacgagaucauccccagcaagggcugccugcgcgucgggggccggugccacccgcacgugaacggcguguucuucaacgggaucauccugggccccgacgggcacgugcucauccccgagaugcaguccagccugcugcagcagcacauggagcuccuggaguccagcgucaucccccugaugcacccgcucgcggaccccuccaccguguucaaggacggcgacgaggccgaggacuucguggagguccaccuccccgacgugcacaagcaggucagcgggguggaccugggccugcccaacuggggcaaguacgugcugcuguccgccgggacccucaucgcccugaugcugauccucuuccugaugacgugcugccgccgggugaaccgcccggagagcacccagcggucccugggcgggaccggccgcaaggucagcgugaccucccagagcgggaaggugaucuccagcugggagagcuacaaguccggcggcgagacgcgccuguga

SEQ ID NO: 95729 - RNA, 1575 nt, Artificial Sequence; identical to SEQ ID NO: 95516
  derived and/or modified CDS sequence (opt1) from glycoprotein__RABV__KR906742.1

SEQ ID NO: 95730 - RNA, 1575 nt, Artificial Sequence; identical to SEQ ID NO: 95721
  derived and/or modified CDS sequence (opt1) from glycoprotein__RABV__KR906743.1

SEQ ID NO: 95731 - RNA, 1575 nt, Artificial Sequence
  derived and/or modified CDS sequence (opt1) from glycoprotein__RABV__KR906744.1
auggugccccaggcccugcuguucgucccgcugcugguguucccccucugcuucggcaaguuccccaucuacaccauccccgacaagcuggggccguggagccccaucgacauccaccaccuguccugccccaacaaccucguggucgaggacgagggcugcaccaaccugagcggguucuccuacauggagcugaaggugggcuacaucagcgccaucaaggugaacggguucacgugcaccggcgucgugaccgaggcggagaccuacacgaacuucgugggcuacgucaccaccaccuucaagcgcaagcacuuccggcccaucccggacgccugccgcgccgccuacaacuggaagauggccggggacccccgguacgaggagucccuccacaaccccuaccccgacuaccacuggcugcgcacggugaagaccaccaaggagagccuggugaucaucuccccgagcgucgcggaccucgaccccuacgacaagacccugcacucccggguguuccccagcggcaagugcuccgggaucacggugagcuccaccuacugcagcaccaaccacgacuacaccaucuggaugcccgagaacccgcgccugggcacguccugcgacaucuucaccaacagccgggggaagcgcgccuccaagggcggcaagaccugcggguucgucgacgagcggggccucuacaagagccugaagggggccugcaagcugaagcucugcggcgugcugggccugcgccucauggacgggaccuggguggccaugcagacguccgacgagaccaaguggugcccgcccgaccagcuggucaacaugcacgacuuccggagcgacgagaucgagcaccuggugguggaggagcucgucaagaagcgcgaggagugccuggacgcgcuggagagcaucaugaccaccaaguccgugagcuuccggcgccucucccaccuccggaagcuggugcccggcuucgggaaggccuacacgaucuucaacaagacccucauggaggccgacgcccacuacaagagcguccgcaccuggaacgagaucauccccuccaagggcugccugcgggucgggggccgcugccacccccacgugaacggcguguucuucaacgggaucauccugggccccgacgggcacgugcucauccccgagaugcagagcucccugcugcagcagcacauggagcuccuggagagcuccgucaucccgcugaugcacccccucgccgaccccagcaccguguucaaggacggcgacgaggcggaggacuucguggagguccaccuccccgacgugcacaagcaggucuccgggguggaccugggccugccgaacuggggcaaguacgugcugcugagcgccgggacgcucaucgcccugaugcugaucaucuuccucaugaccugcugccggcgcgugaaccggcccgagcccacccagcgcucccugggcgggaccggccgcaaggucagcgugacgucccagagcgggaaggugaucuccagcugggaguccuacaagagcggcggcgagaccaagcuguga

SEQ ID NO: 95732 - RNA, 1575 nt, Artificial Sequence; identical to SEQ ID NO: 95724
  derived and/or modified CDS sequence (opt1) from glycoprotein__RABV__KR906745.1

SEQ ID NO: 95733 - RNA, 1575 nt, Artificial Sequence
  derived and/or modified CDS sequence (opt1) from glycoprotein__RABV__KR906746.1
auggugccccaggcccugcuguucgucacccugcugguguucagccugugcuucggcaaguucccgaucuacaccauccccgacaagcuggggcccuggucccccaucgacauccaccaccugagcugcccgaacaaccucguggucgaggacgagggcugcacgaaccuguccggguucagcuacauggagcugaaggugggcuacaucuccgccaucaaggugaacggguucacgugcaccggcgucgugaccgaggcggagaccuacaccaacuucgugggcuacgucaccaccacguucaagcgcaagcacuuccggcccauccccgacgccugccgcgccgccuacaacuggaagauggccggggacccccgguacgaggagagccuccacaacccguaccccgacuaccacuggcugcgcaccgugaagaccaccaaggagucccuggugaucaucagccccuccgucgcggaccucgaccccuacgacaagagccugcacucccggguguucccgggcgggaagugcagcggcaucacgguguccagcaccuucugcuccaccaaccacgacuacaccaucuggaugcccgagaacccccgccuggggacgagcugcgacaucuucgccaacucccggggcaagcgcgccagcaagggcgggaagaccugcggcuucgucgacgagcgggggcucuacaagucccugaagggcgccugcaagcugaagcucugcggcgugcuggggcugcgccucauggacggcaccuggguggcgaugcagaccagcgacgagacgaaguggugcccgcccgaccagcuggucaacaugcacgacuuccggagcgacgagaucgagcaccuggugguggaggagcucgucaagaagcgcgaggagugccuggacgcccuggaguccaucaugaccaccaagagcguguccuuccggcgccucagccaccuccggaagcuggugcccggguucggcaaggccuacaccauguucaacaagacgcucauggaggccgacgcccacuacaaguccguccgcaccuggaacgagaucauccccagcaaggggugccugcgggugggcggccgcugccacccccacgucaacgggguguucuucaacggcaucauccuggggccggacggccacgugcucauccccgagaugcaguccagccugcugcagcagcacauggagcuccuggaguccagcgucaucccccugaugcacccccucgcggacccguccaccguguucaaggacggggacgaggccgaggacuucguggagguccaccuccccgacgugcacaagcaggucagcggcguggaccugggccugcccaacugggggaaguacgugcugcuguccgccggcacccucaucgcccugaugcugaucaucuuccucaugacgugcugccggcgcgugaaccggcccgagagcaccgaccgcucccucgggggcaccgggcgcaaggucagcgugaccucccagagcggcaaggugaucuccagcugggagagcuacaaguccggcggggagacgcggcuguga

SEQ ID NO: 95734 - RNA, 1575 nt, Artificial Sequence; identical to SEQ ID NO: 95733
  derived and/or modified CDS sequence (opt1) from glycoprotein__RABV__KR906747.1

SEQ ID NO: 95735 - RNA, 1575 nt, Artificial Sequence
  derived and/or modified CDS sequence (opt1) from glycoprotein__RABV__KR906748.1
auggugccccaggcccugcuguucgucccgcugcugguguucagccucugcuucggcaaguuccccaucuacaccauccccgacaagcuggggcccugguccccgaucgacauccaccaccugagcugccccaacaaccucguggucgaggacgagggcugcaccaaccuguccggguucagcuacauggagcugaaggugggcuacaucuccgccaucaaggugaacggguucacgugcaccggcgucgugaccgaggcggagaccuacacgaacuucgugggcuacgucaccaccaccuucaagcgcaagcacuuccggcccauccccgacgccugccgcgccacguacaacuggaagaucgccggggacccgcgguacgaggagagccuccacaaccccuaccccgacuaccacuggcugcgcaccgugaagaccaccaaggagucccuggugaucaucagccccuccgucgccgaccucgacccguacgacaagagccugcacucccggguguuccccagcggcaagugcuccgggaucacggugagcuccacccacugcagcaccaaccacgacuacaccaucuggaugcccgagaacccccgccugggcacguccugcgacaucuucaccaacagccgggggaagcgcgcguccaagggcagcaagaccugcggcuucgucgacgagcgggggcucuacaagagccugaagggcgccugcaagcugaagcucugcggggugcugggccugcgccucauggacggcaccuggguggccaugcagacguccgacgagaccaaguggugcccgcccgaccagcuggucaaccugcacgacuuccggagcgacgagaucgagcaccucgugguggaggagcuggucaagaagcgcgaggagugccuggacgcccucgaguccaucaugaccaccaagagcguguccuuccggcgccugagccaccuccggaagcucgugcccggguucggcaaggcguacacgaucuucaacaagacccugauggaggccgacgcccacuacaaguccguccgcaccuggaacgagaucauccccagcaaggggugccugcgggugggcgggcgcugccacccgcccgucaacggcguguucuucaacggcaucauccucgggcccgacggccacgugcugauccccgagaugcaguccagccugcuccagcagcacauggagcugcuggaguccagcgucaucccgcucaugcacccccuggccgaccccuccgccguguucaaggacggggacgaggcggaggacuucguggagguccaccuccccgacgugcacaagcaggucagcggcguggaccuggggcugccgaacuggggcaaguacgugcugcucuccgccggcacccugaucgcccugaugcucaucaucuuccugaugacgugcugccgcggggugaaccggcccgagagcaagcagugcucccugggcgggacccggcgcaaggucagcgugaccucccagagcggcaaggugaucagcuccugggagagcuacaaguccgggggcgagacccgccuguga

SEQ ID NO: 95736 - RNA, 1575 nt, Artificial Sequence
  derived and/or modified CDS sequence (opt1) from glycoprotein__RABV__KR906749.1
auggugccccaggaccugcuguucgucccgcugcuggugcucccccugugcuucggcaaguuccccaucuacaccauccccgacaagcuggggccguggagccccaucgacauccaccaccucuccugccccaacaaccugguggucgaggacgagggcugcaccaaccugagcggguucuccuacauggagcucaaggugggcuacaucagcgccaucaaggugaacggguucacgugcaccggcgucgugaccgaggccgagaccuacacgaacuucgugggcuacgucaccaccaccuucaagcgcaagcacuuccggcccaucccggacgcgugccgcgccgccuacaacuggaagauggccggggacccccgguacgaggagucccugcacaaccccuaccccgacuaccacuggcugcgcacggugaagaccaccaaggagagccucgugaucaucuccccgagcgucgccgaccuggaccccuacgacaagucccugcacagccggguguucaccuccggcaagugcagcgggaucacgguguccagcaccuacugcuccaccaaccacgacuacaccaucuggaugcccgagaacccccgccucggcacgagcugcaacaucuucgcgaacuccaaggggaagcgggccagcaagggcggcaagaccugcggguucgucgacgagcgcggccuguacaagucccugaagggggccugcaagcucaagcugugcggcgugcugggccuccggcugauggacgggaccuggguggccaugcagaccagcgacgagacgaaguggugcccgcccgaccagcuggucaacaugcacgacuuccgcagcgacgagaucgagcaccucgugguggaggagcuggucaagaagcgggaggagugccuggacgcgcucgaguccaucaugaccaccaagagcguguccuuccgccggcugagccaccuccgcaagcucgugcccggcuucgggaaggccuacaccaucuucaacaagacgcugauggaggccgacgcccacuacaaguccguccggaccuggaacgagaucauccccagcaagggcugccugcgcgucgggggccggugccacccgcacgugaacggcguguucuucaacgggaucauccucggccccgacgggcacgugcugauccccgagaugcaguccagccugcuccagcagcacauggagcugcuggaguccagcgucaucccccucaugcacccgcuggccgaccccuccaccguguucaaggacggcgacgaggcggaggacuucguggagguccaccuccccgacgugcacaagcaggucagcgggguggaccugggccugcccaacuggggcaaguacgugcugcucuccgccgggacccugaucgcccugaugcucaucaucuuccugacgaccugcugccgccgggugaaccgcccggagagcacccagcggucccugggcgggaccggccgcaaggucagcgugacgucccagagcgggaaggugaucuccagcugggagagcuacaaguccggcggcgagacccgccuguga

SEQ ID NO: 95737 - RNA, 1575 nt, Artificial Sequence; identical to SEQ ID NO: 95516
  derived and/or modified CDS sequence (opt1) from glycoprotein__RABV__KR906750.1

SEQ ID NO: 95738 - RNA, 1575 nt, Artificial Sequence
  derived and/or modified CDS sequence (opt1) from glycoprotein__RABV__KR906751.1
auggugccccaggcccugcuguucgucacccugcugguguucagccucugcuucggcaaguucccgaucuacaccauccccgacaagcuggggcccuggucccccaucgacauccaccaccugagcugcccgaacaaccucguggucgaggacgagggcugcacgaaccuguccggguucagcuacauggagcugaaggugggcuacaucuccgccaucaaggugaacggguucacgugcaccggcgucgugaccgaggcggagaccuacaccaacuucgugggcuacgucaccaccacguucaagcgcaagcacuuccggcccauccccgacgccugccgcgccgccuacaacuggaagauggccggggacccccgguacgaggagagccuccacaacccguaccccgacuaccacuggcugcgcaccgugaagaccaccaaggagucccuggugaucaucagccccuccgucgcggaccucgaccccuacgacaagagccugcacucccggguguucccgggcgggaagugcagcggcaucacgguguccagcaccuucugcuccaccaaccacgacuacaccaucuggaugcccgagaacccccgccuggggacgagcugcgacaucuucgccaacuccaagggcaagcgggccagcaagggcgggaagaccugcggcuucgucgacgagcgcgggcucuacaagucccugaagggcgccugcaagcugaagcucugcggcgugcuggggcugcggcucauggacggcaccuggguggcgaugcagaccagcgacgagacgaaguggugcccgcccgaccagcuggucaacaugcacgacuuccgcagcgacgagaucgagcaccuggugguggaggagcucgucaagaagcgggaggagugccuggacgcccuggaguccaucaugaccaccaagagcguguccuuccgccggcucagccaccuccgcaagcuggugcccggguucggcaaggccuacaccauguucaacaagacgcucauggaggccgacgcccacuacaaguccguccggaccuggaacgagaucauccccagcaaggggugccugcgcgugggcggccggugccacccccacgucaacgggguguucuucaacggcaucauccuggggccggacggccacgugcucauccccgagaugcaguccagccugcugcagcagcacauggagcuccuggaguccagcgucaucccccugaugcacccccucgcggacccguccaccguguucaaggacggggacgaggccgaggacuucguggagguccaccuccccgacgugcacaagcaggucagcggcguggaccugggccugcccaacugggggaaguacgugcugcuguccgccggcacccucaucgcccugaugcugaucaucuuccucaugacgugcugccgccgggugaaccgccccgagagcacccaccggucccuggggcgcaccggccgcaaggucagcgugaccucccagagcgggaaggugaucuccagcugggagagcuacaaguccggcggcgagacgcggcuguga

SEQ ID NO: 95739 - RNA, 1575 nt, Artificial Sequence; identical to SEQ ID NO: 95728
  derived and/or modified CDS sequence (opt1) from glycoprotein__RABV__KR906753.1

SEQ ID NO: 95740 - RNA, 1575 nt, Artificial Sequence
  derived and/or modified CDS sequence (opt1) from glycoprotein__RABV__KR906755.1
auggugccccaggcccugcuguucguccugcugcucguguucccgcugugcuucggcaaguuccccaucuacaccauccccgacaagcuggggcccuggagcccgaucgacauccaccaccucuccugccccaacaaccugguggucgaggacgagggcugcaccaaccugagcggguucuccuacauggagcucaaggugggcuacaucagcgccaucaaggugaacggguucacgugcaccggcgucgugaccgaggcggagaccuacacgaacuucgugggcuacgucaccaccaccuucaagcgcaagcacuuccggcccauccccgacgccugccgcgccgccuacaacuggaagauggccggggacccgcgguacgaggagucccugcacaaccccuaccccgacuaccacuggcugcgcacggugaagaccaccaaggagagccucgugaucaucucccccagcgucgcggaccuggacccguacgacaagucccugcacagccggguguucaccuccggcaagugcagcgggaucacgguguccagcaccuacugcuccaccaaccacgacuacaccaucuggaugcccgagaacccccgccucggcacgagcugcaacaucuucgucaacuccaaggggaagcgggccagcaagggcggcaagaccugcggguucguggacgagcgcggccuguacaagucccugaagggggccugcaagcucaagcugugcggcgugcugggccuccggcugauggacgggaccugggucgccaugcagaccagcgacgagacgaaguggugcagccccgaccagcuggugaacaugcacgacuuccgcuccgacgagaucgagcaccucguggucgaggagcuggugaagaagcgggaggagugccuggacgcgcucgagagcaucaugaccaccaaguccgugagcuuccgccggcugucccaccuccgcaagcucgucccgggcuucgggaaggccuacaccaucuucaacaagacgcugauggaggccgacgcccacuacaagagcgugcggaccuggaacgagaucauccccuccaagggcugccugcgcgucgggggccggugccacccccacgugaacggcguguucuucaacgggaucauccucggccccgacgggcacguccugaucccggagaugcagagcucccugcuccagcagcacauggagcugcuggagagcuccgugaucccccucaugcacccccuggccgaccccagcaccguguucaaggacggcgacgaggcggaggacuucgucgaggugcaccucccggacgugcacaagcaggucuccgggguggaccugggccugcccaacuggggcaaguacgugcugcucagcgccgggacccugaucgcccugaugcucaucaucuuccugaugacgugcugccgccgggucaaccgccccgaguccacccagcggagccugggcgggaccggccgcaagguguccgugaccagccaguccgggaaggucaucagcagcugggaguccuacaagagcggcggcgagacgcgccuguga

SEQ ID NO: 95741 - RNA, 1575 nt, Artificial Sequence
  derived and/or modified CDS sequence (opt1) from glycoprotein__RABV__KR906756.1
auggugccccaggcccugcuguucguccugcugcucguguucccgcugugcuucggcaaguuccccaucuacaccauccccgacaagcuggggcccuggagcccgaucgacauccaccaccucuccugccccaacaaccugguggucgaggacgagggcugcaccaaccugagcggguucuccuacauggagcucaaggugggcuacaucagcgccaucaaggugaacggguucacgugcaccggcgucgugaccgaggcggagaccuacacgaacuucgugggcuacgucaccaccaccuucaagcgcaagcacuuccggcccauccccgacgccugccgcgccgccuacaacuggaagauggccggggacccgcgguacgaggagucccugcacaaccccuaccccgacuaccacuggcugcgcacggugaagaccaccaaggagagccucaucaucaucucccccagcguggcggaccuggacccguacgacaagucccugcacagccgggucuucaccuccggcaagugcagcgggaucacgguguccagcaccuacugcuccaccaaccacgacuacaccaucuggaugcccgagaacccccgccucggcacgagcugcaacaucuucgugaacuccaaggggaagcgggccagcaagggcggcaagaccugcggguucgucgacgagcgcggccuguacaagucccugaagggggccugcaagcucaagcugugcggcgugcugggccuccggcugaucgacgggaccuggguggccaugcagaccagcgacgagacgaaguggugcagccccgaccagcuggucaacaugcacgacuuccgcuccgacgagaucgagcaccucgugguggaggagcuggucaagaagcgggaggagugccuggacgcgcucgagagcaucaugaccaccaaguccgugagcuuccgccggcugucccaccuccgcaagcucgugccgggcuucgggaaggccuacaccaucuucaacaagacgcugauggaggccgacgcccacuacaagagcguccggaccuggaacgagaucauccccuccaagggcugccugcgcgucgggggccggugccacccccacgugaacggcguguucuucaacgggaucauccucggccccgacgggcacgugcugaucccggagaugcagagcucccugcuccagcagcacauggagcugcuggagagcuccgucaucccccucaugcacccccuggccgaccccagcaccguguucaaggacggcgacgaggcggaggacuucguggagguccaccucccggacgugcacaagcaggucuccgggguggaccugggccugcccaacuggggcaaguacgugcugcucagcgccgggacccugaucgcccugaugcucaucaucuuccugaugacgugcugccgccgggugaaccgccccgaguccacccagcggagccugggcgggaccggccgcaaggucuccgugaccagccaguccgggaaggugaucagcagcugggaguccuacaagagcggcggcgagacgcgccuguga

SEQ ID NO: 95742 - RNA, 1575 nt, Artificial Sequence; identical to SEQ ID NO: 95741
  derived and/or modified CDS sequence (opt1) from glycoprotein__RABV__KR906760.1

SEQ ID NO: 95743 - RNA, 1575 nt, Artificial Sequence
  derived and/or modified CDS sequence (opt1) from glycoprotein__RABV__KR906762.1
auggugccccaggcccgccuguucgucccgcuccugguguucccccugugcuucggcaaguuccccaucuacaccauccccgacaagcucgggccguggagccccaucgacauccaccaccuguccugccccaacaaccugguggucgaggacgagggcugcaccaaccucagcggguucuccuacauggagcugaaggugggcuacaucagcgccaucaaggugaacggguucacgugcaccggcgucgugaccgaggcggagaccuacacgaacuucgugggcuacgucaccaccaccuucaagcggaagcacuuccgccccaucccggacgccugccgggccgccuacaacuggaagauggccggggacccccgcuacgaggagucccugcacaaccccuaccccgacuaccacuggcuccggacggugaagaccaccaaggagagccuggugaucaucuccccgagcgucgcggaccuggaccccuacgacaagucccuccacagccgcguguucaccggcgggaagugcuccggcaucacggugagcuccaccuacugcagcaccaaccacgacuacaccaucuggaugcccgagaacccccggcuggggacguccugcaacaucuucgccaacagcaagggcaagcgcgccuccaagggcgggaagaccugcggcuucgucgacgagcgggggcuguacaagagccucaagggcgccugcaagcugaagcugugcggcgugcucgggcugcgccugauggacggcaccuggguggcgaugcagaccuccgacgagacgaaguggugcccgcccgaccagcucgucaacaugcacgacuuccggagcgacgagaucgagcaccuggugguggaggagcuggucaagaagcgcgaggagugccucgacgcccuggagagcaucaugaccaccaaguccgugagcuuccggcgccugucccaccuccggaagcuggugcccggguucggcaaggccuacaccaucuucaacaagacgcugauggaggccgacgcccacuacaagagcguccgcaccuggaacgagaucauccccuccaaggggugccuccgggugggcggccgcugccacccgcacgucaacgggguguucuucaacggcaucauccuggggcccgacggccacgugcugauccccgagaugcagagcucccuccugcagcagcacauggagcugcucgagagcuccgucaucccccugaugcacccgcuggcggaccccagcaccguguucaaggacggggacgaggccgaggacuucguggagguccaccuccccgacgugcacaagcaggucuccggcguggaccugggccugcccaacugggggaaguacauccuccugagcgccggcacccugaucgcccucaugcugaucaucuuccugaugacgugcugccggcgcgugucccggccggagagcacccagcgcucccucgggcgcaccggccggaaggugagcgucaccucccagagcgggaaggugaucuccagcugggagagcuacaaguccggcggcgagacgcgccuguga

SEQ ID NO: 95744 - RNA, 1575 nt, Artificial Sequence; identical to SEQ ID NO: 95722
  derived and/or modified CDS sequence (opt1) from glycoprotein__RABV__KR906763.1

SEQ ID NO: 95745 - RNA, 1575 nt, Artificial Sequence
  derived and/or modified CDS sequence (opt1) from glycoprotein__RABV__KR906766.1
auggugccccagacccugcuguucgucccgcugcugguguucagccucugcuucggcaaguuccccaucuacaccauccccgacaagcuggggcccugguccccgaucgacauccaccaccugagcugccccaacaaccucguggucgaggacgagggcugcacgaaccuguccggguucagcuacauggagcugaaggugggcuacaucuccgccauccgcgugaacggguucacgugcaccggcgucgugaccgaggccgagaccuacaccaacuucgugggcuacgucaccaccacguucaagcggaagcacuuccgccccauccccgacgcgugccgggccgccuacaacuggaagauggccggggacccgcgcuacgaggagagccuccacaaccccuaccccgacuaccacuggcugcggaccgugaagaccaccaaggagucccuggugaucaucagccccuccgucgccgaccucgacccguacgacaagagccugcacucccgcguguuccccagcggcaagugcuccgggaucacggugagcuccaccuacugcagcaccaaccacgacuacaccaucuggaugcccgagaacccccggcugggcacguccugcaacaucuucaccaacagccgcgggaagcgggcguccaagggcggcaagaccugcggguucgucgacgagcgcggccucuacaagagccugaagggggccugcaagcugaagcucugcggcgugcugggccugcggcucauggacgggaccuggguggccaugcagacgagcgacgagaccaaguggugcccgcccgaccagcuggucaacaugcacgacuuccgcuccgacgagaucgagcaccuggugguggaggagcucgucaagaagcgggaggagugccuggacgcccuggagagcaucaugaccaccaaguccgugagcuuccgccggcucucccaccuccgcaagcuggugcccggcuucgggaaggcguacacgaucuucaacaagacccucauggaggccgacgcccacuacaagagcguccggaccuggaacgagaucauccccuccaagggcugccugcgcgucgggggccggugccacccgcacgugaacggcguguucuucaacgggaucauccugggccccgacgggcacgugcucauccccgagaugcagagcucccugcugcagcagcacauggagcuccuggagagcuccgucaucccccugaugcacccgcucgccgaccccagcaccguguucaaggacggcgacgaggccgaggacuucguggagguccaccuccccgacgugcacaagcaggucuccgggguggaccugggccugcccaacuggggcaaguacgugcugcugagcgcggggacgcucaucgcccugaugcugaucaucuuccucaugaccugcugccgccgggugaaccgcccggaguccacccagcgcagccugggcgggacccggcgcaaggucuccgugacgagccaguccggcaaggugaucagcagcugggaguccuacaagagcgggggcgagacccggcuguga

SEQ ID NO: 95746 - RNA, 1575 nt, Artificial Sequence
  derived and/or modified CDS sequence (opt1) from glycoprotein__RABV__KR906767.1
auggugccccaggcccugcuguucgucccgcugcugguguucccccucugcuucggcaaguuccccaucuacaccauccccgacaagcuggggccguggagccccaucgacauccaccaccuguccugccccaacaaccucguggucgaggacgagggcugcaccaaccugagcggguucuccuacauggagcugaaggugggcuacaucagcgccaucaaggugaacggguucacgugcaccggcgucgugaccgaggcggagaccuacacgaacuucgugggcuacgucaccaccaccuucaagcgcaagcacuuccggcccaucccggacgccugccgcgccgccuacaacuggaagauggccggggacccccgguacgaggagucccuccacaaccccuaccccgacuaccacuggcugcgcacggugaagaccaccaaggagagccuggugaucaucuccccgagcgucgcggaccucgaccccuacgacaagucccugcacagccggguguucaccuccggcaagugcagcgggaucacgguguccagcaccuacugcuccaccaaccacgacuacaccaucuggaugcccgagaacccccgccugggcacgagcugcaacaucuucgccaacuccaaggggaagcgggccagcaagggcggcaagaccugcggguucgucgacgagcgcggccucuacaagucccugcgcggggccugcaagcugaagcucugcggcgugcugggccugcggcucauggacgggaccuggguggcgaugcagaccagcgacgagacgaaguggugcccgcccgaccagcuggucaacaugcacgacuuccggagcgacgagaucgagcaccuggugguggaggagcucgucaagaagcgcgaggagugccuggacgcccuggaguccaucaugaccaccaagagcguguccuuccggcgccucagccaccuccggaagcuggugcccggcuucgggaaggccuacaccaucuucaacaagacgcucauggaggccgacgcccacuacaaguccguccgcaccuggaacgagaucauccccagcaagggcugccugcgggucgggggccgcugccacccgcacgugaacggcguguucuucaacgggaucauccugggccccgacgggcacgugcucauccccgagaugcaguccagccugcugcagcagcacauggagcuccuggaguccagcgucaucccccugaugcacccgcucgcggaccccuccaccguguucaaggacggcgacgaggccgaggacuucguggagguccaccuccccgacgugcacaagcaggucagcgggguggaccugggccugcccaacuggggcaaguacgugcugcuguccgccgggacccucaucgcccugaugcugaucaucuuccucaugacgugcugccggcgcgugagccggccggaguccacccagcgcagccugggcgggaccggccgcaaggucuccgugaccagccaguccgggaaggugaucagcagcugggaguccuacaagagcggcggcgagacgcggcuguga

SEQ ID NO: 95747 - RNA, 1575 nt, Artificial Sequence; identical to SEQ ID NO: 95516
  derived and/or modified CDS sequence (opt1) from glycoprotein__RABV__KR906768.1

SEQ ID NO: 95748 - RNA, 1575 nt, Artificial Sequence
  derived and/or modified CDS sequence (opt1) from glycoprotein__RABV__KR906769.1
auggugccccaggcccugcuguucgucccgcugcugguguucccccucugcuucggcaaguuccccaucuacaccauccccgacaagcuggggccguggagccccaucgacauccaccaccuguccugccccaacaaccucguggucgaggacgagggcugcaccaaccugagcggguucuccuacauggagcugaaggugggcuacaucagcgccaucaaggugaacggguucacgugcaccggcgucgugaccgaggcggagaccuacacgaacuucgugggcuacgucaccaccaccuucaagcgcaagcacuuccggcccaucccggacgccugccgcgccgccuacaacuggaagauggccggggacccccgguacgaggagucccuccacaaccccuaccccgacuaccacuggcugcgcacggugaagaccaccaaggagagccuggugaucaucuccccgagcgucgcggaccucgaccccuacgacaagucccugcacagccggguguuccccuccggcaagugcagcgggaucaccguguccagcacguacugcuccaccaaccacgacuacaccaucuggaugcccgagaacccgcgccugggcaccagcugcaacaucuucgccaacuccaaggggaagcgggccagcaagggcggcaagacgugcggguucgucgacgagcgcggccucuacaagucccugaagggggccugcaagcugaagcucugcggcgugcugggccugcggcucauggacgggaccuggguggcgaugcagaccagcgacgagaccaaguggugcccgcccgaccagcuggucaacaugcacgacuuccgcagcgacgagaucgagcaccuggugguggaggagcucgucaagaagcgggaggagugccuggacgcccuggaguccaucaugacgaccaagagcguguccuuccgccggcucagccaccuccgcaagcuggugcccggcuucgggaaggccuacaccaucuucaacaagacccucauggaggccgacgcccacuacaaguccguccggacguggaacgagaucauccccagcaagggcugccugcgcgucgggggccggugccacccccacgugaacggcguguucuucaacgggaucauccugggccccgacgggcacgugcucauccccgagaugcaguccagccugcugcagcagcacauggagcuccuggaguccagcgucaucccgcugaugcacccccucgcggaccccuccaccguguucaaggacggcgacgaggccgaggacuucguggagguccaccuccccgacgugcacaagcaggucagcgggguggaccugggccugccgaacuggggcaaguacgugcugcuguccgccgggacccucaucgcccugaugcugaucaucuuccucaugaccugcugccgccgggugagccgccccgaguccacgcagcggagccugggccgcaccgggcgcaaggucuccgugaccagccaguccggcaaggugaucagcagcugggaguccuacaagagcgggggcgagacccggcuguga

SEQ ID NO: 95749 - RNA, 1575 nt, Artificial Sequence; identical to SEQ ID NO: 95721
  derived and/or modified CDS sequence (opt1) from glycoprotein__RABV__KR906770.1

SEQ ID NO: 95750 - RNA, 1575 nt, Artificial Sequence
  derived and/or modified CDS sequence (opt1) from glycoprotein__RABV__KR906771.1
auggugccccaggcccugcuguucguccugcugcucguguucccgcugugcuucggcaaguuccccaucuacaccauccccgacaagcuggggcccuggagcccgaucgacauccaccaccucuccugccccaacaaccugguggucgaggacgagggcugcaccaaccugagcggguucuccuacauggagcucaaggugggcuacaucagcgccaucaaggugaacggguucacgugcaccggcgucgugaccgaggcggagaccuacacgaacuucgugggcuacgucaccaccaccuucaagcgcaagcacuuccggcccauccccgacgccugccgcgccgccuacaacuggaagauggccggggacccgcgguacgaggagucccugcacaaccccuaccccgacuaccacuggcugcgcacggugaagaccaccaaggagagccucgugaucaucucccccagcgucgcggaccuggacccguacgacaagucccugcacagccggguguucaccuccggcaagugcagcgggaucacgguguccagcaccuacugcuccaccaaccacgacuacaccaucuggaugcccgagaacccccgccucggcacgagcugcaacaucuucgucaacuccaaggggaagcgggccagcaagggcggcaagaccugcggguucguggacgagcgcggccuguacaagucccugaagggggccugcaagcucaagcugugcggcgugcugggccuccggcugauggacgggaccugggucgccaugcagaccagcgacgagacgaaguggugcagccccgaccagcuggugaacaugcacgacuuccgcuccgacgagaucgagcaccucguggucgaggagcuggugaagaagcgggaggagugccuggacgcgcucgagagcaucaugaccaccaaguccgugagcuuccgccggcugucccaccuccgcaagcucgucccgggcuucgggaaggccuacaccaucuucaacaagacgcugauggaggccgacgcccacuacaagagcgugcggaccuggaacgagaucauccccuccaagggcugccugcgcgucgggggccggugccacccccacgugaacggcguguucuucaacgggaucauccucggccccaacgggcacguccugaucccggagaugcagagcucccugcuccagcagcacauggagcugcuggagagcuccgugaucccccucaugcacccccuggccgaccccagcaccguguucaaggacggcgacgaggcggaggacuucgucgaggugcaccucccggacgugcacaagcaggucuccgggguggaccugggccugcccaacuggggcaaguacgugcugcucagcgccgggacccugaucgcccugaugcucaucaucuuccugaugacgugcugccgccgggucaaccgccccgaguccacccagcggagccugggcgggaccggccgcaagguguccgugaccagccaguccgggaaggucaucagcagcugggaguccuacaagagcggcggcgagacgcgccuguga

SEQ ID NO: 95751 - RNA, 1575 nt, Artificial Sequence; identical to SEQ ID NO: 95724
  derived and/or modified CDS sequence (opt1) from glycoprotein__RABV__KR906773.1

SEQ ID NO: 95752 - RNA, 1575 nt, Artificial Sequence; identical to SEQ ID NO: 95721
  derived and/or modified CDS sequence (opt1) from glycoprotein__RABV__KR906776.1

SEQ ID NO: 95753 - RNA, 1575 nt, Artificial Sequence; identical to SEQ ID NO: 95724
  derived and/or modified CDS sequence (opt1) from glycoprotein__RABV__KR906778.1

SEQ ID NO: 95754 - RNA, 1575 nt, Artificial Sequence
  derived and/or modified CDS sequence (opt1) from glycoprotein__RABV__KR906779.1
auggugccccaggcccugcuguucgucccgcugcugguguucccccucugcuucggcaaguuccccaucuacaccauccccgacaagcuggggccguggagccccaucgacauccaccaccuguccugccccaacaaccucguggucgaggacgagggcugcaccaaccugagcggguucuccuacauggagcugaaggugggcuacaucagcgccaucaaggugaacggguucacgugcaccggcgucgugaccgaggcggagaccuacacgaacuucgugggcuacgucaccaccaccuucaagcgcaagcacuuccggcccaucccggacgccugccgcgccgccuacaacuggaagauggccggggacccccgguacgaggagucccuccacaaccccuaccccgacuaccacuggcugcgcacggugaagaccaccaaggagagccuggugaucaucuccccgagcgucgcggaccucgaccccuacgacaagucccugcacagccggguguuccccuccggcaagugcagcgggaucaccguguccagcacguacugcuccaccaaccacgacuacaccaucuggaugcccgagaacccgcgccugggcaccagcugcgacaucuucacgaacucccgggggaagcgcgccagcaagggcggcaagaccugcggguucgucgacgagcggggccucuacaagucccugaagggggccugcaagcugaagcucugcggcgugcugggccugcgccucauggacgggaccuggguggccaugcagaccagcgacgagacgaaguggugcccgcccgaccagcuggucaacaugcacgacuuccggagcgacgagaucgagcaccuggugguggaggagcucgucaagaagcgcgaggagugccuggacgcgcuggaguccaucaugaccaccaagagcguguccuuccggcgccucagccaccuccggaagcuggugcccggcuucgggaaggccuacaccaucuucaacaagacgcucauggaggccgacgcccacuacaaguccguccgcaccuggaacgagaucauccccagcaagggcugccugcgggucgggggccgcugccacccccacgugaacggcguguucuucaacgggaucauccugggccccgacgggcacgugcucauccccgagaugcaguccagccugcugcagcagcacauggagcuccuggaguccagcgucaucccgcugaugcacccccucgccgaccccuccaccguguucaaggacggcgacgaggcggaggacuucguggagguccaccuccccgacgugcacaagcaggucagcgggguggaccugggccugccgaacuggggcaaguacgugcugcuguccgccgggacccucaucgcccugaugcugaucaucuuccucaugacgugcugccggcgcgugaaccggcccgagagcacccagcgcucccugggcgggaccggccgcaaggucagcgugaccucccagagcgggaaggugaucuccagcugggagagcuacaaguccggcggcgagacgcggcuguga

SEQ ID NO: 95755 - RNA, 1575 nt, Artificial Sequence; identical to SEQ ID NO: 95724
  derived and/or modified CDS sequence (opt1) from glycoprotein__RABV__KR906780.1

SEQ ID NO: 95756 - RNA, 1575 nt, Artificial Sequence; identical to SEQ ID NO: 95724
  derived and/or modified CDS sequence (opt1) from glycoprotein__RABV__KR906781.1

SEQ ID NO: 95757 - RNA, 1575 nt, Artificial Sequence; identical to SEQ ID NO: 95740
  derived and/or modified CDS sequence (opt1) from glycoprotein__RABV__KR906782.1

SEQ ID NO: 95758 - RNA, 1575 nt, Artificial Sequence; identical to SEQ ID NO: 95721
  derived and/or modified CDS sequence (opt1) from glycoprotein__RABV__KR906784.1

SEQ ID NO: 95759 - RNA, 1575 nt, Artificial Sequence
  derived and/or modified CDS sequence (opt1) from glycoprotein__RABV__KR906785.1
auggugccccaggcccugcuguucgucccgcugcugguguucccccucugcuucggcaaguuccccaucuacaccauccccgacaagcuggggccguggagccccaucgacauccaccaccuguccugccccaacaaccucguggucgaggacgagggcugcaccaaccugagcggguucuccuacauggagcugaaggugggcuacaucagcgccaucaaggugaacggguucacgugcaccggcgucgugaccgaggcggagaccuacacgaacuucgugggcuacgucaccaccaccuucaagcgcaagcacuuccggcccaucccggacgccugccgcgccgccuacaacuggaagauggccggggacccccgguacgaggagucccuccacaaccccuaccccgacuaccacuggcugcgcacggugaagaccaccaaggagagccuggugaucaucuccccgagcgucgcggaccucgaccccuacgacaagucccugcacagccggguguuccccuccggcaagugcagcgggaucaccguguccagcacguacugcuccaccaaccacgacuacaccaucuggaugcccgagaacccgcgccugggcaccagcugcgacaucuucacgaacucccgggggaagcgcgccagcaagggcggcaagaccugcggguucgucgacgagcggggccucuacaagucccugcgcggggccugcaagcugaagcucugcggcgugcugggccugcggcucauggacgggaccuggguggccaugcagaccagcgacgagacgaaguggugcccgcccgaccagcuggucaacaugcacgacuuccgcagcgacgagaucgagcaccuggugguggaggagcucgucaagaagcgggaggagugccuggacgcgcuggaguccaucaugaccaccaagagcguguccuuccgccggcucagccaccuccgcaagcuggugcccggcuucgggaaggccuacaccaucuucaacaagacgcucauggaggccgacgcccacuacaaguccguccggaccuggaacgagaucauccccagcaagggcugccugcgcgucgggggccggugccacccccacgugaacggcguguucuucaacgggaucauccugggccccgacgggcacgugcucauccccgagaugcaguccagccugcugcagcagcacauggagcuccuggaguccagcgucaucccgcugaugcacccccucgccgaccccuccaccguguucaaggagggcgacgaggcggaggacuucguggagguccaccuccccgacgugcacaagcaggucagcgggguggaccugggccugccgaacuggggcaaguacgugcugcuguccgccgggacccucaucgccagcaugcugaucaucuuccugaugacgugcugccgccgggugaaccgccccgagcccacccagcgcucccucggcgggaccggccggaaggucagcgugaccucccagagcgggaaggugaucuccagcugggagagcuacaaguccggcggcgagacgcgccuguga

SEQ ID NO: 95760 - RNA, 1575 nt, Artificial Sequence
  derived and/or modified CDS sequence (opt1) from glycoprotein__RABV__KR906787.1
auggugccccaggcccugcuguucguccugcugcucguguucccgcugugcuucggcaaguuccccaucuacaccauccccgacaagcuggggcccuggagcccgaucgacauccaccaccucuccugccccaacaaccugguggucgaggacgagggcugcaccaaccugagcggguucuccuacauggagcucaaggugggcuacaucagcgccaucaaggugaacggguucacgugcaccggcgucgugaccgaggcggagaccuacacgaacuucgugggcuacgucaccaccaccuucaagcgcaagcacuuccggcccauccccgacgccugccgcgccgccuacaacuggaagauggccggggacccgcgguacgaggagucccugcacaaccccuaccccgacuaccacuggcugcgcacggugaagaccaccaaggagagccucgugaucaucucccccagcgucgcggaccuggacccguacgacaagucccugcacagccggguguucaccuccggcaagugcagcgggaucacgguguccagcaccuacugcuccaccaaccacgacuacaccaucuggaugcccgagaacccccgccucggcacgagcugcaacaucuucgucaacuccaaggggaagcgggccagcaagggcggcaagaccugcggguucguggacgagcgcggccuguacaagucccugaagggggccugcaagcucaagcugugcggcgugcugggccuccggcugauggacgggaccugggucgccaugcagaccagcgacgagacgaaguggugcagccccgaccagcuggugaacaugcacgacuuccgcuccgacgagaucgagcaccucguggucgaggagcuggugaagaagcgggaggagugccuggacgcgcucgagagcaucaugaccaccaaguccgugagcuuccgccggcugucccaccuccgcaagcucgucccgggcuucgggaaggccuacaccaucuucaacaagacgcugauggaggccgacgcccacuacaagagcgugcggaccuggaacgagaucauccccuccaagggcugccugcgcgucgggggccggugccacccccacgugaacggcguguucuucaacgggaucauccucggccccgacgggcacguccugaucccggagaugcagagcucccugcuccagcagcacauggagcugcuggagagcuccgugaucccccucaugcacccccuggccgaccccagcaccguguucaaggacggcgacgaggcggaggacuucgucgaggugcaccucccggacgugcacaagcaggucuccgggguggaccugggccugcccaacuggggcaaguacgugcugcucagcgccgggacccugaucgcccugaugcucaucaucuuccugaugacgugcugccgccgggucaaccgccccgaguccacccagcggagccugcgcggcaccgggcgcaagguguccgugaccagccaguccggcaaggucaucagcagcugggaguccuacaagagcgggggcgagacgcggcuguga

SEQ ID NO: 95761 - RNA, 1575 nt, Artificial Sequence
  derived and/or modified CDS sequence (opt1) from glycoprotein__RABV__KR906788.1
auggugccccaggcccugcuguucgucccgcugcugguguucccccucugcuucggcaaguuccccaucuacaccauccccgacaagcuggggccguggagccccaucgacauccaccaccuguccugccccaacaaccucguggucgaggacgagggcugcaccaaccugagcggguucuccuacauggagcugaaggugggcuacaucagcgccaucaaggugaacggguucacgugcaccggcgucgugaccgaggcggagaccuacacgaacuucgugggcuacgucaccaccaccuucaagcgcaagcacuuccggcccaucccggacgccugccgcgccgccuacaacuggaagauggccggggacccccgguacgaggagucccuccacaaccccuaccccgacuaccacuggcugcgcacggugaagaccaccaaggagagccuggugaucaucuccccgagcgucgcggaccucgaccccuacgacaagucccugcacagccggguguucaccuccggcaagugcagcgggaucacgguguccagcaccuacugcuccaccaaccacgacuacaccaucuggaugcccgagaacccccgccugggcacgagcugcaacaucuucgucaacuccaaggggaagcgggccagcaagggcggcaagaccugcggguucguggacgagcgcggccucuacaagucccugaagggggccugcaagcugaagcucugcggcgugcugggccugcggcucauggacgggaccugggucgccaugcagaccagcgacgagacgaaguggugcagcccggaccagcuggugaacaugcacgacuuccgcuccgacgagaucgagcaccugguggucgaggagcucgugaagaagcgggaggagugccuggacgcgcuggagagcaucaugaccaccaaguccgugagcuuccgccggcucucccaccuccgcaagcugguccccggcuucgggaaggccuacaccaucuucaacaagacgcucauggaggccgacgcccacuacaagagcgugcggaccuggaacgagaucauccccuccaagggcugccugcgcgucgggggccggugccacccccacgugaacggcguguucuucaacgggaucauccugggcccggacgggcacguccucauccccgagaugcagagcucccugcugcagcagcacauggagcuccuggagagcuccgugaucccccugaugcacccccucgccgacccgagcaccguguucaaggacggcgacgaggcggaggacuucgucgaggugcaccuccccgacgugcacaagcaggucuccgggguggaccugggccugcccaacuggggcaaguacgugcugcugagcgccgggacccucaucgcccugaugcugacgaucuuccucaugaccugcugccgccgggucaaccgccccgaguccacccagcggagccugggcgggaccggccgcaagguguccgugacgagccaguccgggaaggucaucagcagcugggaguccuacaagagcggcggcgagacccgccuguga

SEQ ID NO: 95762 - RNA, 1575 nt, Artificial Sequence; identical to SEQ ID NO: 95754
  derived and/or modified CDS sequence (opt1) from glycoprotein__RABV__KR906790.1

SEQ ID NO: 95763 - RNA, 1575 nt, Artificial Sequence; identical to SEQ ID NO: 95716
  derived and/or modified CDS sequence (opt1) from glycoprotein__RABV__KT023100.1

SEQ ID NO: 95764 - RNA, 1575 nt, Artificial Sequence
  derived and/or modified CDS sequence (opt1) from glycoprotein__RABV__KT221112.1
augaucccccaggcccugcuguucgugccgcugcuggucuucagccucugcuucggcaaguuccccaucuacaccauccccgacaagcuggggcccugguccccgaucgacauccaccaccugagcugccccaacaaccucgugguggaggacgagggcugcaccaaccuguccggguucagcuacauggagcugaaggucggcuacaucuccgccaucaaggugaacggguucacgugcaccggcguggucaccgaggcggagaccuacacgaacuucgugggcuacgugaccaccaccuucaagcgcaagcacuuccggcccacgcccgacgccugccgcgccgccuacaacuggaagauggccggggacccgcgguacgaggagagccucaacaaccccuaccccgacuaccacuggcugcgcaccgucaagaccaccaaggagucccugguggugaucagccccuccgucgcggaccucgacccguacgacaagagccugcacucccggguguuccccagcggcaagugcuccgggaucacggugagcuccacgugcugcagcaccaaccacgacuacaccaucuggaugcccgagaacccccgccugggcaccuccugcgacaucuucgucaacagccgggggaagcgcgccuccaagggcagcaagaccugcggcuucguggacgagcgggggcucuacaagagccugaagggcgccugcaagcugaagcucugcggggugcugggccugcgccucauggacggcaccugggucgccauccagaccuccgacgagacgaaguggugcccgcccgaccagcuggugaaccugcacgacuuccggagcgacgagaucgagcaccucguggucgaggagcuggugaagaagcgcgaggagugccuggacgcgcucgaguccaucaugaccaccaagagcguguccuuccggcgccugagccaccuccggaagcucguccccggguucggcaaggccuacaccaucuucaacaagacgcugauggaggccgacgcccacuacaaguccgugcgcaccuggaacgagaucauccccagcaaggggugccugcgggucggcgggcgcugccacccgcacgugaacggcguguucuucaacggcaucauccucgggcccgacggccacguccugauccccgagaugcaguccagccugcuccagcagcacauggagcugcuggaguccagcgugaucccccucaugcacccgcuggccgaccccuccaccaucuucaaggacggggacgaggcggaggacuucguggagguccaccuccccgacgugcacaagcaggucagcggcguggaccuggggcugcccaacuggggcaaguacgugcugauguccgccggcgcccucaucgcccugaugcugaugaucuucagcaugaccugcugccggaagacggaccgcaucggguccacccaccacggcccgggggagaccggccggaaggugagcgucaccucccagaacgggcgcgugaucgccagcugggagagcuacaaguccggcggcgagacgaagcucuga

SEQ ID NO: 95765 - RNA, 1575 nt, Artificial Sequence
  derived and/or modified CDS sequence (opt1) from glycoprotein__RABV__KT221113.1
augaucccccaggcccugcuguucgugccgcugcuggucuucagccucugcuucggcaaguuccccaucuacaccauccccgacaagcuggggcccugguccccgaucgacauccaccaccugagcugccccaacaaccucgugguggaggacgagggcugcaccaaccuguccggguucagcuacauggagcugaaggucggcuacaucuccgccaucaaggugaacggguucacgugcaccggcguggucaccgaggcggagaccuacacgaacuucgugggcuacgugaccaccaccuucaagcgcaagcacuuccggcccacgcccgacgccugccgcgccgcccacaacuggaagauggccggggacccgcgguacgaggagagccuccacaaccccuaccccgacuaccacuggcugcgcaccgucaagaccaccaaggagucccuggugaucaucagccccuccguggcggaccucgacccguacgacaagagccugcacucccgggucuuccccagcggcaagugcuccgggaucacggugagcuccaccuacugcagcaccaaccacgacuacaccaucuggaugcccgagaacccccgccugggcacguccugcgacaucuucgugaacagccgggggaagcgcgccuccaagggcagcaagaccugcggcuucgucgacgagcgggggcucuacaagagccugaagggcgccugcaagcugaagcucugcggggugcugggccugcgccucauggacggcaccuggguggccauccagaccuccgacgagacgaaguggugcccgcccgaccagcuggucaaccugcacgacuuccggagcgacgagaucgagcaccucgugguggaggagcuggucaagaagcgcgaggagugccuggacgcgcucgaguccaucaugaccaccaagagcguguccuuccggcgccugagccaccuccggaagcucgugcccggguucggcaaggccuacaccaucuucaacaagacgcugauggaggccgacgcccacuacaaguccguccgcaccuggaacgagaucauccccagcaaggggugccugcgggugggcgggcgcugccacccgcacgucaacggcguguucuucaacggcaucauccucgggcccgacggccacgugcugauccccgagaugcaguccagccugcuccagcagcacauggagcugcuggaguccagcgucaucccccucaugcacccgcuggccgaccccuccaccaucuucaaggacggggacgaggcggaggacuucguggaggugcaccuccccgacguccaccgccaggugagcggcguggaccuggggcugcccaacuggggcaaguacguccugauguccgccggcgcccucguggcccugaugcugaugaucuuccucaugaccugcugcgugaagacggaccggaccgggagcacccaccacuccccgggcgagaccgggcggaaggucagcgugacgucccagaacggccgcgugaucgccagcugggagagcuacaaguccgggggcgagaccaagcuguga

SEQ ID NO: 95766 - RNA, 1575 nt, Artificial Sequence
  derived and/or modified CDS sequence (opt1) from glycoprotein__RABV__KT221114.1
augaucccccaggcccugcuguucgugccgcugcuggucuucagccucugcuucggcaaguuccccaucuacaccauccccgacaagcuggggcccugguccccgaucgacauccaccaccugagcugccccaacaaccucgugguggaggacgagggcugcaccaaccuguccggguucagcuacauggagcugaaggucggcuacaucuccgccaucaaggugaacggguucacgugcaccggcguggucaccgaggcggagaccuacacgaacuucgugggcuacgugaccaccaccuucaagcgcaagcacuuccggcccacgcccgacgccugccgcgccgcccacaacuggaagauggccggggacagccgguacgaggagucccuccacaacccguaccccgacuaccacuggcugcgcaccgucaagaccaccaaggagagccuggugaucaucucccccagcguggcggaccucgaccccuacgacaagucccugcacagccgggucuucccguccggcaagugcagcgggaucacgguguccagcaccuacugcuccaccaaccacgacuacaccaucuggaugcccgagaacccccgccugggcacgagcugcgacaucuucgugaacucccgggggaagcgcgccagcaagggcagcaagaccugcggcuucgucgacgagcgggggcucuacaagucccugaagggcgccugcaagcugaagcucugcggggugcugggccugcgccucauggacggcaccuggguggccauccagaccagcgacgagacgaaguggugcccgcccgaccagcuggucaaccugcacgacuuccgguccgacgagaucgagcaccucgugguggaggagcuggucaagaagcgcgaggagugccuggacgcgcucgagagcaucaugaccaccaaguccgugagcuuccggcgccugucccaccuccggaagcucgugcccggguucggcaaggccuacaccaucuucaacaagacgcugauggaggccgacgcccacuacaagagcguccgcaccuggaacgagaucauccccuccaaggggugccugcgggugggcgggcgcugccacccccacgucaacggcguguucuucaacggcaucauccucgggccggacggccacgugcugauccccgagaugcagagcucccugcuccagcagcacauggagcugcuggagagcuccgucaucccccucaugcacccccuggccgacccgagcaccaucuucaaggacggggacgaggcggaggacuucguggaggugcaccuccccgacguccaccgccagguguccggcguggaccuggggcugcccaacuggggcaaguacguccugaugagcgccggcgcccucguggcccugaugcugaugaucuuccucaugaccugcugcgugaagacggaccggaccggguccacccaccacagccccggcgagaccgggcggaaggucuccgugacgagccagaacggccgcgugaucgccagcugggaguccuacaagagcgggggcgagaccaagcuguga

SEQ ID NO: 95767 - RNA, 1575 nt, Artificial Sequence; identical to SEQ ID NO: 95765
  derived and/or modified CDS sequence (opt1) from glycoprotein__RABV__KT221115.1

SEQ ID NO: 95768 - RNA, 1575 nt, Artificial Sequence
  derived and/or modified CDS sequence (opt1) from glycoprotein__RABV__KT221117.1
augaucccccaggcccugcuguucgugccgcugcuggucuucagccucugcuucggcaaguuccccaucuacaccauccccgacaagcuggggcccugguccccgaucgacauccaccaccugagcugccccaacaaccucgugguggaggacgagggcugcaccaaccuguccggguucagcuacauggagcugaaggucggcuacaucuccgccaucaaggugaacggguucacgugcaccggcguggucaccgaggcggagaccuacacgaacuucgugggcuacgugaccaccaccuucaagcgcaagcacuuccggcccacgcccgacgccugccgcgccgccuacaacuggaagauggccggggacccgcgguacgaggagagccuccacaaccccuaccccgacuaccacuggcugcgcaccgucaagaccaccaaggagucccugguggugaucagccccuccgucgcggaccucgacccguacgacaagagccugcacucccggguguuccccagcggcaagugcuccgggaucacggugagcuccaccuacugcagcaccaaccacgacuacaccaucuggaugcccgagaacccccgccugggcacguccugcgacaucuucgucaacagccgggggaagcgcgccuccaagggcagcaagaccugcggcuucguggacgagcgggggcucuacaagagccugaagggcgccugcaagcugaagcucugcggggugcugggccugcgccucauggacggcaccugggucgccauccagaccuccgacgagacgaaguggugcccgcccgaccagcuggugaaccugcacgacuuccggagcgacgagaucgagcaccucguggucgaggagcuggugaagaagcgcgaggagugccuggacgcgcucgaguccaucaugaccaccaagagcguguccuuccggcgccugagccaccuccggaagcucguccccggguucggcaaggccuacaccaucuucaacaagacgcugauggaggccgacgcccacuacaaguccgugcgcaccuggaacgagaucauccccagcaaggggugccugcgggucggcgggcgcugccacccgcacgugaacggcguguucuucaacggcaucauccucgggcccgacggccacguccugauccccgagaugcaguccagccugcuccagcagcacauggagcugcuggaguccagcgugaucccccucaugcacccgcuggccgaccccuccaccaucuucaaggacggggacgaggcggaggacuucguggagguccaccuccccgacgugcacaagcaggucagcggcguggaccuggggcugcccaacuggggcaaguacgugcugauguccgccggcgcccucaucgcccugaugcugaugguguuccucaugaccugcugccggaagacggaccgcaccgggagcacccaccacuccccgggcgagaccgggcggaaggucagcgugacgucccagaacgagcgcgugaucgccagcugggagagcuacaaguccggcggggagaccaagcuguga

SEQ ID NO: 95769 - RNA, 1575 nt, Artificial Sequence
  derived and/or modified CDS sequence (opt1) from glycoprotein__RABV__KT221118.1
auggugccccaggcccugcuguucgucccgcugcuggccgugccccucugcuucggcaaguuccccaucuacaccauccccgacaagcuggggccguggagccccaucgacauccaccaccuguccugccccaacaaccucguggucgaggacgagggcugcaccaaccugagcggguucuccuacauggagcugaaggugggcuacaucagcgcgaucaaggugaacggguucacgugcaccggcgucgugaccgaggccgagaccuacacgaacuucgugggcuacgucaccaccaccuucaagcgcaagcacuuccggcccacgccggacgccugccgcuccgccuacaacuggaagauggccggggacccccgguacgaggagagccuccacaaccccuaccccgacuaccacuggcugcgcaccgugaagaccaccaaggaguccuucgugaucaucagcccguccgucgcggaccuggaccccuacgacaagagccuccacucccggguguucccccgcggcaagugcagcgggaucacgguguccagcaccuacugcuccaccaaccacgacuacaccaucuggaugcccgagaacccgcggcugggcacgagcugcgacaucuucaccaacucccgcgggaagcgggccagcaagggcuccaagaccugcggcuucgucgacgagcgcgggcuguacaagagccucaagggcgccugcaagcugaagcugugcggggugcucggccugcggcugauggacggcaccuggguggccauccagacgagcgacgagaccaaguggugcccgcccgaccagcucgucaaccugcacgacuuccacuccgacgagaucgagcaccuggugguggagguccucgugaagaagcgcgaggagugccuggacgcgcuggagagcaucaugaccaccaaguccgugagcuuccggcgccucucccaccuccggaagcugguccccggguucggcaaggccuacacgaucuucaacaagacccucauggaggccgacgcccacuacaagagcgugcgcaccuggaacgagaucauccccuccaaggggugccugcgggucggcgggcgcugccacccccacgugaacggcguguucuucaacggcaucauccuggggcccgacggccacguccucauccccgagaugcagagcucccugcugcagcagcacauggagcuccuggagagcuccgugaucccgcugaugcacccccucgccgaccccagcaccguguucaaggacggggacgaggcggaggacuucgucgaggugcaccuccccgacgugcacaagcaggucuccggcguggaccuggggcugccgagcuggggcaaguacgugcugauguccgccggcauccugacggcccucaugcugaugaucuuccugaugaccugcugccggcgcaccaaccgggccgagagcauccagcacucccucggggagaccggccgcaaggucagcgugacgucccagaacgggcgcgugaucagcagcugggaguccuacaagagcggcggggagaccaagcuguga

SEQ ID NO: 95770 - RNA, 1575 nt, Artificial Sequence; identical to SEQ ID NO: 94851
  derived and/or modified CDS sequence (opt1) from glycoprotein__RABV__KT221120.1

SEQ ID NO: 95771 - RNA, 1575 nt, Artificial Sequence
  derived and/or modified CDS sequence (opt1) from glycoprotein__RABV__KT221122.1
augaucccccaggugcuccuguucgucccguuccugguguucagcuccugcuucggcaaguuccccaucuacaccauccccgacaagcuggggcccuggagcccgaucgacauccaccaccucuccugccccaacaaccugguggucgaggacgagggcugcaccaaccugagcggguucuccuacauggagcucaaggugggcuacaucagcgccaucaaggugaacggguucacgugcaccggcgucgugaccgaggccgagaccuacacgaacuucgugggcuacgucaccaccaccuucaagcgcaagcacuuccggcccacgcccgacgcgugccgcgccgccuacaacuggaagauggccggggacccgcgguacgaggagucccugcacaaccccuaccccgacuaccacuggcugcgcaccgugaagaccagcaaggagucccucgugaucaucagccccuccgucgccgaccuggacccguacgacaagagccugcacucccggguguuccccggcgggaagugcagcggcaucaccguguccagcacgugcugcuccaccaaccacgacuacaccaucuggaugcccgagaacccccgccucgggaccagcugcgacaucuucacgaacucccggggcaagcgcgcgagcaagggcgggaagaccugcggcuucgucgacgagcgggggcuguacaagagccugaagggcgccugcaagcucaagcugugcggcgugcuggggcuccgccugauggacggcaccuggguggccauccagaccuccgacgagaucaaguggugcagcccggaccagcuggucaaccuccacgacuuccacuccgacgagaucgagcaccuggugguggaggagcuggucaagaagcgggaggagugccucgacgcccuggagacgaucaugaccaccaagagcguguccuuccgccggcugagccaccuccgcaagcuggugcccggguucggcaaggcguacaccaucuucaacaagacgcugauggaggccgacgcccacuacaaguccauccggaccuggaacgagaucauccccagcaaggggugccuccgcgucggcggccggugccacccccacgugaacggggucuucuucaacggcaucauccuggggccggacggccacgugcugauccccgagaugcaguccagccuccugcaccagcacauggagcugcucgaguccagcgugaucccccugaugcacccccuggccgacccguccaccgucuucaaggacggggacgaggccgaggacuucguggaggugcaccuccccgacguccacaagcagaucagcggcguggaccugggccugcccaacugggggaaguacgugcucgucuccgcgggcgcccugaccgcccugaugcucaugaucuuccugaugacgugcugccgcaagaccaaccgggccgagagcauccagcacucccccggggagaccggccgcaaggugagcgugaccucccacaacgggcgggucaucagcagcugggaguccuacaagagcggcggcgagacgaagcuguga

SEQ ID NO: 95772 - RNA, 1575 nt, Artificial Sequence; identical to SEQ ID NO: 94980
  derived and/or modified CDS sequence (opt1) from glycoprotein__RABV__KT221125.1

SEQ ID NO: 95773 - RNA, 1575 nt, Artificial Sequence; identical to SEQ ID NO: 94980
  derived and/or modified CDS sequence (opt1) from glycoprotein__RABV__KT221126.1

SEQ ID NO: 95774 - RNA, 1575 nt, Artificial Sequence; identical to SEQ ID NO: 95199
  derived and/or modified CDS sequence (opt1) from glycoprotein__RABV__KT221127.1

SEQ ID NO: 95775 - RNA, 1575 nt, Artificial Sequence; identical to SEQ ID NO: 94870
  derived and/or modified CDS sequence (opt1) from glycoprotein__RABV__KT221128.1

SEQ ID NO: 95776 - RNA, 1575 nt, Artificial Sequence; identical to SEQ ID NO: 94870
  derived and/or modified CDS sequence (opt1) from glycoprotein__RABV__KT221129.1

SEQ ID NO: 95777 - RNA, 1575 nt, Artificial Sequence
  derived and/or modified CDS sequence (opt1) from glycoprotein__RABV__KT221130.1
auggugcccccgguccugcuguucgugccccugcuguucuucagcuccugcuucggcaaguuccccaucuaccccaucccggacaagcucgggcccuggagccccaucgacauccaccaccugaccugccccaacaaccugguggucgagaacgagggcugcaccauccucuccggguucagcuacauggagcugaaggugggcuacaucuccccgaucaaggugaacggguucacgugcaccggcgucgugaccaaggccaagaccuacacgaacuucgugggcuacgucaccaccaccuucaagaagaagcacuucccgcccaugcccgacgccugcaaggcggccuacaacuggaagauggccggggacccccgcuacgagaagucccugcacaaccccuaccccgacuaccacuggcuccagacggugaagaccaccaaggagagccuggugaucaucagccccuccgucgccaaccuggacccguacgacaagagccuccacucccggguguuccccggcgggaagugcagcggcaucaccguguccagcacgugcugcuccaccaaccacgacuacaccaucuggaugcccgagaaccccaagcuggggaccagcugcgacaucuucacgaacucccgcggcaagcgggccagcaagggcgggaagaccugcggcuucgucgacgagcgcgggcuguacaagucccucaagggcgcgugcaagcugaagcugugcggcgugcucgggcugcggcugauggacggcaccuggguggccauccagaccagcgacgagaucaaguggugcagcccggaccagcucgucaaccugcacgacuuccacuccgacgagaucgagcaccuggugguggaggagcucgucaagaagcgcgaggagugccuggacgcccuggagacgaucaugaccaccaagagcguguccuuccggcgccucagccaccuccggaagcuggugcccggguucggcaaggccuacaccaucuucaacaagacgcucauggaggcggacgcccacuacaaguccauccgcaccuggaacgagaucauccccagcaaggggugccugcgggucggcggccgcugccacccccacgugaacggggucuucuucaacggcaucauccuggggccggacggccacgugcucauccccgagaugcaguccagccugcugcaccagcacauggagcuccuggaguccagcgugaucccccugaugcacccccucgccgacccguccaccgucuucaaggacggggacgaggccgaggacuucguggaggugcaccuccccgacguccacaagcagaucagcggcguggaccugggccugcccaacugggggaaguacgugcugaucuccgccggcgcgcugaccgcccucaugcugaugaucuuccugaugacgugcugccggaaggccaaccgcgccgagagcauccagcacaacccgggggagaccggccggaaggucuccgugaccagccacaacgggcgcgugaucuccagcugggaguccuacaagagcggcggcgagaccaagcucuga

SEQ ID NO: 95778 - RNA, 1575 nt, Artificial Sequence
  derived and/or modified CDS sequence (opt1) from glycoprotein__RABV__KT221132.1
augaucccccaggugcugcuguucguccaccuccugguguucagcuccugcuucggcaaguucccgaucuacaccauccccgacaagcucgggcccuggagccccaucgacauccaccaccuguccugcccgaacaaccugguggucgaggacgagggcugcaccaaccucagcggguucuccuacauggagcugaaggugggcuacaucagcgccaucaaggugaacggguucacgugcaccggcgucgugaccgaggccgagaccuacacgaacuucgugggcuacgucaccaccaccuucaagcgcaagcacuuccggcccaugcccgacgcgugccgcgccgccuacaacuggaagauggccggggacccccgguacgaggagucccugcacaacccguaccccgacuaccacuggcuccgcacggugaagaccaccaaggagagccuggugaucaucucccccagcgucgccgaccuggaccccuacgacaagucccuccacagccggguguucccgggcgggaagugcuccggcaucaccgugagcuccacgugcugcagcaccaaccacgacuacaccaucuggaugcccgagaacccccgccuggggaccuccugcgacaucuucacgaacagccggggcaagcgcgcguccaagggcgggaagaccugcggcuucgucgacgagcgggggcuguacaagagccucaagggcgccugcaagcugaagcugugcggcgugcucgggcugcgccugauggacggcaccuggguggccauccagaccagcgacgagaucaaguggugcucccccgaccagcucgucaaccugcacgacuuccacagcgacgagaucgagcaccuggugguggaggagcucgucaagaagcgggaggagugccuggacgcccuggagacgaucaugaccaccaaguccgugagcuuccgccggcucucccaccuccgcaagcuggugccgggguucggcaaggcguacaccaucuucaacaagacgcugauggaggccgacgcccacuacaagagcauccggaccuggaacgagaucauccccuccaaggggugccugcgcgucggcggccggugccacccccacgugaacggggucuucuucaacggcaucauccuggggcccgacggccacgugcucaucccggagaugcagagcucccugcugcaccagcacauggagcuccuggagagcuccgugaucccccugaugcacccccucgccgaccccagcaccgucuucaaggacggggacgaggccgaggacuucguggaggugcaccucccggacguccacaagcagaucuccggcguggaccugggccugcccaacugggggaaguacgugcugaucagcgcgggcgcccugaccgcccucaugcugacgaucuuccugaugaccugcugccgcaagaccaaccgggccggguccauccagcacagccccggcgagaccgggcgcaaggucuccgugacgagccacaacggccgggugaucuccagcugggagagcuacaaguccggcagcgagaccaagcucuga

SEQ ID NO: 95779 - RNA, 1575 nt, Artificial Sequence; identical to SEQ ID NO: 94851
  derived and/or modified CDS sequence (opt1) from glycoprotein__RABV__KT221133.1

SEQ ID NO: 95780 - RNA, 1575 nt, Artificial Sequence; identical to SEQ ID NO: 94851
  derived and/or modified CDS sequence (opt1) from glycoprotein__RABV__KT221134.1

SEQ ID NO: 95781 - RNA, 1575 nt, Artificial Sequence
  derived and/or modified CDS sequence (opt1) from glycoprotein__RABV__KT221136.1
auggugccccaggcccugcuguucgucccgcugcuggccaucccccucugcuucggcaaguuccccaucuacaccauccccgacaagcuggggccguggagccccaucgacauccaccaccuguccugccccaacaaccucgugguggaggacgagggcugcaccaaccugagcggguucuccuacauggagcugaaggucggcuacaucagcgcgaucaaggugaacggguucacgugcaccggcguggucaccgaggccgagaccuacacgaacuucgugggcuacgugaccaccaccuucaagcgcaagcacuuccggcccacgccggacgccugccgcuccgccuacaacuggaagauggccggggacccccgguacgaggagagccuccacaaccccuaccccgacuaccacuggcugcgcaccgucaagaccaccaaggaguccuucgugaucaucagcccguccguggcggaccuggaccccuacgacaagagccuccacucccgggucuucccccgcggcaagugcagcgggaucacgguguccagcaccuacugcuccaccaaccacgacuacaccaucuggaugcccgagaacccgcggcugggcacgagcugcgacaucuucaccaacucccgcgggaagcgggccagcaagggcuccaagaccugcggcuucguggacgagcgcgggcuguacaagagccucaagggcgccugcaagcugaagcugugcgggguccucggccugcggcugauggacggcaccuggguggccauccagacgagcgacgagaccaaguggugcccgcccgaccagcucgugaaccugcacgacuuccacuccgacgagaucgagcaccuggucguggaggagcucgugaagaagcgcgaggagugccuggacgcgcuggagagcaucaugaccaccaaguccgucagcuuccggcgccucucccaccuccggaagcuggugcccggguucggcaaggccuacacgaucuucaacaagacccucauggaggccgacgcccacuacaagagcgugcgcaccuggaacgagaucauccccuccaaggggugccugcgggucggcgggcgcugccacccccacgugaacggcgucuucuucaacggcaucauccuggggcccgacggccacgugcucauccccgagaugcagagcucccugcugcagcagcacauggagcuccuggagagcuccgugaucccgcugaugcacccccucgccgaccccagcaccgucuucaaggacggggacgaggcggaggacuucguggaggugcaccuccccgacguccacaagcaggucuccggcguggaccuggggcugccgagcuggggcaaguacgugcugauguccgccggcauccugacggcccucaugcugaugaucuuccugaugaccugcugccggcgcaccaaccgggccgagagcauccagcgcucccucggggagaccggccgcaaggugagcgugacgucccagagcgggcgggucaucagcuccugggagagcuacaaguccggcggggagaccaagcuguga

SEQ ID NO: 95782 - RNA, 1575 nt, Artificial Sequence; identical to SEQ ID NO: 94980
  derived and/or modified CDS sequence (opt1) from glycoprotein__RABV__KT221138.1

SEQ ID NO: 95783 - RNA, 1575 nt, Artificial Sequence
  derived and/or modified CDS sequence (opt1) from glycoprotein__RABV__KT221139.1
augaucccccaggugcugcuguucgucacccugcugguguucagcuccugcuucggcaaguucccgaucuacaccauccccgacaagcucgggcccuggagccccaucgacauccaccaccuguccugcccgaacaaccugguggucgaggacgagggcugcacgaaccucagcggguucuccuacauggagcugaaggugggcuacaucagcgccaucaaggugaacggguucacgugcaccggcgucgugaccgaggccgagaccuacaccaacuucgugggcuacgucaccaccacguucaagcgcaagcacuuccggcccaugcccgacgcgugccgcgccgccuacaacuggaagauggccggggacccccgguacgaggagucccugcacaacccguaccccgacuaccacuggcuccgcaccgugaagaccaccaaggagagccuggugaucaucucccccagcgucgccgaccuggaccccuacgacaagucccuccacagccggguguucccgggcgggaagugcuccggcaucacggugagcuccacgugcugcagcaccaaccacgacuacaccaucuggaugcccgagaacccccgccuggggaccuccugcgacaucuucaccaacagccggggcaagcgcgcguccaagggcgggaagaccugcggcuucgucgacgagcgggggcuguacaagagccucaagggcgccugcaagcugaagcugugcggcgugcucgggcugcgccugauggacggcaccuggguggccauccagacgagcgacgagaucaaguggugcccgcccgaccagcucgucaaccugcacgacuuccacuccgacgagaucgagcaccuggugguggaggagcucgucaagaagcgggaggagugccuggacgcccuggagaccaucaugaccaccaagagcguguccuuccgccggcucagccaccuccgcaagcuggugcccggguucggcaaggcguacacgaucuucaacaagacccucauggaggccgacgcccacuacaaguccauccggaccuggaacgagaucauccccagcaaggggugccugcgcgucggcggccggugccacccccacgugaacggggucuucuucaacggcaucauccuggggccggacggccacgugcucauccccgagaugcaguccagccugcugcaccagcacauggagcuccuggaguccagcgugaucccccugaugcacccccucgccgacccguccaccgucuucaaggacggggacgaggccgaggacuucguggaggugcaccuccccgacguccacaagcagaucagcggcguggaccugggccugcccaacugggggaaguacgugcugaucuccgcgggcgcccugacggcccucaugcugaccaucuuccugaugaccugcugccgcaagaccaacggggccggcagcauccagcacucccccggggagacgggccggaaggucagcgugaccucccacaacggccgcgugaucagcuccugggagagcuacaagagcggguccgagaccaagcucuga

SEQ ID NO: 95784 - RNA, 1575 nt, Artificial Sequence; identical to SEQ ID NO: 95783
  derived and/or modified CDS sequence (opt1) from glycoprotein__RABV__KT221140.1

SEQ ID NO: 95785 - RNA, 1575 nt, Artificial Sequence
  derived and/or modified CDS sequence (opt1) from glycoprotein__RABV__KT276368.1
augauccugcaggcccuccuguucgugccccugcucaucagcucccugugccugggcaaguucccgaucuacaccauccccgacaagcucgggcccuggagccccaucgacauccaccaccuguccugcccgaacaaccuggucguggaggacgagggcugcaccaaccucagcggguucuccuacauggagcugaaggugggcuacaucagcgccaucaaggucaacggguucacgugcaccggcguggugaccgaggcggagaccuacacgaacuucgucggcuacgugaccaccaccuucaagcgcaagcacuuccggcccauccccgacgccugccgcgccgccuacaacuggaagauggccggggacccccgguacgaggagucccugcagaacccguaccccgacuaccacuggcuccgcacggugaagaccaccaaggagagccugaucaucaucucccccagcgucgcggaccuggaccccuacgacaagucccuccacagccggguguucccgggcgggaagugccugggcaucaccguguccagcacguacugcuccaccaaccacgacuacaccaucuggaugcccgaggagccccgccuggggaccagcugcgacaucuucacguccagcaagggcaagaaggccuccaagggcgggaagaccugcggcuucgucgacgagcgggggcucuacaagagccugaagggcgccugcaagcugaagcucugcggcgugcuggggcugcgccucauggacggcaccugggugagcauccagaccuccgacgacacgaaguggugcccgcccgaccagcuggucaaccugcacgacuuccacagcgacgagaucgagcaccucgugguggaggagcuggucaagaagcgggaggagugccuggacgcccucgaguccaucaugaccaccaagagcguguccuuccgccggcugagcuaccugcgcaagcucgugcccggguucggcaaggcguacaccaucuucaacaagacgcugauggaggccgacgcccacuacaaguccguccggaccuggaacgagaucauccccagcaaggggugccugaaggugcgcgagcggugccacccgcccguggacggcgucuucuucaacggcaucauccucgggcccgacggcaacgugcugauccccgagaugcaguccagccugcuccagcagcacauggagcugcuggaguccagcgucaucccccucaugcacccgcuggccgaccccuccaccguguucaaggagggggacgaggccgaggacuucguggagguccaccuccccgacgugcacaagcagaucagcggcguggaccuggggcugcccuccuggggcaaguaccugcucaugaucgcgggcgggcuggccacccugguccugaucaucugcagcauggccugcugccgccggacgaagcagaccgagucccgccggcgcggcagccgggaguccgagaagaaggugaccgccgccccgcagacccgcaagguggucagcagcugggagcucuacaaguccgagggggacgcgcgccuguga

SEQ ID NO: 95786 - RNA, 1575 nt, Artificial Sequence
  derived and/or modified CDS sequence (opt1) from glycoprotein__RABV__KT336432.1
auggugccccaggcccugcuguucgucccgcugcugguguucccccucugcuucggcaaguuccccaucuacaccauccccgacaagcuggggccguggagccccaucgacauccaccaccuguccugccccaacaaccucguggucgaggacgagggcugcaccaaccugagcggguucuccuacauggagcugaaggugggcuacaucagcgccaucaaggugaacggguucacgugcaccggcgucgugaccgaggcggagaccuacacgaacuucgugggcuacgucaccaccaccuucaagcgcaagcacuuccggccccucccggacgccugccgcgccgccuacaacuggaagauggccggggacccccgguacgaggagucccugcacaaccccuaccccgacuaccacuggcugcgcacggugaagaccaccaaggagagccucgugaucaucuccccgagcgucgcggaccuggaccccuacgacaagucccugcacagccggguguuccccuccggcaagugcagcgggaucaccguguccagcacguucugcuccaccaaccacgacuacaccaucuggaugcccgagaacccgcgccucggcaccagcugcgacaucuucgccaacucccgggggaagcgcgccagcaagggcggcaagacgugcggguucgucgacgagcggggccuguacaagucccugaagggggccugcaagcucaagcugugcggcgugcugggccuccgccugauggacgggaccuggguggcgauccagaccagcgacgagaccaaguggugcccgcccgaccagcuggucaacaugcacgacuuccggagcgacgagaucgagcaccucgugguggaggagcuggucaagaagcgcgaggagugccuggacgcccucgaguccaucaugacgaccaagagcguguccuuccggcgccugagccaccuccggaagcucgugcccggcuucgggaaggccuacaccaucuucaacaagacccugauggaggccgacgcccacuacaaguccguccgcacguggaacgagaucauccccagcaagggcugccugcgggucgggggccgcugccacccccacgugaacggcguguucuucaacgggaucauccucggccccgacgggcacgugcugauccccgagaugcaguccagccugcuccagcagcacauggagcugcuggaguccagcgucaucccgcucaugcacccccuggcggaccccuccaccguguucaaggacggcgacgaggccgaggacuucguggagguccaccuccccgacgugcacaagcaggucagcgggguggaccugggccugccgaacuggggcaaguacgugcugcucuccgccgggacccugaucgcccugaugcucaucaccuuccugaugacgugcugccggcgcgugaaccggcccgagagcaccaagcgcucccugggcgggaccggccgcaaggucagcgugaccucccagagcgggaaggugaucuccagcugggagagcuacaaguccggcggcgagacgcggcuguga

SEQ ID NO: 95787 - RNA, 1575 nt, Artificial Sequence
  derived and/or modified CDS sequence (opt1) from glycoprotein__RABV__KT336433.1
auggugccccaggcccugcuguucgucccgcugcugguguucagccucugcuucggcaaguuccccaucuacaccauccccgacaagcuggggcccugguccccgaucgacauccaccaccugagcugccccaacaaccucguggucgaggacgagggcugcaccaaccuguccggguucagcuacauggagcugaaggugggcuacaucuccgccaucaaggugaacggguucacgugcaccggcgucgugaccgaggcggagaccuacacgaacuucgugggcuacgucaccaccaccuucaagcgcaagcacuuccggcccauccccgacgccugccgcgccgccuacaacuggaagauggccggggacccgcgguacgaggagagccuccacaaccccuaccccgacuaccacuggcugcgcacggugaagaccaccaaggagucccuggugaucaucagccccuccgucgcggaccucgacccguacgacaagagccugcacucccggguguuccccagcggcaagugcuccgggaucaccgugagcuccacguacugcagcaccaaccacgacuacaccaucuggaugcccgagaacccccgccugggcaccuccugcgacaucuucgccaacagccgggggaagcgcgccuccaagggcggcaagacgugcggguucgucgacgagcggggccucuacaagagccugaagggggccugcaagcugaagcucugcggcgugcugggccugcgccucauggacgggaccuggguggcgaugcagaccagcgacgagaccaaguggugcccgcccgaccagcuggucaacaugcacgacuuccgguccgacgagaucgagcaccuggugguggaggagcucgucaagaagcgcgaggagugccuggacgcccuggagagcaucaucacgaccaaggccguguccuuccggcgccucagccaccuccggaagcuggugcccggcuucgggaaggccuacaccaucuucaacaagacccucauggaggccgacgcgcacuacaaguccguccgcacguggaacgagaucauccccagcaagggcugccugcgggucgggggccgcugccacccgcacgugaacggcguguucuucaacgggaucauccugggccccgacgggcgggugcucauccccgagaugcaguccagccugcugcagcagcacauggagcuccuggaguccagcgucaucccccugaugcacccgcucgccgaccccuccaccguguucaaggacggcgacgaggccgaggacuucguggagguccaccuccccgacgugcacaagcaggucagcgggguggaccugggccugcccaacuggggcaaguacgugcugcuguccgccgggacccucaucgcccugaugcugaccaucuuccucaucacgugcugccgccgggugaaccgcccggaguucacccagcgcagccugggcgggaccggccggaaggucuccgugaccagccaguccgggaaggugaucagcuccugggagagcuacaagagcggcggcgagacgcgccuguga

SEQ ID NO: 95788 - RNA, 1575 nt, Artificial Sequence
  derived and/or modified CDS sequence (opt1) from glycoprotein__RABV__KT336434.1
auggugccccaggcccugcuguucgucccgcugcugguguucagccucugcuucggcaaguuccccaucuacaccauccccgacaagcuggggcccugguccccgaucgacauccaccaccugagcugccccaacaaccucguggucgaggacgagggcugcaccaaccuguccggguucagcuacauggagcugaaggugggcuacaucuccgccaucaaggugaacggguucacgugcaccggcgucgugaccgaggcggagaccuacacgaacuucgugggcuacgucaccaccaccuucaagcgcaagcacuuccggcccauccccgacgccugccgcgccgccuacaacuggaagauggccggggacccgcgguacgaggagagccuccacaaccccuaccccgacuaccacuggcugcgcacggugaagaccaccaaggagucccuggugaucaucagccccuccgucgcggaccucgacccguacgacaagagccugcacucccggguguuccccagcggcaagugcuccgggaucaccgugagcuccacguucugcagcaccaaccacgacuacaccaucuggaugcccgagaacccccgccugggcaccuccugcgacaucuucgccaacagccgggggaagcgcgccuccaagggcggcaagacgugcggguucgucgacgagcggggccucuacaagagccugaagggggccugcaagcugaagcucugcggcgugcugggccugcgccucauggacgggaccuggguggcgaugcagaccagcgacgagaccaaguggugcccgcccgaccagcuggucaacaugcacgacuuccgguccgacgagaucgagcaccuggugguggaggagcucgucaagaagcgcgaggagugccuggacgcccuggagagcaucaugacgaccaaguccgugagcuuccggcgccucucccaccuccggaagcuggugcccggcuucgggaaggccuacaccaucuucaacaagacccucauggaggccgacgcccacuacaagagcguccgcacguggaacgagaucauccccuccaagggcugccugcgggucgggggccgcugccacccgcacgugaacggcguguucuucaacgggaucauccugggccccgacgggcacgugcucauccccgagaugcagagcucccugcugcagcagcacauggagcuccuggagagcuccgucaucccccugaugcacccgcucgcggaccccagcaccguguucaaggacggcgacgaggccgaggacuucguggagguccaccuccccgacgugcacaagcaggucuccgggguggaccugggccugcccaacuggggcaaguacgugcugcugagcgccgggacccucaucgcccugaugcugaucaucuuccucaugaccugcugccggcgcgugaaccggccggaguccacggaccgcagccugggcgggaccggccgcaaggucuccgugaccagccaguccgggaaggugaucagcagcugggaguccuacaagagcggcggcgagacccggcuguga

SEQ ID NO: 95789 - RNA, 1575 nt, Artificial Sequence
  derived and/or modified CDS sequence (opt1) from glycoprotein__RABV__KT336435.1
auggugccccaggcccugcuguuccugccgcugcucgucuucccccugugcuucggcaaguuccccaucuacaccauccccgacaagcuggggccguggagccccaucgacauccaccaccucuccugccccaacaaccuggugguggaggacgagggcugcaccaaccugagcggguucuccuacauggagcucaaggucggcuacaucagcgccaucaaggugaacggguucacgugcaccggcguggucaccgaggcggagaccuacacgaacuucgugggcuacgugaccaccaccuucaagcgcaagcacuuccggcccaucccggacgccugccgcgccgccuacaacuggaagauggccggggacccccgguacgaggagucccugcacaaccccuaccccgacuaccacuggcugcgcacggucaagaccaccaaggagagccucgugaucaucuccccgagcguggcggaccuggaccccuacgacaagucccugcacagccgggucuuccccuccggcaagugcagcgggaucaccguguccagcacguucugcuccaccaaccacgacuacaccaucuggaugcccgagaacccgcgccucggcaccagcugcgacaucuucgccaacucccgggggaagcgcgccagcaagggcggcaagacgugcggguucguggacgagcggggccuguacaagucccugaagggggccugcaagcucaagcugugcggcguccugggccuccgccugauggacgggaccuggguggcgaugcagaccagcgacgagaccaaguggugcccgcccgaccagcuggugaacauccacgacuuccggagcgacgagaucgagcaccucgucguggaggagcuggugaagaagcgcgaggagugccuggacgcccucgaguccaucaugacgaccaagagcgucuccuuccggcgccugagccaccuccggaagcucgugcccggcuucgggaaggccuacaccaucuucaacaagacccugauggaggccgacgcccacuacaaguccgugcgcacguggaacgagaucauccccagcaagggcugccugcgggucgggggccgcugccacccccacgugaacggcgucuucuucaacgggaucauccucggccccgacgggcacgugcugauccccgagaugcaguccagccugcuccagcagcacauggagcugcuggaguccagcgugaucccgcucaugcacccccuggcggaccccuccaccgucuucaaggacggcgacgaggccgaggacuucguggaggugcaccuccccgacguccacaagcaggucagcgggguggaccugggccugccgaacuggggcaaguacgugcugcucuccgccgggacccugaucgcccugaugcucaucaucuuccugaugaccugcugccggcgcgugaaccggcccgagagcacggagcgcucccugggccgcaccgggcggaaggugagcgucaccucccagagcggcaaggugaucuccagcugggagagcuacaaguccgggggcgagacccgccuguga

SEQ ID NO: 95790 - RNA, 1575 nt, Artificial Sequence
  derived and/or modified CDS sequence (opt1) from glycoprotein__RABV__KT336436.1
auggugccccaggcccugcuguucgucccgcugcugguguucccccucugcuucggcaaguuccccaucuacaccauccccgacaagcuggggccguggagccccaucgacauccaccaccuguccugccccaacaaccucguggucgaggacgagggcugcaccaaccugagcggguucuccuacauggagcugaaggugggcuacaucagcgccaucaaggugaacggguucacgugcaccggcgucgugaccgaggcggagaccuacacgaacuucgugggcuacgucaccaccaccuucaagcgcaagcacuuccggcccaucccggacgccugccgcgccgccuacaacuggaagauggccggggacccccgguacgaggagucccuccacaaccccuaccccgacuaccacuggcugcgcacggugaagaccaccaaggagagccuggugaucaucuccccgagcgucgcggaccucgaccccuacgacaagucccugcacagccggguguuccccuccggcaagugcagcgggaucaccguguccagcacguucugcuccaccaaccacgacuacaccaucuggaugcccgagaacccgcgccugggcaccagcugcgacaucuucgccaacucccgggggaagcgcgccagcaagggcggcaagacgugcggguucgucgacgagcggggccucuacaagucccugaagggggccugcaagcugaagcucugcggcgugcugggccugcgccucauggacgggaccuggguggcgaugcagaccagcgacgagaccaaguggugcccgcccgaccagcuggucaacaugcacgacuuccggagcgacgagaucgagcaccuggugguggaggagcucgucaagaagcgcgaggagugccuggacgcccuggaguccaucaugacgaccaagagcguguccuuccggcgccucagccaccuccggaagcuggugcccggcuucgggaaggccuacaccaucuucaacaagacccucauggaggccgacgcccacuacaaguccguccgcacguggaacgagaucauccccagcaagggcugccugcgggucgggggccgcugccacccccacgugaacggcguguucuucaacgggaucauccugggccccgacgggcacgugcucauccccgagaugcaguccagccugcugcagcagcacauggagcuccuggaguccagcgucaucccgcugaugcacccccucgcggaccccuccaccguguucaaggacggcgacgaggccgaggacuucguggagguccaccuccccgacgugcacaagcaggucagcgggguggaccugggccugccgaacuggggcaaguacgugcugcuguccgccgggacccucaucgcccugaugcugaucaccuuccucaugacgugcugccggcgcgugaaccggcccgagagcaccaagcgccgccugggcgggaccggccggaaggucuccgugaccagccaguccgggaaggugaucagcuccugggagagcuacaagagcggcggcgagacgcgccuguga

SEQ ID NO: 95791 - RNA, 1575 nt, Artificial Sequence
  derived and/or modified CDS sequence (opt1) from glycoprotein__RABV__KT336437.1
auggugccccaggcccugcuguuccugccgcugcucgucuucccccugugcuucggcaaguuccccaucuacaccauccccgacaagcuggggccguggagccccaucgacauccaccaccucaacugccccaacaaccuggugguggaggacgagggcugcaccaaccuguccggguucagcuacauggagcucaaggucggcuacaucuccgccaucaaggugaacggguucacgugcaccggcguggucaccgaggcggagaccuacacgaacuucgugggcuacgugaccaccaccuucaagcgcaagcacuuccggcccaucccggacgccugccgcgccgccuacaacuggaagauggccggggacccccgguacgaggagagccugcacaaccccuaccccgacuaccacuggcugcgcacggucaagaccaccaaggagucccucgugaucaucagcccguccguggcggaccuggaccccuacgacaagagccugcacucccgggucuuccccagcggcaagugcuccgggaucaccgugagcuccacguucugcagcaccaaccacgacuacaccaucuggaugcccgagaacccgcgccucggcaccuccugcgacaucuucgccaacagccgggggaagcgcgccuccaagggcggcaagacgugcggguucguggacgagcggggccuguacaagagccugaagggggccugcaagcucaagcugugcggcguccugggccuccgccugauggacgggaccuggguggcgaugcagaccuccgacgagaccaaguggugcccgcccgaccagcuggugaacauccacgacuuccggagcgacgagaucgagcaccucgucguggaggagcuggugaagaagcgcgaggagugccuggacgcccucgagagcaucaugacgaccaaguccgucagcuuccggcgccugucccaccuccggaagcucgugcccggcuucgggaaggccuacaccaucuucaacaagacccugauggaggccgacgcccacuacaagagcgugcgcacguggaacgagaucauccccuccaagggcugccugcgggucgggggccgcugccacccccacgugaacggcgucuucuucaacgggaucauccucggccccgacgggcacauccugauccccgagaugcagagcucccugcuccagcagcacauggagcugcuggagagcuccgugaucccgcucaugcacccccuggcggaccccagcaccguguucaaggacggcgacgaggccgaggacuucgucgaggugcaccuccccgacgugcacaagcaggucuccgggguggaccugggccugccgaacuggggcaaguacgugcugcucagcgccgggacccugaucgcccugaugcucaucaucuuccugaugaccugcugccggcgcgucaaccggcccgaguccacggagcgcagccugggcgggaccggccgcaagguguccgugaccagccaguccgggaaggucaucagcuccugggagagcuacaagagcggcggcgagacccggcuguga

SEQ ID NO: 95792 - RNA, 1575 nt, Artificial Sequence
  derived and/or modified CDS sequence (opt1) from glycoprotein__RABV__KU198460.1
auggugccccaggcccugcuguucgucccgcugcuggccuuccccaugugcuucggcaaguuccccaucuacaccauccccgacaagcucgggccguggagccccaucgacauccaccaccuguccugccccaacaaccuggugguggaggacgagggcugcaccaaccucagcggguucuccuacauggagcugaaggucggcuacaucagcgcgaucaaggugaacggguucacgugcaccggcguggucaccgaggccgagaccuacacgaacuucgugggcuacgugaccaccaccuucaagcgcaagcacuuccggcccacgccggacgccugccgcgccgccuacaacuggaagauggcgggggacccccgguacgaggagucccugcacaaccccuaccccgacuaccacuggcuccgcaccgucaagaccaccaaggagagccugaucaucaucuccccgagcguggccgaccuggaccccuacgacaagucccuccacagccggguguuccccuccggcaagugccuggggaucacgaucagcuccaccuacugcagcaccaaccacgacuacaccaucuggaugcccgagaaccugcgccucggcacguccugcgacaucuucaccaacagccgggggaagcgcgccuccaagggcagcaagaccugcggcuucgucgacgagcgggggcuguacaagucccugaagggcgccugcaagcucaagcugugcggggugcugggccuccgccugauggacggcaccuggguggcgaugcagacgagcgacgagaccaaguggugcagcccggaccagcuggucaaccuccacgacuuccgguccgacgagaucgagcaccuggugguggaggagcuggucaagaagcgcgaggagugccucgacgcccuggagagcaucaugaccaccaaguccgugagcuuccggcgccugucccaccuccggaagcuggugcccggguucggcaaggccuacacgaucuucaacaagacccugauggaggccgacgcccacuacaagagcguccgcaccugguccgagaucauccccagcaaggggugccuccgggugggcgggcgcugccacccccacgugaacggcgucuucuucaacggcaucauccuggggccggacggccacgugcugauccccgagaugcaguccagccuccugcagcagcacauggagcugcucgaguccagcgucaucccccugaugcacccccuggcggacccguccaccguguucaaggacggggacgaggccgaggacuucguggagguccaccuccccgacgugcacaagcagaucagcggcguggaccuggggcugcccaacuggggccgguacguccucaucaucgccggcgugcugaucgccaugauccugacgaucuuccucaugaccugcugcgggcgcggcaaccggcccaaguccacccagcacagccucgggggcaucgggcgcaagguguccgccaccagccaguccggcaaggucaucagcagcugggaguccuacaagagcggcggggagacgcgccuguga

SEQ ID NO: 95793 - RNA, 1575 nt, Artificial Sequence
  derived and/or modified CDS sequence (opt1) from glycoprotein__RABV__KU198461.1
auggugccccaggcccugcuguucgucccgcugcuggccuuccccaugugcuucggcaaguuccccaucuacaccauccccgacaagcucgggccguggagccccaucgacauccaccaccuguccugccccaacaaccuggugguggaggacgagggcugcaccaaccucagcggguucuccuacauggagcugaaggucggcuacaucagcgcgaucaaggugaacggguucacgugcaccggcguggucaccgaggccgagaccuacacgaacuucgugggcuacgugaccaccaccuucaagcgcaagcacuuccggcccacgccggacgccugccgcgccgccuacaacuggaagauggcgggggacccccgguacgaggagucccugcacaaccccuaccccgacuaccacuggcuccgcaccgucaagaccaccaaggagagccugaucaucaucuccccgagcguggccgaccuggaccccuacgacaagucccuccacagccggguguuccccuccggcaagugccuggggaucacgaucagcuccaccuacugcagcaccaaccacgacuacaccaucuggaugcccgagaaccugcgccucggcacguccugcgacaucuucaccaacagccgggggaagcgcgccuccaagggcagcaagaccugcggcuucgucgacgagcgggggcuguacaagucccugaagggcgccugcaagcucaagcugugcggggugcugggccuccgccugauggacggcaccuggguggcgaugcagacgagcgacgagaccaaguggugcagcccggaccagcuggucaaccuccacgacuuccgguccgacgagaucgagcaccuggugguggaggagcuggucaagaagcgcgaggagugccucgacgcccuggagagcaucaugaccaccaaguccgugagcuuccggcgccugucccaccuccggaagcuggugcccggguucggcaaggccuacacgaucuucaacaagacccugauggaggccgacgcccacuacaagagcguccgcaccuggaacgagaucauccccuccaaggggugccuccgggugggcgggcgcugccacccccacgugaacggcgucuucuucaacggcaucauccuggggccggacggccacgugcugauccccgagaugcagagcucccuccugcagcagcacauggagcugcucgagagcuccgucaucccccugaugcacccccuggcggacccgagcaccguguucaaggacggggacgaggccgaggacuucguggagguccaccuccccgacgugcacaagcagaucuccggcguggaccuggggcugcccaacuggggcaaguacguccucaucaucgccggcgugcugaucgccaugauccugacgaucuuccucaugaccugcugcgggcggggcaaccgccccaagagcacccagcacucccucgggggcaucgggcggaaggugagcgccaccucccagagcggcaaggucaucuccagcugggagagcuacaaguccggcggggagacgcgccuguga

SEQ ID NO: 95794 - RNA, 1575 nt, Artificial Sequence
  derived and/or modified CDS sequence (opt1) from glycoprotein__RABV__KU198462.1
auggugccccaggcccuccuguucgucccgcugcuggccuuccccaugugcuucggcaaguuccccaucuacaccauccccgacaagcucgggccguggagccccaucgacauccaccaccuguccugccccaacaaccuggugguggaggacgagggcugcaccaaccucagcggguucuccuacauggagcugaaggucggcuacaucagcgcgaucaaggugaacggguucacgugcaccggcguggucaccgaggccgagaccuacacgaacuucgugggcuacgugaccaccaccuucaagcgcaagcacuuccggcccacgccggacgccugccgcgccgccuacaacuggaagauggcgggggacccccgguacgaggagucccugcacaaccccuaccccgacuaccacuggcuccgcaccgucaagaccaccaaggagagccugaucaucaucuccccgagcguggccgaccuggaccccuacgacaagucccuccacagccggguguuccccuccggcaagugccuggggaucacgaucagcuccaccuacugcagcaccaaccacgacuacaccaucuggaugcccgagaaccugcgccucggcacguccugcgacaucuucaccaacagccgggggaagcgcgccuccaagggcagcaagaccugcggcuucgucgacgagcgggggcuguacaagucccugaagggcgccugcaagcucaagcugugcggggugcugggccuccgccugauggacggcaccuggguggcgaugcagacgagcgacgagaccaaguggugcccgcccgaccagcuggucaaccuccacgacuuccggagcgacgagaucgagcaccuggugguggaggagcuggucaagaagcgcgaggagugccucgacgcccuggaguccaucaugaccaccaagagcguguccuuccggcgccugagccaccuccggaagcuggugcccggguucggcaaggccuacacgaucuucaacaagacccugauggaggccgacgcccacuacaaguccguccgcaccuggaacgagaucauccccagcaaggggugccuccgggugggcgggcgcugccacccgcacgugaacggcgucuucuucaacggcaucauccuggggcccgacggccacgugcugauccccgagaugcaguccagccuccugcagcagcacauggagcugcucgaguccagcgucaucccccugaugcacccgcuggcggaccccuccaccguguucaaggacggggacgaggccgaggacuucguggagguccaccuccccgacgugcacaagcagaucagcggcguggaccuggggcugcccaacuggggcaaguacguccucaucaucgccggcgugcugaucgccaugauccugacgaucuuccucaugaccugcugcgggcggggcaaccgcccgaaguccacccagcacagccccgggggcaucgggcggaagguguccgccaccagccaguccggcaaggucaucagcuccugggagagcuacaagagcggcggggagacgcgccuguga

SEQ ID NO: 95795 - RNA, 1575 nt, Artificial Sequence
  derived and/or modified CDS sequence (opt1) from glycoprotein__RABV__KU198463.1
auggugccccaggcccugcuguucgucccgcugcuggccuuccccaugugcuucggcaaguuccccaucuacaccauccccgacaagcucgggccguggagccccaucgacauccaccaccuguccugccccaacaaccuggugguggaggacgagggcugcaccaaccucagcggguucuccuacauggagcugaaggucggcuacaucagcgcgaucaaggugaacggguucacgugcaccggcguggucaccgaggccgagaccuacacgaacuucgugggcuacgugaccaccaccuucaagcgcaagcacuuccggcccacgccggacgccugccgcgccgccuacaacuggaagauggcgggggacccccgguacgaggagucccugcacaaccccuaccccgacuaccacuggcuccgcaccgucaagaccaccaaggagagccugaucaucaucuccccgagcguggccgaccuggaccccuacgacaagucccuccacagccggguguuccccuccggcaagugccuggggaucacgaucagcuccaccuacugcagcaccaaccacgacuacaccaucuggaugcccgagaaccugcgccucggcacguccugcgacaucuucaccaacagccgggggaagcgcgccuccaagggcagcaagaccugcggcuucgucgacgagcgggggcuguacaagucccugaagggcgccugcaagcucaagcugugcggggugcugggccuccgccugaucgacggcaccuggguggcgaugcagacgagcgacgagaccaaguggugcccgcccgaccagcuggucaaccuccacgacuuccggagcgacgagaucgagcaccuggugguggaggagcuggucaagaagcgcgaggagugccucgacgcccuggaguccaucaugaccaccaagagcguguccuuccggcgccugagccaccuccggaagcuggugcccggguucggcaaggccuacacgaucuucaacaagacccugauggaggccgacgcccacuacaaguccguccgcaccuggaacgagaucauccccagcaaggggugccuccgggugggcgggcgcugccacccgcacgugaacggcgucuucuucaacggcaucauccuggggcccgacggccacgugcugauccccgagaugcaguccagccuccugcagcagcacauggagcugcucgaguccagcgucaucccccugaugcacccgcuggcggaccccuccaccguguucaaggacggggacgaggccgaggacuucguggagguccaccuccccgacgugcacaagcagaucagcggcguggaccuggggcugcccaacuggggcaaguacguccucaucaucgccggcgugcugaucgccaugauccugacgaucuuccucaugaccugcugcgggcggggcaaccgcccgaaguccacccagcacagccucgggggcaucgggcggaagguguccgccaccagccaguccggcaaggucaucagcuccugggagagcuacaagagcggcggggagacgcgccuguga

SEQ ID NO: 95796 - RNA, 1575 nt, Artificial Sequence
  derived and/or modified CDS sequence (opt1) from glycoprotein__RABV__KU198464.1
auggugccgcaggcccuccuguucgucccgcugcuggccuuccccaugugcuucggcaaguuccccaucuacaccauccccgacaagcucgggccguggagccccaucgacauccaccaccuguccugccccaacaaccuggugguggaggacgagggcugcaccaaccucagcggguucuccuacauggagcugaaggucggcuacaucagcgcgaucaaggugaacggguucacgugcaccggcguggucaccgaggccgagaccuacacgaacuucgugggcuacgugaccaccaccuucaagcgcaagcacuuccggcccacgccggacgccugccgcgccgccuacaacuggaagauggcgggggacccccgguacgaggagucccugcacaaccccuaccccgacuaccacuggcuccgcaccgucaagaccaccaaggagagccugaucaucaucuccccgagcguggccgaccuggaccccuacgacaagucccuccacagccggguguuccccuccggcaagugccuggggaucacgaucagcuccaccuacugcagcaccaaccacgacuacaccaucuggaugcccgagaaccugcgccucggcacguccugcgacaucuucaccaacagccgggggaagcgcgccuccaagggcagcaagaccugcggcuucgucgacgagcgggggcuguacaagucccugaagggcgccugcaagcucaagcugugcggggugcugggccuccgccugauggacggcaccuggguggcgaugcagacgagcgacgagaccaaguggugcccgcccgaccagcuggucaaccuccacgacuuccggagcgacgagaucgagcaccuggugguggaggagcuggucaagaagcgcgaggagugccucgacgcccuggaguccaucaugaccaccaagagcguguccuuccggcgccugagccaccuccggaagcuggugcccggguucggcaaggccuacacgaucuucaacaagacccugauggaggccgacgcccacuacaaguccguccgcaccuggagcgagaucauccccuccaaggggugccuccgggugggcgggcgcugccacccgcacgugaacggcgucuucuucaacggcaucauccuggggcccgacggccacgugcugauccccgagaugcagagcucccuccugcagcagcacauggagcugcucgagagcuccgucaucccccugaugcacccgcuggcggaccccagcaccguguucaaggacggggacgaggccgaggacuucguggagguccaccuccccgacgugcacaagcagaucuccggcguggaccuggggcugcccaacuggggcaaguacguccucaucaucgccggcgugcugaucgccaugauccugacgaucuuccucaugaccugcugcgggcggugcaaccgccccaagagcacccagcacucccugggcgggaucggccggaaggugagcgccaccucccagagcgggaaggucaucuccagcugggagagcuacaaguccggcggcgagacgcgccuguga

SEQ ID NO: 95797 - RNA, 1575 nt, Artificial Sequence
  derived and/or modified CDS sequence (opt1) from glycoprotein__RABV__KU198465.1
auggugccgcaggcccugcugcuggucccgcugcucgccuuccccaugugcuucggcaaguuccccaucuacaccauccccgacaagcuggggccguggagccccaucgacauccaccaccuguccugccccaacaaccucgugguggaggacgagggcugcaccaaccugagcggguucuccuacauggagcugaaggucggcuacaucagcgcgaucaaggugaacggguucacgugcaccggcguggucaccgaggccgagaccuacacgaacuucgugggcuacgugaccaccaccuucaagcgcaagcacuuccggcccacgccggacgccugccgcgccgccuacaacuggaagauggcgggggacccccgguacgaggagucccuccacaaccccuaccccgacuaccacuggcugcgcaccgucaagaccaccaaggagagccugaucaucaucuccccgagcguggccgaccucgaccccuacgacaagucccugcacagccggguguuccccuccggcaagugccuggggaucacgaucagcuccaccuacugcagcaccaaccacgacuacaccaucuggaugcccgagaaccuccgccugggcacguccugcgacaucuucaccaacagccgggggaagcgcgccuccaagggcagcaagaccugcggcuucgucgacgagcgggggcuguacaagucccucaagggcgccugcaagcugaagcugugcggggugcucggccugcgccugauggacggcaccuggguggcgaugcagacgagcgacgagaccaaguggugcccgcccgaccagcucgucaaccugcacgacuuccggagcgacgagaucgagcaccuggugguggaggagcucgucaagaagcgcgaggagugccuggacgcccuggaguccaucaugaccaccaagagcguguccuuccggcgccucagccaccuccggaagcuggugcccggguucggcaaggccuacacgaucuucaacaagacccugauggaggccgacgcccacuacaaguccguccgcaccuggagcgagaucauccccuccaaggggugccugcgggugggcgggcgcugccacccgcacgugaacggcgucuucuucaacggcaucauccuggggcccgacggccacgugcucauccccgagaugcagagcucccugcugcagcagcacauggagcuccuggagagcuccgucaucccccugaugcacccgcucgcggaccccagcaccguguucaaggacggggacgaggccgaggacuucguggagguccaccuccccgacgugcacaagcagaucuccggcguggaccuggggcugcccaacuggggcaaguacguccugaucaucgccggcgugcugaucgccaugauccucacgaucuuccugaugaccugcugcgggcggggcaaccgccccaagagcacccagcacucccucgggggcaucgggcggaaggugagcgccaccucccagagcggcaaggucaucuccagcugggagagcuacaaguccggcagcgagacgcgccuguga

SEQ ID NO: 95798 - RNA, 1575 nt, Artificial Sequence; identical to SEQ ID NO: 95508
  derived and/or modified CDS sequence (opt1) from glycoprotein__RABV__KU198466.1

SEQ ID NO: 95799 - RNA, 1575 nt, Artificial Sequence; identical to SEQ ID NO: 95508
  derived and/or modified CDS sequence (opt1) from glycoprotein__RABV__KU198467.1

SEQ ID NO: 95800 - RNA, 1575 nt, Artificial Sequence
  derived and/or modified CDS sequence (opt1) from glycoprotein__RABV__KU198468.1
auggugccccaggcccugcuguucgucccgcugcuggccuuccccaugugcuucggcaaguuccccaucuacaccauccccgacaagcucgggccguggagccccaucgacauccaccaccuguccugccccaacaaccugaucguggaggacgagggcugcaccaaccucagcggguucuccuacauggagcugaaggugggcuacaucagcgcgaucaaggucaacggguucacgugcaccggcguggugaccgaggccgagaccuacacgaacuucgucggcuacgugaccaccaccuucaagcgcaagcacuuccggcccacgccggacgccugccgcgccgccuacaacuggaagauggcgggggacccccgguacgaggagucccugcacaaccccuaccccgacuaccacuggcuccgcaccgugaagaccaccaaggagagccugaucaucaucuccccgagcgucgccgaccuggaccccuacgacaagucccuccacagccggguguuccccuccggcaagugccuggggaucacgaucagcuccaccuacugcagcaccaaccacgacuacaccaucuggaugcccgagaaccugcgccucggcacguccugcgacaucuucaccaacagccgggggaagcgcgccuccaagggcagcaagaccugcggcuucguggacgagcgggggcuguacaagucccugaagggcgccugcaagcucaagcugugcgggguccugggccuccgccugauggacggcaccuggguggcgaugcagacgagcgacgagaccaaguggugcccgcccaaccagcuggugaaccuccacgacuuccggagcgacgagaucgagcaccuggucguggaggagcuggugaagaagcgcgaggagugccucgacgcccuggaguccaucaugaccaccaagagcgucuccuuccggcgccugagccaccuccggaagcuggugcccggguucggcaaggccuacacgaucuucaacaagacccugauggaggccgacgcccacuacaaguccgugcgcaccuggaacgagaucauccccagcaaggggugccuccgggucggcgggcgcugccacccgcacgugaacggcguguucuucaacggcaucauccuggggcccgacggccacguccugauccccgagaugcaguccagccuccugcagcagcacauggagcugcucgaguccagcgugaucccccugaugcacccgcuggcggaccccuccaccgucuucaaggacggggacgaggccgaggacuucguggaggugcaccuccccgacguccacaagcagaucagcggcguggaccuggggcugcccaacuggggcaaguacgugcucaucaucgccggcguccugaucgccaugauccugacgaucuuccucaugaccugcugcgggcggggcaaccgcccgaaguccacccagcacagccucgggggcaucgggcggaagguguccgccaccagccaguccggcaaggugaucagcuccugggagagcuacaagagcggcggggagacgcgccuguga

SEQ ID NO: 95801 - RNA, 1575 nt, Artificial Sequence
  derived and/or modified CDS sequence (opt1) from glycoprotein__RABV__KU198469.1
auggugccccaggcccugcuguucgucccgcugcuggccuuccccaugugcuucggcaaguuccccaucuacaccauccccgacaagcucgggccguggagccccaucgacauccaccaccuguccugccccaacaaccuggugguggaggacgagggcugcaccaaccucagcggguucuccuacauggagcugaaggucggcuacaucagcgcgaucaaggugaacggguucacgugcaccggcguggucaccgaggccgagaccuacacgaacuucgugggcuacgugaccaccaccuucaagcgcaagcacuuccggcccacgccggacgccugccgcgccgccuacaacuggaagauggcgggggacccccgguacgaggagucccugcacaaccccuaccccgacuaccacuggcuccgcaccgucaagaccaccaaggagagccugaucaucaucuccccgagcguggccgaccuggaccccuacgacaagucccuccacagccggguguuccccuccggcaagugccuggggaucacgaucagcuccaccuacugcagcaccaaccacgacuacaccaucuggaugcccgagaaccugcgccucggcacguccugcgacaucuucaccaacagccgggggaagcgcgccuccaagggcagcaagaccugcggcuucgucgacgagcgggggcuguacaagucccugaagggcgccugcaagcucaagcugugcggggugcugggccuccgccugauggacggcaccuggguggcgaugcagacgagcgacgagaccaaguggugcccgcccgaccagcuggucaaccuccacgacuuccggagcgacgagaucgagcaccuggugguggaggagcuggucaagaagcgcgaggagugccucgacgcccuggaguccaucaugaccaccaagagcguguccuuccggcgccugagccaccuccggaagcuggugcccggguucggcaaggccuacacgaucuucaacaagacccugauggaggccgacgcccacuacaaguccguccgcaccuggaacgagaucauccccagcaaggggugccuccgggugggcgggcgcugccacccgcacgugaacggcgucuucuucaacggcaucauccuggggcccgacggccacgugcugauccccgagaugcaguccagccuccugcagcagcacauggagcugcucgaguccagcgucaucccccugaugcacccgcuggcggaccccuccaccguguucaaggacggggacgaggccgaggacuucguggagguccaccuccccgacgugcacaagcagaucagcggcguggaccuggggcugcccaacuggggcaaguacguccucaucaucgccggcgugcugaucgccaugauccugacgaccuuccucaugaccugcugcgggcggggcaaccgcccgaaguccacccagcacagccucgggggcaucgggcggaagguguccgccacgagccaguccggcaaggucaucagcuccugggagagcuacaagagcggcggggagacccgccuguga

SEQ ID NO: 95802 - RNA, 1575 nt, Artificial Sequence; identical to SEQ ID NO: 95498
  derived and/or modified CDS sequence (opt1) from glycoprotein__RABV__KU198470.1

SEQ ID NO: 95803 - RNA, 1575 nt, Artificial Sequence; identical to SEQ ID NO: 95499
  derived and/or modified CDS sequence (opt1) from glycoprotein__RABV__KU198471.1

SEQ ID NO: 95804 - RNA, 1575 nt, Artificial Sequence
  derived and/or modified CDS sequence (opt1) from glycoprotein__RABV__KU198472.1
auggugccccaggcccugcuguucgucccgcugcuggccuuccccaugugcuucggcaaguuccccaucuacaccauccccgacaagcuggggccguggagccccaucgacauccaccaccuguccugccccaacaaccuggugguggaggacgagggcugcaccaaccucagcggguucuccuacauggagcugaaggucggcuacaucagcgcgaucaaggugaacggguucacgugcaccggcguggucaccgaggccgagaccuacacgaacuucgugggcuacgugaccaccaccuucaagcgcaagcacuuccggcccacgccggacgccugccgcgccgccuacaacuggaagauggcgggggacccccgguacgaggagucccugcacaaccccuaccccgacuaccacuggcuccgcaccgucaagaccaccaaggagagccugaucaucaucuccccgagcguguccgaccuggaccccuacgacaagagccuccacucccggguguuccccagcggcaagugccuggggaucacgaucuccagcaccuacugcuccaccaaccacgacuacaccaucuggaugcccgagaacguccgccugggcacgagcugcgacaucuucaccaacucccgggggaagcgcgccagcaagggcuccaagaccugcggcuucguggacgagcgggggcucuacaagagccugaagggcgccugcaagcugaagcucugcggggugcugggccugcgccucauggacggcaccugggucagcaugccgacguccgacgagaccaaguggugcccgcccgaccagcuggugaaccugcacgacuuccggagcgacgagaucgagcaccucguggucgaggagcuggugcgcaagcgggaggagugccuggacgcccucgaguccaucaugaccaccaagagcguguccuuccgccggcugagccaccuccgcaagcucguccccggguucggcaaggcguacacgaucuucaacaagacccugauggaggccgacgcccacuacaaguccgugcggaccuggagcgagaucauccccuccaaggggugccugcgcgugggcgggcggugccacccccacgucaacggcguguucuucaacggcaucauccucgggcccgacggccacguccugauccccgagaugcagagcucccugcuccagcagcacauggagcugcuggagagcuccgugaucccgcucaugcacccccuggccgaccccagcaccguguucaaggacggggacgaggccgaggacuucgucgaggugcaccuccccgacgugcacaagcagaucuccggcgucgaccuggggcugccgaacuggggcaaguacgugcugaucaucgcgggcgugcucaucgccaugauccugacgauccugcucaugaccugcugcgggcgcggcaaccggcccaagagcacccagcacucccucgggggcaucgggcgcaaggucagcuccaccagccagagcggcaaggugaucuccagcugggaguccuacaagagcggcggggagacgcgccuguga

SEQ ID NO: 95805 - RNA, 1575 nt, Artificial Sequence
  derived and/or modified CDS sequence (opt1) from glycoprotein__RABV__KU198473.1
auggugccccaggcccugcuguucgucccgcugcuggccuuccccaugugcuucggcaaguuccccaucuacaccauccccgacaagcucgggccguggagccccaucgacauccaccaccuguccugccccaacaaccuggugguggaggacgagggcugcaccaaccucagcggguucuccuacauggagcugaaggucggcuacaucagcgcgaucaaggugaacggguucacgugcaccggcguggucaccgaggccgagaccuacacgaacuucgugggcuacgugaccaccaccuucaagcgcaagcacuuccggcccacgccggacgccugccgcgccgccuacaacuggaagauggcgggggacccccgguacgaggagucccugcacaaccccuaccccgacuaccacuggcuccgcaccgucaagaccaccaaggagagccugaucaucaucuccccgagcguggccgaccuggaccccuacgacaagucccuccacagccggguguuccccuccggcaagugccuggggaucacgaucagcuccaccuacugcagcaccaaccacgacuacaccaucuggaugcccgagaacguccgccugggcacguccugcgacaucuucaccaacagccgggggaagcgcgccuccaagggcagcaagaccugcggcuucguggacgagcgggggcucuacaagucccugaagggcgccugcaagcugaagcucugcggggugcugggccugcgccucauggacggcaccugggucagcaugccgacgagcgacgagaccaaguggugcccgcccgaccagcuggugaaccugcacgacuuccgguccgacgagaucgagcaccucguggucgaggagcuggugcgcaagcgggaggagugccuggacgcgcucgagagcaucaugaccaccaaguccgugagcuuccgccggcugucccaccuccgcaagcucguccccggguucggcaaggccuacacgaucuucaacaagacccugauggaggccgacgcccacuacaagagcgugcggaccuggaacgagaucauccccuccaaggggugccugcgcgugggcgggcggugccacccccacgucaacggcguguucuucaacggcaucauccucgggcccgacggccacguccugauccccgagaugcagagcucccugcuccagcagcacauggagcugcuggagagcuccgugaucccgcucaugcacccccuggccgaccccagcaccguguucaaggacggggacgaggcggaggacuucgucgaggugcaccuccccgacgugcacaagcagaucuccggcgucgaccuggggcugccgaacuggggcaaguacgugcugaucaucgccggcgugcucaucgccaugauccugacgaucuuccugaugaccugcugcgggcgcggcaaccggcccaagagcacccagcacucccucgggggcaucgggcgcaaggucagcuccaccagccaguccggcaaggugaucagcagcugggaguccuacaagagcggcggggagacgcgccuguga

SEQ ID NO: 95806 - RNA, 1575 nt, Artificial Sequence; identical to SEQ ID NO: 95805
  derived and/or modified CDS sequence (opt1) from glycoprotein__RABV__KU198474.1

SEQ ID NO: 95807 - RNA, 1575 nt, Artificial Sequence
  derived and/or modified CDS sequence (opt1) from glycoprotein__RABV__KU198475.1
auggugccccaggcccugcuguucgucccgcugcuggccuuccccaugugcuucggcaaguuccccaucuacaccauccccgacaagcuggggccguggagccccaucgacauccaccaccuguccugccccaacaaccuggugguggaggacgagggcugcaccaaccucagcggguucuccuacauggagcugaaggucggcuacaucagcgcgaucaaggugaacggguucacgugcaccggcguggucaccgaggccgagaccuacacgaacuucgugggcuacgugaccaccaccuucaagcgcaagcacuuccggcccacgccggacgccugccgcgccgccuacaacuggaagauggcgggggacccccgguacgaggagucccugcacaaccccuaccccgacuaccacuggcuccgcaccgucaagaccaccaaggagagccugaucaucaucuccccgagcguguccgaccuggaccccuacgacaagagccuccacucccggguguuccccagcggcaagugccuggggaucacgaucuccagcaccuacugcuccaccaaccacgacuacaccaucuggaugcccgagaacguccgccugggcacgagcugcgacaucuucaccaacucccgggggaagcgcgccagcaagggcuccaagaccugcggcuucguggacgagcgggggcucuacaagagccugaagggcgccugcaagcugaagcucugcggggugcugggccugcgccucauggacggcaccugggucagcaugccgacguccgacgagaccaaguggugcccgcccgaccagcuggugaaccugcacgacuuccggagcgacgagaucgagcaccucguggucgaggagcuggugcgcaagcgggaggagugccuggacgcccucgaguccaucaugaccaccaagagcguguccuuccgccggcugagccaccuccgcaagcucguccccggguucggcaaggcguacacgaucuucaacaagacccugauggaggccgacgcccacuacaaguccgugcggaccuggaacgagaucauccccagcaaggggugccugcgcgugggcgggcggugccacccccacgucaacggcguguucuucaacggcaucauccucgggcccgacggccacguccugauccccgagaugcaguccagccugcuccagcagcacauggagcugcuggaguccagcgugaucccgcucaugcacccccuggccgaccccuccaccguguucaaggacggggacgaggccgaggacuucgucgaggugcaccuccccgacgugcacaagcagaucagcggcgucgaccuggggcugccgaacuggggcaaguacgugcugaucaucgcgggcgugcucaucgccaugauccugacgauccugcucaugaccugcugcgggcgcggcaaccggcccaaguccacccagcacagccucgggggcaucgggcgcaaggucuccagcaccucccagagcggcaaggugaucagcuccugggagagcuacaaguccggcggggagacgcgccuguga

SEQ ID NO: 95808 - RNA, 1575 nt, Artificial Sequence
  derived and/or modified CDS sequence (opt1) from glycoprotein__RABV__KU198476.1
auggugccccaggcccugcuguucgucccgcugcuggccuuccccaugugcuucggcaaguuccccaucuacaccauccccgacaagcuggggccguggagccccaucgacauccaccaccuguccugccccaacaaccuggugguggaggacgagggcugcaccaaccucagcggguucuccuacauggagcugaaggucggcuacaucagcgcgaucaaggugaacggguucacgugcaccggcguggucaccgaggccgagaccuacacgaacuucgugggcuacgugaccaccaccuucaagcgcaagcacuuccggcccacgccggacgccugccgcgccgccuacaacuggaagauggcgggggacccccgguacgaggagucccugcacaaccccuaccccgacuaccacuggcuccgcaccgucaagaccaccaaggagagccugaucaucaucuccccgagcguggccgaccuggaccccuacgacaagucccuccacagccggguguuccccuccggcaagugccuggggaucacgaucagcuccaccuacugcagcaccaaccacgacuacaccaucuggaugcccgagaacguccgccugggcacguccugcgacaucuucaccaacagccgggggaagcgcgccuccaagggcagcaagaccugcggcuucguggacgagcgggggcucuacaagucccugaagggcgccugcaagcugaagcucugcggggugcugggccugcgccucauggacggcaccugggucgcgaugccgacgagcgacgagaccaaguggugcccgcccgaccagcuggugaaccugcacgacuuccggagcgacgagaucgagcaccucguggucgaggagcuggugcgcaagcgggaggagugccuggacgcccucgaguccaucaugaccaccaagagcguguccuuccgccggcugagccaccuccgcaagcucguccccggguucggcaaggccuacacgaucuucaacaagacccugauggaggccgacgcccacuacaaguccgugcggaccuggaacgagaucauccccagcaaggggugccugcgcgugggcgggcggugccacccccacgucaacggcguguucuucaacggcaucauccucgggcccgacggccacguccugauccccgagaugcaguccagccugcuccagcagcacauggagcugcuggaguccagcgugaucccgcucaugcacccccuggcggaccccuccaccguguucaaggacggggacgaggccgaggacuucgucgaggugcaccuccccgacgugcacaagcagaucagcggcgucgaccuggggcugccgaacuggggcaaguacgugcugaucaucgccggcgugcucaucgccaugauccugacgaucuuccugaugaccugcugcgggcgcggcaaccggcucaaguccacccagcacagccucgggggcaucgggcgcaaggucuccagcaccucccagagcggcaaggugaucuccagcugggagagcuacaaguccggcggggagacgcgccuguga

SEQ ID NO: 95809 - RNA, 1575 nt, Artificial Sequence; identical to SEQ ID NO: 95498
  derived and/or modified CDS sequence (opt1) from glycoprotein__RABV__KU198478.1

SEQ ID NO: 95810 - RNA, 1575 nt, Artificial Sequence
  derived and/or modified CDS sequence (opt1) from glycoprotein__RABV__KU198479.1
auggugccccaggcccugcuguucgucccgcugcuggccuuccccaugugcuucggcaaguuccccaucuacaccauccccgacaagcucgggccguggagccccaucgacauccaccaccuguccugccccaacaaccuggugguggaggacgagggcugcaccaaccucagcggguucuccuacauggagcugaaggucggcuacaucagcgcgaucaaggugaacggguucacgugcaccggcguggucaccgaggccgagaccuacacgaacuucgugggcuacgugaccaccaccuucaagcgcaagcacuuccggcccacgccggacgccugccgcgccgccuacaacuggaagauggcgggggacccccgguacgaggagucccugcacaaccccuaccccgacuaccacuggcuccgcaccgucaagaccgccaaggagagccugaucaucaucuccccgagcguggccgaccuggaccccuacgacaagucccuccacagccggguguuccccuccggcaagugccuggggaucaccaucagcuccacguacugcagcaccaaccacgacuacaccaucuggaugcccgagaacguccgccugggcaccuccugcgacaucuucacgaacagccgggggaagcgcgccuccaagggcagcaagaccugcggcuucguggacgagcgggggcucuacaagucccugaagggcgcgugcaagcugaagcucugcggggugcugggccugcgccucauggacggcaccugggucagcaugccgaccagcgacgagacgaaguggugcccgcccgaccagcuggugaaccugcacgacuuccgguccgacgagaucgagcaccucguggucgaggagcuggugcgcaagcgggaggagugccuggacgcccucgagagcaucaugaccaccaaguccgugagcuuccgccggcugucccaccuccgcaagcucguccccggguucggcaaggccuacaccaucuucaacaagacgcugauggaggccgacgcccacuacaagagcgugcggaccuggaacgagaucauccccuccaaggggugccugcgcgugggcgggcggugccacccccacaucaacggcgucuucuucaacggcaucauccucgggcccgacggccacgugcugauccccgagaugcagagcucccugcuccagcagcacauggagcugcuggagagcuccgucaucccgcucaugcacccccuggcggaccccagcaccguguucaaggacggggacgaggccgaggacuucguggagguccaccuccccgacgugcacaagcagaucuccggcguggaccuggggcugccgaacuggggcaaguacguccugaucaucgccggcgugcucaucgccaugauccugaccaucuuccugaugacgugcugcgggcgcggcaaccggcccaagagcacccagcacucccucgggggcaucgggcgcaaggugagcuccaccagccaguccggcaaggucaucagcagcugggaguccuacaagagcggcggggagacccgccuguga

SEQ ID NO: 95811 - RNA, 1575 nt, Artificial Sequence; identical to SEQ ID NO: 95361
  derived and/or modified CDS sequence (opt1) from glycoprotein__RABV__KU534939.1

SEQ ID NO: 95812 - RNA, 1575 nt, Artificial Sequence
  derived and/or modified CDS sequence (opt1) from glycoprotein__RABV__KU534940.1
auggugccgcagguccugcuguucgugccgcugcugguguucagcaugugcuucggcaaguuccccaucuacaccauccccgacaagcucgggcccugguccccgaucgacauccaccaccugagcugccccaacaaccuggucguggaggacgagggcugcaccaaccucuccggguucagcuacauggagcugaaggugggcuacaucuccgccaucaaggucaacggguucacgugcaccggcguggugaccgaggccgagaccuacacgaacuucgucggcuacgugaccaccaccuucaagcgcaagcacuuccggcccacgcccgacgcgugccgcgccgccuacaacuggaagauggccggggacccgcgguacgaggagagccugcacaaccccuaccccgacuaccacuggcuccgcaccgugaagaccaccaaggagucccuggucaucaucagccccuccguggccgaccuggacccguacgacaagagccuccacucccggguguuccccagcggcaagugcuccgggaucacgaucagcuccaccuacugcagcaccaaccacgacuacaccaucuggaugcccgagaacccccgccugggcacguccugcgacaucuucaccaacagccgggggaagcgcgcguccaagggcggcaagaccugcggguucgucgacgagcggggccuguacaagagccucaagggggccugcaagcugaagcugugcggcgugcucggccugcgccugauggacgggaccuggguggccaugcagacgagcgacgagaccaaguggugcccgcccgaccagcucgucaaccugcacgacuuccgguccgacgagaucgagcaccuggugguggaggagcucgucaagaagcgcgaggagugccuggacgcccuggagagcaucaugaccaccaaguccgugagcuuccggcgccucucccaccuccggaagcuggugcccggcuucgggaaggcguacacgaucuucaacaagacccucauggaggccgacgcccacuacaagagcguccgcaccuggaacgagaucauccccuccaagggcugccugcgggucgggggccgcugccacccgcacgugaagggcguguucuucaacgggaucauccugggccccgacgggcacgugcucauccccgagaugcagagcucccugcugcagcagcacauggagcuccuggagagcuccgucaucccccugaugcacccgcucgccgaccccagcaccguguucaaggacggcgacgaggccgaggacuucguggagguccaccuccccgacgugcacaagcagaucuccgggguggaccugggccugcccagcuggggcaaguacguccuggcguccgccggggugcuggugguccucaugcugacgaucuucaucaucacgugcugcggccgggugcaccgccccaagagcacccagcacgggcugggcgggaccggccggaagguguccgucaccagccaguccggcaaggugaucagcagcugggaguccuacaagagcgggggcgagacccgccucuga

SEQ ID NO: 95813 - RNA, 1575 nt, Artificial Sequence; identical to SEQ ID NO: 95362
  derived and/or modified CDS sequence (opt1) from glycoprotein__RABV__KU534941.1

SEQ ID NO: 95814 - RNA, 1575 nt, Artificial Sequence; identical to SEQ ID NO: 95148
  derived and/or modified CDS sequence (opt1) from glycoprotein__RABV__KU534942.1

SEQ ID NO: 95815 - RNA, 1575 nt, Artificial Sequence
  derived and/or modified CDS sequence (opt1) from glycoprotein__RABV__KU739036.1
auggugccgcagguccugugguucgugccgcuccugguguucagcaugugcuucggcaaguuccccaucuacaccauccccgacaagcuggggcccugguccccgaucgacauccaccaccucagcugccccaacaaccuggucguggaggacgagggcugcaccaaccuguccggguucagcuacauggagcucaaggugggcuacaucuccgccaucaaggucaacggguucacgugcaccggcguggugaccgaggccgagaccuacacgaacuucgucggcuacgugaccaccaccuucaagcgcaagcacuuccggcccacgcccgacgcgugccgcgccgccuacaacuggaagauggccggggacccgcgguacgaggagagccugcacaaccccuaccccgacuaccacuggcugcgcaccgugaagaccaccaaggagucccucgucaucaucagccccuccguggccgaccuggacccguacgacaagagccugcacucccggguguuccccagcggcaagugcuccgggaucacgaucagcuccaccuacugcagcaccaaccacgacuacaccaucuggaugcccgagaacccccgccucggcacguccugcgacaucuucgcgaacagccgggggaagcgcgccuccaagggcagcaagaccugcggcuucgucgacgagcgggggcuguacaagagccugaagggcgccugcaagcucaagcugugcggggugcugggccuccgccugauggacggcaccuggguggccaugcagaccuccgacgagacgaaguggugcccgcccgaccagcuggucaaccuccacgacuuccggagcgacgagaucgagcaccuggugguggaggagcuggucaagaagcgcgaggagugccucgacgcgcuggaguccaucaugaccaccaagagcguguccuuccggcgccugagccaccuccggaagcuggugcccggguucggcaaggccuacaccaucuucaacaagacgcugauggaggccgacgcccacuacaaguccguccgcaccuggaacgagaucauccccagcaaggggugccuccgggugggcgggcgcugccacccgcacgucaacggcguguucuucaacggcaucauccuggggcccgacggccacgugcugauccccgagaugcaguccagccuccugcagcagcacauggagcugcucgaguccagcgucaucccccugaugcacccgcuggccgaccccuccaccguguucaaggacggggacgaggcggaggacuucguggagguccaccuccccgacgugcacaagcagaucagcggcguggaccuggggcugcccaacuggggcaaguacguccucguguccgccggcgugcuggucgugcugaugcucgccaucuucaucaugaccugcugcgggcgggugaaccgccccaagagcacgcagcacucccuggagggcaccgggcggaaggucagcgugaccucccagagcggcaaggugaucagcuccugggagagcuacaaguccgggggcgagacccgccuguga

SEQ ID NO: 95816 - RNA, 1575 nt, Artificial Sequence
  derived and/or modified CDS sequence (opt1) from glycoprotein__RABV__KU739037.1
auggugccccaggcccuccuguucgucccgcugcugguguucccccucugcuucggcaaguuccccaucuacaccauccccgacaagcuggggccguggagccccaucgacauccaccaccuguccugccccaacaaccucguggucgaggacgagggcugcaccaaccugagcggguucuccuacauggagcugaaggugggcuacaucagcgccaucaaggugaacggguucacgugcaccggcgucgugaccgaggcggagaccuacacgaacuucgugggcuacgucaccaccaccuuccgccggaagcacuuccgccccacgccggacgccugccgggccgccuacaacuggaagauggccggggacccccgcuacgaggagucccuccacaaccccuaccccgacuaccacuggcugcggaccgugaagaccaccaaggagagccuggugaucaucuccccgagcgucgcggaccucgaccccuacgacaagucccugcacagccgcguguuccccggcgggaagugcuccggcaucacggugagcuccaccuacugcagcaccaaccacgacuacaccaucuggcugcccgagaacccgcggcucgggacguccugcgacaucuucaccaacagccgcggcaagcgggccuccaagggcagcaagaccugcggguucgucgacgagcgcggccuguacaagucccugaagggggccugcaagcucaagcugugcggcgugcugggccuccggcugauggacgggaccuggguggccaugcagacgagcgacgagaccaaguggugcccgcccgaccagcuggucaaccuccacgacuuccgcagcgacgagaucgagcaccuggugguggaggagcuggucaagaagcgggaggagugccucgacgcgcuggaguccaucaugaccaccaagagcguguccuuccgccggcugagccaccuccgcaagcuggugcccggcuucgggaaggccuacacgaucuucaacaagacccugauggaggccgacgcccacuacaaguccguccggaccuggaacgagaucauccccagcaagggcugccuccgcgucgggggccggugccaccaccacgugaacggcguguucuucaacgggaucauccugggccccgacgggcacgugcugauccccgagaugcaguccagccuccugcagcagcacauggagcugcucgaguccagcgucaucccccugaugcacccgcuggccgaccccuccaccguguucaaggacggcgacgaggcggaggacuucguggagguccaccuccccgacgugcacaagcaggucagcgggguggaccugggccugcccaacuggggcaaguacgugcuccuguccgccggggcccugaucgcccucaugcugaucaucuuccugaugacgugcugccgccgggugaaccgcccggagagcacccagcgcuccuucggcgggaccgagcgggaggucagcaucacgccccaguccggcaaggugaucagcuccugggagagcuacaagagcgggggcgagacccgccuguga

SEQ ID NO: 95817 - RNA, 1575 nt, Artificial Sequence
  derived and/or modified CDS sequence (opt1) from glycoprotein__RABV__KU739038.1
auggugccccuggcccuccuggucgugccgcugcucgugcugagccugugcuccggcaaguuccccaucuacaccauccccgacaagcucgggcccuggagcccgaucgacauccaccaccuguccugccccaacaaccuggucguggaggacgagggcugcaccaaccucagcggguucuccuacauggagcugaaggugggcuacaucagcgccaucaaggucaacggguucacgugcaccggcguggugaccgaggcggagaccuacacgaacuucgucggcuacgugaccaccaccuuccgccggaagcacuuccgccccacgcccgacgccugccgggccgccuacaacuggaagauggccggggacccgcgcuacgaggagucccugcacaaccccuaccccgacuaccacuggcuccggaccgugaagaccaccaaggagagccuggucaucaucucccccagcguggcggaccuggacccguacgaccgcucccuccacagccggguguuccccaacggcaagugcuccgggaucacggucagcuccaccuacugccccaccaaccacgacuacaccaucuggaugcccgagaacccgcgccugggcacgagcugcgacaucuucgugaacucccgggggaagcgcgccagcaagggcuccaagaccugcggcuucguggacgagcgggggcuguacaagagccucaagggcgccugcaagcugaagcugugcgggguccucggccugcgccugauggacggcaccuggguggccaugcggaccagcgacgagacgaaguggugcccgcccgaccagcucgugaacauccacgacuuccgcuccgacgagaucgagcaccuggucguggaggagcuggugaagaagcgggaggagugccucgacgcgcuggagagcaucaugaccaccaaguccgucagcuuccgccggcugucccaccuccgcaagcuggugcccggguucggcaaggccuacaccaucuucaacaagacgcugauggaggccgacgcccacuacaagagcguccggaccugggacgagaucauccccuccaaggggugccuccgcgugggcgggcggugccacccccacgugcacggcgucuucuucaacggcaucauccuggggcccgacggccacgugcugauccccgagaugcagagcucccuccugcagcagcacauggagcugcucgagagcuccgugaucccgcugaugcacccccuggccgaccccagcaccgucuucaaggacggggacgaggcggaggacuucguggaggugcaccuccccgacguccacaagcagaucuccggcguggaccuggggcugccgaacuggggcaaguacgugcucaugagcgccggcgcccugaucgcccugaugcucaucaucuuccugaugaccugcugccgcaagaucaagcagcccgaguccacgcagcacagccugcgcgggaccggccggaaggucuccgugaccagccagaacgggaaggugaucuccagcugggagagcuacaaguccggcggggagacccgccuguga

SEQ ID NO: 95818 - RNA, 1575 nt, Artificial Sequence
  derived and/or modified CDS sequence (opt1) from glycoprotein__RABV__KU739043.1
auggugccccugacccuccuggucgugccgcugcucgugcugagccugugcuccggcaaguuccccaucuacaccauccccgacaagcucgggcccuggagcccgaucgacauccaccaccuguccugccccaacaaccuggucguggaggacgagggcugcacgaaccucagcggguucuccuacauggagcugaaggugggcuacaucagcgccaucaaggucaacggguucacgugcaccggcguggugaccgaggccgagaccuacaccaacuucgucggcuacgugaccaccacguuccgccggaagcacuuccgccccacccccgacgcgugccggaccgccuacaacuggaagauggccggggacccgcgcuacgaggagucccugcacaaccccuaccccgacuaccacuggcuccggaccgugaagacgaccaaggagagccuggucaucaucucccccagcguggccgaccuggacccguacgaccgcucccuccacagccggguguuccccaacggcaagugcuccgggaucaccgucagcuccaccuacugccccacgaaccacgacuacaccaucuggaugcccgagaacccgcgccugggcaccagcugcgacaucuucgugaacucccgggggaagcgcgccagcaagggcuccaagaccugcggcuucguggacgagcgggggcuguacaagagccucaagggcgcgugcaagcugaagcugugcgggguccucggccugcgccugauggacggcacguggguggccaugcggaccagcgacgagaccaaguggugcccgcccgaccagcucgugaacauccacgacuuccacuccgacgagaucgagcaccuggucguggaggagcuggugaagaagcgcgaggagugccucgacgcccuggagagcaucaugaccacgaaguccgucagcuuccggcgccugucccaccuccggaagcuggugcccggguucggcaaggccuacaccaucuucaacaagacccugauggaggcggacgcccacuacaagagcguccgcaccugggacgagaucauccccuccaaggggugccuccgggugggcgggcgcugccacccccacgugcacggcgucuucuucaacggcaucauccuggggcccgacggccacgugcugauccccgagaugcagagcucccuccugcagcagcacauggagcugcucgagagcuccgugaucccgcugaugcacccccuggccgaccccagcacggucuucaaggacggggacgaggccgaggacuucguggaggugcaccuccccgacguccacaagcagaucuccggcguggaccuggggcugccgaacuggggcaaguacgugcucaugagcgccggcgcgcugaucgcccugaugcucaucaucuuccugaugaccugcugccggaagaucaagcgccccgaguccacccagcacagcccccgcgggaccggccggaaggucuccgugacgagccagaacgggaaggugaucuccagcugggagagcuacaaguccggcggggagacccgccuguga

SEQ ID NO: 95819 - RNA, 1575 nt, Artificial Sequence
  derived and/or modified CDS sequence (opt1) from glycoprotein__RABV__KU739044.1
auggugccccaggcccugcuguucgucccgcugcugguguucagccucugcuucggcaaguuccccaucuacaccauccccgacaagcuggggcccugguccccgaucgacauccaccaccugagcugccccaacaaccucguggucgaggacgagggcugcaccaaccuguccggguucagcuacauggagcugaaggugggcuacaucuccgccaucaaggugaacggguucacgugcaccggcgucgugaccgaggcggagaccuacacgaacuucgugggcuacgucaccaccaccuucaagcgcaagcacuuccggcccacgcccgacgccugccgcgccgccuacaacuggaagauggccggggacccgcgguacgaggagagccuccacaaccccuaccccgacuaccacuggcugcgcaccgugaagaccaccaaggagucccuggugaucaucagccccuccgucgcggaccucgacccguacgacaagagccugcacucccggguguuccccagcggcaagugcuccgggaucacggugagcuccaccuacugcagcaccaaccacgacuacaccaucuggaugcccgagaacccccgccugggcacguccugcgacaucuucaccaacagccgggggaagcgcgccuccaagggcagcaagaccugcggcuucgucgacgagcgggggcucuacaagagccugaagggcgccugcaagcugaagcucugcggggugcugggccugcgccucauggacggcaccuggguggccaugcagacguccgacgagaccaaguggugcccgcccgaccagcuggucaaccugcacgacuuccggagcgacgagaucgagcaccucgugguggaggagcuggucaagaagcgcgaggagugccuggacgcgcucgaguccaucaugaccaccaagagcguguccuuccggcgccugagccaccuccggaagcucgugcccggguucggcaaggccuacacgaucuucaacaagacccugauggaggccgacgcccacuacaaguccguccgcaccuggaacgagaucauccccagcaaggggugccugcgggugggcgggcgcugccacccgcacgucaacggcguguucuucaacggcaucauccucgggcccgacggccacgugcugauccccgagaugcaguccagccugcuccagcagcacauggagcugcuggaguccagcgucaucccccucaugcacccgcuggccgaccccuccaccguguucaaggacggggacgaggcggaggacuucguggagguccaccuccccgacgugcacaagcaggucagcggcguggaccuggggcugcccaacuggggcaaguacgugcugcucuccgccggcacgcugaucgcccugaugcucaucaucuuccugaugaccugcugccggcgcgugaaccggcccaagagcacccagcgcgggccgggcgagaccgggcgcaaggucuccgugacgagccaguccggcaaggugaucagcagcugggaguccuacaagagcgggggcgagacccggcuguga

SEQ ID NO: 95820 - RNA, 1575 nt, Artificial Sequence; identical to SEQ ID NO: 94579
  derived and/or modified CDS sequence (opt1) from glycoprotein__RABV__KU739045.1

SEQ ID NO: 95821 - RNA, 1575 nt, Artificial Sequence; identical to SEQ ID NO: 95711
  derived and/or modified CDS sequence (opt1) from glycoprotein__RABV__KU739047.1

SEQ ID NO: 95822 - RNA, 1575 nt, Artificial Sequence
  derived and/or modified CDS sequence (opt1) from glycoprotein__RABV__KU739048.1
auggugccccaggcccuccuguucgucccgcugcugggcuucagccucugcuucgggaaguuccccaucuacaccauccccgacaagcugggccccugguccccgaucgacauccaccaccugagcugccccaacaaccucgugguggaggacgaggggugcaccaaccuguccggcuucagcuacauggagcugaaggucggguacaucuccgccaucaaggugaacggcuucacgugcaccggcguggucaccgaggcggagaccuacacgaacuucgugggguacgugaccaccaccuucaagcgcaagcacuuccggcccacgcccgacgccugccgcgccgccuacaacuggaagauggccggcgacccgcgguacgaggagagccuccacaaccccuaccccgacuaccacuggcugcgcaccgucaagaccaccaaggagucccuggugaucaucagccccuccguggcggaccucgacccguacgacaagagccugcacucccgggucuuccccgggggcaagugcagcgggaucacgguguccagcaccuacugcuccaccaaccacgacuacaccaucuggcugcccgagaacccccgccucggcacgagcugcgacaucuucaccaacucccggggcaagcgcgccagcaagggguccaagaccugcggcuucguggacgagcgggggcuguacaagagccugaagggcgccugcaagcucaagcugugcggcguccuggggcuccgccugauggacggcaccuggguggccaugcagacgagcgacgagaccaaguggugcuccccggaccagcuggugaaccuccacgacuuccggagcgacgagaucgagcaccuggucguggaggagcuggugaagaagcgcgaggagugccucgacacccuggaguccaucaugaccaccaagagcgucuccuuccggcgccugagccaccuccggaagcuggugcccggguucggcaaggcguacacgaucuucaacaagacccugauggaggccgacgcccacuacaaguccgugcgcaccuggaacgagaucauccccagcaaggggugccuccgggucggcggccgcugccaccaccacgugaacggggucuucuucaacggcaucauccuggggcccgacggccacgugcugaucccggagaugcaguccagccuccugcagcagcacauggagcugcucgaguccagcgugaucccccugaugcacccccuggccgaccccuccacggucuucaaggacggggacgaggccgaggacuucguggaggugcaccucccggacguccacaagcaggucagcggcguggaccugggccugcccaacugggggaaguacgugcuccuguccgcgggcgcccugguggcccucaugcugaucaucuuccugaugaccugcugccggcgcgugaaccggcccgagagcacccagcgcuccuucgggggcaccgagcgcaaggucagcaucacgccccaguccgggaaggugaucagcagcugggaguccuacaagagcggcuccgagacccggcuguga

SEQ ID NO: 95823 - RNA, 1575 nt, Artificial Sequence
  derived and/or modified CDS sequence (opt1) from glycoprotein__RABV__KU739049.1
auggugccccaggcccugcuccuggucccgcugcucggcuucagccugugcuucgggaaguuccccaucuacaccauccccgacaagcugggccccugguccccgaucgacauccaccaccucagcugccccaacaaccuggugguggaggacgaggggugcaccaaccuguccggcuucagcuacauggagcucaaggucggguacaucuccagcaucaaggugaacggcuucacgugcaccggcguggucaccgaggccgagaccuacacgaacuucgugggguacgugaccaccaccuuccgccggaagcacuuccgccccacgcccgacgcgugccgggccgccuacaacuggaagauggccggcgacccgcgcuacgaggagucccugcacaaccccuaccccgacuaccacuggcugcggaccgucaagaccaccaaggagagccucgugaucaucucccccagcguggccgaccuggacccguacgacaagucccugcacagccgcgucuuccccuccgggaagugcagcggcaucacgguguccagcaccuacugcuccaccaaccacgacuacaccaucuggaugcccgagaaccuccggcuggggacgagcugcgacaucuucaccaacucccgcggcaagcgggcgagcaagggcagcaagaccugcggguucguggacgagcgcggccuguacaagucccucaagggggccugcaagcugaagcugugcggcguccucggccugcggcugauggacgggaccuggguggccaugcagacgagcgacgagaccaaguggugcccgcccgaccagcucgugaaccugcacgacuuccgcuccgacgagaucgagcaccuggucguggaggagcucgugaagaagcgggaggagugccuggacgcccuggagagcaucaugaccaccaaguccgucagcuuccgccggcucucccaccuccgcaagcuggugcccggcuucgggaaggcguacacgaucuucaacaagacccugauggaggccgacgcccacuacaagagcgugcggaccuggaacgaggucauccccucccgcggcugccugcgggucgggggccgcugccacccccacgugaacggcguguucuucaacgggaucauccugggcccggacgggcacgugcucauccccgagaugcagagcucccugcugcagcagcacaucgagcuccuggagagcuccgucaucccccugacccacccccucgccgacccgagcacgguguucaaggacggcgacgaggccgaggacuucguggagguccaccuccccgacgugcacaagcaggucuccgggguggaccugggccugcccaacuggggcaaguacgugcugcugagcgcgggggcccucaucgcccugaugcugaucaucuuccugaucacgugcugccggcgcgugaaccgccccgaguccacccagcggagccuccgcggcgccgggcggaaggucuccaucaccagccagagcggcaaggugaucuccagcugggaguccuacaagagcgggggcgagacccgccuguga

SEQ ID NO: 95824 - RNA, 1575 nt, Artificial Sequence
  derived and/or modified CDS sequence (opt1) from glycoprotein__RABV__KU739050.1
auggugccccaggcccugcuguucgucccgcugcugguguucagccucugcuucggcaaguuccccaucuacaccauccccgacaagcuggggcccugguccccgaucgacauccaccaccugagcugccccaacaaccucguggucgaggacgagggcugcaccaaccuguccggguucagcuacauggagcugaaggugggcuacaucuccgccaucaaggugaacggguucacgugcaccggcgucgugaccgaggcggagaccuacacgaacuucgugggcuacgucaccaccaccuuccgccggaagcacuuccgccccacgcccgacgccugccgggccgccuacaacuggaagauggccggggacccgcgcuacgaggagagccuccacaaccccuaccccgacuaccacuggcugcggaccgugaagaccaccaaggagucccuggugaucaucagccccuccgucgcggaccucgacccguacgacaagagccugcacucccgcguguuccccagcggcaagugcuccgggaucacggugagcuccaccuacugcagcaccaaccacgacuacaccaucuggaugcccgagaacccccggcugggcacguccugcgacaucuucaccaacagccgcgggaagcgggccuccaagggcagcaagaccugcggcuucgucgacgagcgcgggcucuacaagagccugaagggcgccugcaagcugaagcucugcggggugcugggccugcggcucauggacggcaccuggguggccaugcagacgaccgacgagaccaaguggugcccgcccgaccagcuggucaaccugcacgacuuccgcuccgacgagaucgagcaccucgugguggaggagcuggucaagaagcgggaggagugccuggacgcgcucgagagcaucaugaccacgaaguccgugagcuuccgccggcugucccaccuccgcaagcucgugcccggguucggcaaggccuacaccaucuucaacaagacccugauggaggccgacgcccacuacaagagcguccggaccuggaacgagaucauccccuccaaggggugccugcgcgugggcgggcggugccacccgcacgucaacggcguguucuucaacggcaucauccucgggcccgacggccacgugcugauccccgagaugcagagcucccugcuccagcagcacauggagcugcuggagagcuccgucaucccccucaugcacccgcuggccgaccccagcacgguguucaaggacggggacgaggcggaggacuucguggagguccaccuccccgacgugcacaagcaggucuccggcguggaccuggggcugcccaacuggggcaaguacgugcugcucagcgccggcacccugaucgcccugaugcucaucaucuuccugaugaccugcugccgccgggugaaccgcccggaguccaugcagcgcagccugggggagaccggccggaaggucuccgugacgagccaguccgggaaggugaucagcagcugggaguccuacaagagcggcggggagacccgccuguga

SEQ ID NO: 95825 - RNA, 1575 nt, Artificial Sequence
  derived and/or modified CDS sequence (opt1) from glycoprotein__RABV__KU888637.1
auggugccccaggcccugcuguucgucccgcugcugguguucagccucugcuucggcaaguuccccaucuacaccauccccgacaagcuggggcccugguccccgaucgacauccaccaccugagcugccccaacaaccucguggucgaggacgagggcugcaccaaccuguccggguucagcuacauggagcugaaggugggcuacaucuccgccaucaaggugaacggguucacgugcaccggcgucgugaccgaggcggagaccuacacgaacuucgugggcuacgucaccaccaccuucaagcgcaagcacuuccggcccacgcccgacgccugccgcgccgccuacaacuggaagauggccggggacccgcgguacgaggagagccuccacaaccccuaccccgacuaccacuggcugcgcaccgugaagaccaccaaggagucccuggugaucaucagccccuccgucgcggaccucgacccguacgacaagagccugcacucccggguguuccccagcggcaagugcuccgggaucacggugagcuccaccuacugcagcaccaaccacgacuacaccaucuggaugcccgagaacccccgccugggcacguccugcgacaucuucgccaacagccgggggaagcgcgccuccaagggcagcaagaccugcggcuucgucgacgagcgggggcucuacaagagccugaagggcgccugcaagcugaagcucugcggggugcugggccugcgccucauggacggcaccuggguggcgaugcagaccuccgacgagacgaaguggugcccgcccgaccagcuggucaaccugcacgacuuccggagcgacgagaucgagcaccucgugguggaggagcuggucaagaagcgcgaggagugccuggacgcccucgaguccaucaugaccaccaagagcguguccuuccggcgccugagccaccuccggaagcucgugcccggguucggcaaggccuacaccaucuucaacaagacgcugauggaggccgacgcccacuacaaguccguccgcaccuggaacgagaucauccccagcaaggggugccugcgggugggcgggcgcugccacccgcacgucaacggcguguucuucaacggcaucauccucgggcccgacggccacgugcugauccccgagaugcaguccagccugcuccagcagcacauggagcugcuggaguccagcgucaucccccucaugcacccgcuggcggaccccuccaccguguucaaggacggggacgaggccgaggacuucguggagguccaccuccccgacgugcacaagcaggucagcggcguggaccuggggcugcccggcuggggcaaguacgugcugcucuccgccggggcccugaucgcccugaugcucaucaucuuccugaugaccugcugccggcgcgugaaccggccggagagcacgcagcgcucccugggcgggaccggccgcaaggucagcaucaccucccagagcgggaaggugaucagcuccugggagagcuacaaguccggcggcgagacccggcuguga

SEQ ID NO: 95826 - RNA, 1575 nt, Artificial Sequence; identical to SEQ ID NO: 95362
  derived and/or modified CDS sequence (opt1) from glycoprotein__RABV__KU888639.1

SEQ ID NO: 95827 - RNA, 1575 nt, Artificial Sequence
  derived and/or modified CDS sequence (opt1) from glycoprotein__RABV__KU888640.1
auggugccccaggcccugcuguucgucccgcugcugggcuucagccucugcuucgggaaguuccccaucuacaccauccccgacaagcugggccccugguccccgaucgacauccaccaccugagcugccccaacaaccucgugguggaggacgaggggugcaccaaccuguccggcuucagcuacauggagcugaaggucggguacaucuccgccaucaaggugaacggcuucacgugcaccggcguggucaccgaggcggagaccuacacgaacuucgugggguacgugaccaccaccuucaagcgcaagcacuuccggcccacgcccgacgccugccgcgccgccuacaacuggaagauggccggcgacccgcgguacgaggagagccuccacaaccccuaccccgacuaccacuggcugcgcaccgucaagaccaccaaggagucccuggugaucaucagccccuccguggcggaccucgacccguacgacaagagccugcacucccgggucuuccccagcgggaagugcuccggcaucacggugagcuccaccuacugccccaccaaccacgacuacaccaucuggaugcccgagaacccgcgccuggggacgagcugcgacaucuucaccuccagcaagggcaagcgggccuccaagggcagcaagaccugcggguucguggacgagcgcggccucuacaagagccugaagggggccugcaagcugaagcucugcggcguccugggccugcggcucauggacgggaccuggguggccaugcagacguccgacgagaccaaguggugcccgcccgaccagcuggugaaccugcacgacuuccgcagcgacgagaucgagcaccucgucguggaggagcuggugaagaagcgggaggagugccuggacgcgcucgaguccaucaugaccaccaagagcgucuccuuccgccggcugagccaccuccgcaagcucgugcccggcuucgggaaggccuacacgaucuucaacaagacccugauggaggccgacgcccacuacaaguccgugcggaccuggaacgagaucauccccagcaagggcugccugcgcaucgggggccggugccacccccacgucaacggcguguucuucaacgggaucauccucggccccgacgggcacguccugauccccgagaugcaguccagccugcuccagcagcacauggagcugcuggaguccagcgugaucccgcucaugcacccccuggccgaccccuccaccgugcugaaggacggcgacgaggcggaggacuucgucgaggugcaccuccccgacgugcacaagcagaucagcggggucgaccugggccugccgaacuggggcaaguacgugcuccuguccgccggggcccugaucgcccucaugcugaucaucuuccugaugacgugcugccgccgggugaaccgccaggagagcacccagcggucccugggcgggaccggccgcaaggucagcaucaccucccagagcgggaaggugaucagcuccugggagagcuacaaguccggcggcgagacgcgccucuga

SEQ ID NO: 95828 - RNA, 1575 nt, Artificial Sequence
  derived and/or modified CDS sequence (opt1) from glycoprotein__RABV__KU888641.1
auggugccccaggcccugcucgucaucccgcugcugggcuucagccucugcuucgggaaguuccccaucuacaccauccccgacaagcugggccccugguccccgaucgacauccaccaccugagcugccccaacaaccucaucguggaggacgaggggugcaccaaccuguccggcuucagcuacauggagcugaaggugggguacaucuccgccaucaaggucaacggcuucacgugcaccggcguggugaccgaggcggagaccuacacgaacuucgucggguacgugaccaccaccuucaagcgcaagcacuuccggcccacgcccgacgagugccgcgccgccuacaacuggaagauggccggcgacccgcgguacgaggagagccuccacaaccccuaccccgacuaccacuggcugcgcaccgugaagaccaccaaggagucccuggucaucaucagccccuccguggccgaccucgacccguacgacaagagccugcacucccggguguuccccagcgggaagugcuccggcaucacggucagcuccaccuacugcagcaccaaccacgacuacaccaucuggaugcccgagaacccccgccuggggacguccugcgacaucuucaccaacagccggggcaagcgcgcguccaagggcagcaagaccugcggguucguggacgagcggggccucuacaagagccugaagggggccugcaagcugaagcucugcggcgugcugggccugaagcucauggacgggaccugggucgccaugcaggccuccgacgagacgaaguggugcccgcccgaccagcuggugaaccugcacgaccuccgcagcgacgagaucgagcaccugguggucgaggagcuggugaagaagcgggaggagugccucgacgcgcuggaguccaucaugaccaccaagagcguguccuuccgccggcugagccaccuccgcaagcugguccccggcuucgggaaggccuacaccaucuucaacaagacgcugauggaggccgacgcccacuacaaguccgugcggaccuggaacgagaucauccccagcaagggcugccucaaggucgggggccgcugccacccgcacgugaacggcguguucuucaacggggucauccugggccccgacgggcacgugcugauccccgagaugcaguccagccuccugcagcagcacauggagcugcucgaguccagcgugaucccccugaugcacccgcuggccgaccccuccaccgucuucaaggacggcgaggaggcggaggacuucguggaggugcaccuccccgacguccacaagcaggucagcgggguggaccugggccugcccaacuggggcaaguacgugucccucggggccggcgcccugaucgcccugaugcucaccauccugcugaucacgugcugccggcgcgugaaccggccggagcccacccgccggagccuggaggggaaggagcgcaagguguccgucaccagccaguccggcaaggugaucagcagcugggaguccuacaagagcgggggcgagacccgccucuga

SEQ ID NO: 95829 - RNA, 1575 nt, Artificial Sequence
  derived and/or modified CDS sequence (opt1) from glycoprotein__RABV__KU888642.1
auggugccccaggcccugcuguucgucccgcugcugggcuucagccucugcuucgggaaguuccccaucuacaccauccccgacaagcugggccccugguccccgaucgacauccaccaccugagcugccccaacaaccucgugguggaggacgaggggugcaccaaccuguccggcuucagcuacauggagcugaaggucggguacaucuccgccaucaaggugaacggcuucacgugcaccggcguggucaccgaggcggagaccuacacgaacuucgugggguacgugaccaccaccuucaagcgcaagcacuuccggcccacgcccgacgccugccgcgccgccuacaacuggaagauggccggcgacccgcgguacgaggagagccuccacaaccccuaccccgacuaccacuggcugcgcaccgucaagaccaccaaggagucccuggugaucaucagccccuccguggcggaccucgacccguacgacaagagccugcacucccgggucuuccccagcgggaagugcuccggcaucacggugagcuccaccuacugcagcaccaaccacgacuacaccaucuggaugcccgagaacccccgccuggggacguccugcgacaucuucaccaacagcaagggcaagcgggccuccaagggcagcaagaccugcggguucguggacgagcgcggccucuacaagagccugaagggggccugcaagcugaagcucugcggcguccugggccugcggcucauggacgggaccuggguggccaugcagacguccgacgagaccaaguggugcccgcccgaccagcuggugaaccugcacgacuuccgcagcgacgagaucgagcaccucgucguggaggagcuggugaagaagcgggaggagugccuggacgcgcucgaguccaucaugaccaccaagagcgucuccuuccgccggcugagccaccuccgcaagcucgugcccggcuucgggaaggccuacacgaucuucaacaagacccugauggaggccgacgcccacuacaaguccgugcggaccuggaacgagaucauccccagcaagggcugccugcgcgucgggggccggugccacccgcacgugaacggcgucuucuucaacgggaucauccucggccccgacgggcacgugcugauccccgagaugcaguccagccugcuccagcagcacauggagcugcuggaguccagcgugaucccccucaugcacccgcuggccgaccccuccaccguccugaaggacagcgacgaggcggaggacuucguggaggugcaccuccccgacguccacaagcagaucuccggcguggaccuggggcugcccaacuggggcaaguacgugcuccugagcgccggcgcccugaucgcccucaugcugaucaucuuccugaugacgugcugccgccgggucaaccgccaggaguccacccagcggagccucgggggcaccgggcgcaagguguccaucaccagccagagcggcaaggugaucuccagcugggaguccuacaagagcgggggcgagacgcgccuguga

SEQ ID NO: 95830 - RNA, 1575 nt, Artificial Sequence; identical to SEQ ID NO: 94869
  derived and/or modified CDS sequence (opt1) from glycoprotein__RABV__KU888643.1

SEQ ID NO: 95831 - RNA, 1575 nt, Artificial Sequence
  derived and/or modified CDS sequence (opt1) from glycoprotein__RABV__KU946961.1
augaucccccaggcccuccuguucgugccgcugcuggucuucccccucugcuucggcaaguuccccaucuacaccauccccgacaagcuggggccguggagccccaucgacauccaccaccuguccugccccaacaaccucgugguggaggacgagggcugcaccaaccugagcggguucuccuacauggagcugaaggucggcuacaucagcgccaucaaggugaacggguucacgugcaccggcguggucaccgaggcggagaccuacacgaacuucgugggcuacgugaccaccaccuucaagcgcaagcacuuccggcccacgccggacgccugccgcuccgccuacaacuggaagauggccggggacccccgguacgaggagagccuccacaaccccuaccccgacuaccacuggcugcgcaccgucaagaccaccaaggaguccguggugaucaucagcccguccgucgccgaccuggaccccuacgacaagagccuccacucccggguguucccccgcggcaagugcagcgggaucacgguguccagcgcguacugcuccaccaaccacgacuacaccaucuggaugcccgagaacccgcggcugggcaccagcugcgacaucuucacgaacucccgcgggaagcgggccagcaagggcuccaagaccugcggcuucgucgacgagcgcgggcuguacaagagccucaagggcgccugcaagcugaagcugugcggggugcucggccugcggcugauggacggcaccuggguggccauccagaccagcaacgagacgaaguggugcccgcccgaccagcucgucaaccugcacgacuuccacuccgacgagaucgagcaccuggugguggaggaggucgugaagaagcgcgaggagugccucgacgcgcuggagagcaucaugaccaccaaguccgugagcuuccggcgccugucccaccuccggaagcugguccccggguucggcaaggccuacaccaucuucaacaagacgcugauggaggccgacgcccacuacaagagcgugcagaccugggacgagaucauccccuccaaggggugccuccgcgucggcgggcggugccacccccacgugaacggcguguucuucaacggcaucauccuggggcccgacggccacguccugauccccgagaugcagagcucccuccugcagcagcacauggagcugcucaagagcuccgugaucccgcugaugcacccccuggccgaccccagcaccguguucaaggacggggacgaggucgaggacuucguggaggugcaccuccccgacguccacaagcaggucuccggcguggaccuggggcugccgaacuggggcaaggacgugcucaugggcgcgggggugcugaccgcccugaugcucaugaucuuccugaugacgugcugccgccggaccaaccgcgccgagagcauccagcacucccugggcgagaccgggcggaaggugagcgucaccucccagagcggccgcgugaucuccagcugggagagcuacaaguccgggggcgagacgaagcucuga

SEQ ID NO: 95832 - RNA, 1575 nt, Artificial Sequence; identical to SEQ ID NO: 95498
  derived and/or modified CDS sequence (opt1) from glycoprotein__RABV__KX036361.1

SEQ ID NO: 95833 - RNA, 1575 nt, Artificial Sequence
  derived and/or modified CDS sequence (opt1) from glycoprotein__RABV__KX036363.1
auggugccccaggcccugcuguucgucccgcugcuggccuuccccaugugcuucggcaaguuccccaucuacaccauccccgacaagcucgggccguggagccccaucgacauccaccaccuguccugccccaacaaccuggugguggaggacgagggcugcaccaaccucagcggguucuccuacauggagcugaaggucggcuacaucagcgcgaucaaggugaacggguucacgugcaccggcguggucaccgaggccgagaccuacacgaacuucgugggcuacgugaccaccaccuucaagcgcaagcacuuccggcccacgccggacgccugccgcgccgccuacaacuggaagauggcgggggacccccgguacgaggagucccugcacaaccccuaccccgacuaccacuggcuccgcaccgucaagaccaccaaggagagccugaucaucaucuccccgagcguggccgaccuggaccccuacgacaagucccuccacagccggguguuccccuccggcaagugccuggggaucacgaucagcuccaccuacugcagcaccaaccacgacuacaccaucuggaugcccgagaacguccgccugggcacguccugcgacaucuucaccaacagccgggggaagcgcgccuccaagggcagcaagaccugcggcuucguggacgagcgggggcucuacaagucccugaagggcgccugcaagcugaagcucugcggggugcugggccugcgccucauggacggcaccugggucgcgaugccgacgagcgacgagaccaaguggugcccgcccgaccagcuggugaaccugcacgacuuccggagcgacgagaucgagcaccucguggucgaggagcuggugcgcaagcgggaggagugccuggacgcccucgaguccaucaugaccaccaagagcguguccuuccgccggcugagccaccuccgcaagcucguccccggguucggcaaggccuacacgaucuucaacaagacccugauggaggccgacgcccacuacaaguccgugcggaccuggaacgagaucauccccagcaaggggugccugcgcgugggcgggcggugccacccccacgucaacggcguguucuucaacggcaucauccucgggcccgacggccacguccugauccccgagaugcaguccagccugcuccagcagcacauggagcugcuggaguccagcgugaucccgcucaugcacccccuggcggaccccuccaccguguucaaggacggggacgaggccgaggacuucgucgaggugcaccuccccgacgugcacaagcagaucagcggcgucgaccuggggcugccgaacuggggcaaguacgugcugaucaucgccggcgugcucaucgccaugauccugacgaucuuccugaugaccugcugcgggcgcggcaaccggcccaaguccaagcagcacagccucgggggcaucgggcgcaaggucuccagcaccucccagagcggcaaggugaucuccagcugggagagcuacaaguccggcggggagacccgccuguga

SEQ ID NO: 95834 - RNA, 1575 nt, Artificial Sequence; identical to SEQ ID NO: 95833
  derived and/or modified CDS sequence (opt1) from glycoprotein__RABV__KX036364.1

SEQ ID NO: 95835 - RNA, 1575 nt, Artificial Sequence; identical to SEQ ID NO: 95833
  derived and/or modified CDS sequence (opt1) from glycoprotein__RABV__KX036365.1

SEQ ID NO: 95836 - RNA, 1575 nt, Artificial Sequence
  derived and/or modified CDS sequence (opt1) from glycoprotein__RABV__KX036366.1
auggugccccaggcccugcuguucgucccgcugauggccuuccccaugugcuucggcaaguuccccaucuacaccauccccgacaagcuggggccguggagccccaucgacauccaccaccucuccugccccaacaaccuggugguggaggacgagggcugcaccaaccugagcggguucuccuacauggagcucaaggucggcuacaucagcgcgaucaaggugaacggguucacgugcaccggcguggucaccgaggccgagaccuacacgaacuucgugggcuacgugaccaccaccuucaagcgcaagcacuuccggcccacgccggacgccugccgcgccgccuacaacuggaagauggcgggggacccccgguacgaggagucccugcacaaccccuaccccgacuaccacuggcugcgcaccgucaagaccaccaaggagagccucaucaucaucuccccgagcguggccgaccuggaccccuacgacaagucccugcacagccggguguuccccuccggcaagugccucgggaucacgaucagcuccaccuacugcagcaccaaccacgacuacaccaucuggaugcccgacaacguccgccugggcacguccugcgacaucuucaccaacagccgggggaagcgcgccuccaagggcagcaagaccugcggcuucguggacgagcgggggcuguacaagucccucaagggcgccugcaagcugaagcugugcggggugcucggccugcgccugauggacggcaccugggucgcgaugccgacgagcgacgagaccaaguggugcccgcccgaccagcucgugaaccugcacgacuuccggcuggacgagaucgagcaccucguggucgaggagcuggugcgcaagcgggaggagugccuggacgcccucgagagcaucgugaccaccaaguccgucagcuuccgccggcugucccaccuccgcaagcucgugcccggguucggcaaggccuacacgaucuucaacaagacccugauggaggccgacgcccacuacaagagcgugcggaccuggaacgagaucauccccuccaaggggugccugcgcgucggcgggcggugccacccccacgugaacggcgucuucuucaacggcaucauccucgggcccgacggccacgugcugauccccgagaugcagagcucccugcuccagcagcacauggagcugcuggagagcuccgugaucccgcucaugcacccccuggcggaccccagcaccgucuucaaggacggggacgaggccgaggacuucguggaggugcaccuccccgacguccacaagcagaucuccggcguggaccuggggcugccgaacuggggcaaguacgugcugaucaucgccggcguccucaucgccaugauccugacgaucuuccugaugaccugcugcgggcgcggcaaccggcccaagagcacccagcacucccucgggggcaucgggcgcaaggugagcuccaccagccaguccggcaaggugaucagcuccugggagagcuacaagagcggcggggagacgcgccuguga

SEQ ID NO: 95837 - RNA, 1575 nt, Artificial Sequence
  derived and/or modified CDS sequence (opt1) from glycoprotein__RABV__KX036367.1
auggugccccaggcccugcuguucgucccgcugcuggccuuccccaugugcuucggcaaguuccccaucuacaccauccccgacaagcucgggccguggagccccaucgacauccaccaccuguccugccccaacaaccuggugguggaggacgagggcugcaccaaccucagcggguucuccuacauggagcugaaggucggcuacaucagcgcgaucaaggugaacggguucacgugcaccggcguggucaccgaggccgagaccuacacgaacuucgugggcuacgugaccaccaccuucaagcgcaagcacuuccggcccacgccggacgccugccgcgccgccuacaacuggaagauggcgggggacccccgguacgaggagucccugcacaaccccuaccccgacuaccacuggcuccgcaccgucaagaccaccaaggagagccugaucaucaucuccccgagcguggccgaccuggaccccuacgacaagucccuccacagccggguguuccccuccggcaagugccuggggaucacgaucagcuccaccuacugcagcaccaaccacgacuacaccaucuggaugcccgagaacguccgccugggcacguccugcgacaucuucaccaacagccgggggaagcgcgccuccaagggcagcaagaccugcggcuucguggacgagcgggggcucuacaagucccugaagggcgccugcaagcugaagcucugcggggugcugggccugcgccucauggacggcaccugggucgcgaugccgacgagcgacgagaccaaguggugcccgcccgaccagcuggugaaccugcacgacuuccggagcgacgagaucgagcaccucguggucgaggagcuggugcgcaagcgggaggagugccuggacgcccucgaguccaucaugaccaccaagagcguguccuuccgccggcugagccaccuccgcaagcucguccccggguucggcaaggccuacacgaucuucaacaagacccugauggaggccgacgcccacuacaaguccgugcggaccuggaacgagaucauccccagcaaggggugccugcgcgugggcgggcggugccacccccacgucaacggcguguucuucaacggcaucauccucgggcccgacggccacguccugauccccgagaugcaguccagccugcuccagcagcacauggagcugcuggaguccagcgugaucccgcucaugcacccccuggcggaccccuccaccguguucaaggacggggacgaggccgaggacuucgucgaggugcaccuccccgacgugcacaagcagaucagcggcgucgaccuggggcugccgaacuggggcaaguacgugcugaucaucgccggcgugcucaucgccaugauccugacgaucuuccugaugaccugcugcgggcgcggcaaccggcccauguccaagcagcacagccucgggggcaucgggcgcaaggucuccagcaccucccagagcggcaaggugaucuccagcugggagagcuacaaguccggcggggagacccgccuguga

SEQ ID NO: 95838 - RNA, 1575 nt, Artificial Sequence
  derived and/or modified CDS sequence (opt1) from glycoprotein__RABV__L40426.1
auggugccccagguccugcuguucgugcugcugcucggcuucagccugugcuucgggaaguucccgaucuacaccauccccgacaagcugggccccuggucccccaucgacauccaccaccuccgcugcccgaacaaccugguggucgaggacgaggggugcaccaaccugagcggcuucuccuacauggagcucaaggugggguacaucagcgccaucaaggugaacggcuucacgugcaccggcgucgugaccgaggccgagaccuacacgaacuucgugggguacgucaccaccaccuucaagcggaagcacuuccgccccacgcccgacgcgugccgggccgccuacaacuggaagauggccggcgacccccgcuacgaggagucccugcagaacccguaccccgacuaccacuggcugcggaccgugcgcaccaccaaggagagccucaucaucaucucccccagcgugacggaccuggaccccuacgacaagucccugcacagccgggucuuccccgggggcaagugcuccgggaucaccgugagcuccaccuacugcagcaccaaccacgacuacacgaucuggaugccggagaacccccgccccggcaccccgugcgacaucuucaccaacucccggggcaagcgcgccagcaacgggaacaagaccugcggcuucguggacgagcgggggcucuacaagucccugaagggcgcgugccgccugaagcucugcggcguccuggggcugcggcucauggacggcacguggguggccaugcagaccagcgacgagaccaaguggugcucccccgaccagcuggugaaccugcacgacuuccgcagcgacgagaucgagcaccucgucguggaggagcuggugaagaagcgggaggagugccuggacacccucgagagcaucaugacgaccaaguccgucagcuuccgccggcugucccaccuccgcaagcucgugcccggguucggcaaggccuacaccaucuucaacaagacccugauggaggccgacgcgcacuacaagagcgugcggacguggaacgagaucauccccuccaaggggugccugaaggucggcggccgcugccacccgcacgugaacggggucuucuucaacggcaucauccucgggcccgacgaccgggugcugauccccgagaugcagagcucccugcuccgccagcacauggagcugcuggagagcuccgugaucccccucaugcacccgcuggccgaccccagcaccgucuucaaggagggcgacgaggccgaggacuucguggaggugcaccuccccgacgucuacaagcagaucuccgggguggaccugggccugcccaacuggggcaaguacgugcugaugaccgccggggccaugaucggccucguccugaucuucagccugaugaccuggugccgccgggcgaaccgcccggaguccaagcagcggagcuucgggggcaccgggggcaacguguccgugacgagccaguccggcaaggucauccccagcugggaguccuacaagagcgggggcgagauccgccucuga

SEQ ID NO: 95839 - RNA, 1575 nt, Artificial Sequence; identical to SEQ ID NO: 94596
  derived and/or modified CDS sequence (opt1) from glycoprotein__RABV__LC009632.1

SEQ ID NO: 95840 - RNA, 1575 nt, Artificial Sequence
  derived and/or modified CDS sequence (opt1) from glycoprotein__RABV__LC009633.1
augaucccccaggcccugcuguucgugccgcugcuggucuucagccucugcuucggcaaguuccccaucuacaccauccccgacaagcuggggcccugguccccgaucgacauccaccaccugagcugccccaacaaccucgugguggaggacgagggcugcaccaaccuguccggguucagcuacauggagcugaaggucggcuacaucuccgccaucaaggugaacggguucacgugcaccggcguggucaccgaggcggagaccuacacgaacuucgugggcuacgugaccaccaccuucaagcgcaagcacuuccggcccacgcccgacgccugccgcgccgccuacaacuggaagauggccggggacccgcgguacgaggagagccuccacaaccccuaccccgacuaccacuggcugcgcaccgucaagaccaccaaggagucccuggugaucaucagccccuccguggcggaccucgacccguacgacaagagccugcacucccgggucuuccccagcggcaagugcuccgggaucacggugagcuccaccuacugcagcaccaaccacgacuacaccaucuggaugcccgagaacccccgccugggcacguccugcgacaucuucaccaacagccgggggaagcgcgccuccaagggcaacaagaccugcggcuucguggacgagcgggggcucuacaagagccugaagggcgccugcaagcugaagcucugcgggguccugggccugcgccucauggacggcaccugggccgcgauccagacgagcgacgagaccaaguggugcccgcccgaccagcuggugaaccugcacgacuuccgguccgacgagaucgagcaccucguggucgaggagcuggugaagaagcgcgaggagugccuggacgcccucgagagcaucaugaccaccaaguccgugagcuuccggcgccugucccaccuccggaagcucguccccggguucggcaaggccuacacgaucuucaacaagacccugauggaggccgacgcccacuacaagagcgugcgcaccuggaacgagaucauccccuccaaggggugccugcgggugggcgggcgcugccacccgcacgucaacggcguguucuucaacggcaucauccucgggcccgacggccacguccugauccccgagaugcagagcucccugcuccagcagcacauggagcugcuggagagcuccgugaucccccucaugcacccgcuggcggaccccagcaccguguucaaggacgacgacgaggccgaggacuucgucgaggugcaccuccccgacgugcacaagcaggucuccgggguggaccugggccugcccagcugggggaaguacgugcugauguccgccggcguccucacggcccugaugcugaugaucuuccucaugaccugcugccggcgcgccaaccgggcggagagcgcccagcacucccugggcgagcgcgggcgcaaggugagcgugaccucccagagcggccgggucaucagcuccugggagagcuacaaguccgggggcgagaccaagcuguga

SEQ ID NO: 95841 - RNA, 1575 nt, Artificial Sequence
  derived and/or modified CDS sequence (opt1) from glycoprotein__RABV__LC009635.1
auggugccccagguccugcuguucgugcugcugcucggcuucagccugugcuucgggaaguucccgaucuacaccauccccgacgagcugggccccuggucccccaucgacauccaccaccucagcugcccgaacaaccugguggucgaggacgaggggugcaccaaccuguccgaguucagcuacauggagcucaaggugggcuacaucuccgccaucaaggugaacggguucacgugcaccggcgucgugaccgaggccgagaccuacacgaacuucgugggcuacgucaccaccaccuucaagcgcaagcacuuccggcccacgcccgacgcgugccgcgccgccuacaacuggaagauggccggggacccccgguacgaggagagccugcacaacccguaccccgacuaccacuggcugcgcaccgugcggaccaccaaggagucccucaucaucaucagccccuccgugacggaccuggaccccuacgacaagagccugcacucccgcgucuucccgggcgggaagugcagcggcaucaccguguccagcaccuacugcuccaccaaccacgacuacacgaucuggaugcccgagaacccccggccccgcaccccgugcgacaucuucaccaacagccgggggaagcgcgccuccaacggcagcaagaccugcggcuucguggacgagcgggggcucuacaagucccugaagggcgcgugccgccugaagcucugcgggguccugggccugcggcucauggacggcacguggguggccaugcagaccagcgacgagaccaaguggugcccgcccgaccagcuggugaaccugcacgacuuccgcagcgacgagaucgagcaccucgucguggaggagcuggugaagaagcgggaggagugccuggacgcccucgaguccaucaugaccaccaagagcgucuccuuccgccggcugagccaccuccgcaagcucgugcccggguucggcaaggccuacacgaucuucaacaagacccugauggaggcggacgcccacuacaaguccgugcggaccuggaacgagaucauccccagcaaggggugccugaaggucggcgggcgcugccacccccacgugaacggcgucuucuucaacggcaucauccucgggcccgacgaccacgugcugauccccgagaugcaguccagccugcuccagcagcacauggagcugcuggaguccagcgugaucccgcucaugcacccccuggccgaccccuccacggucuucaaggagggcgacgaggccgaggacuucguggaggugcaccuccccgacgucuacaagcagaucagcgggguggaccugggccugccgaacugggggaaguacgugcugaugaccgccggcgcgaugaucggccucguccugaucuucucccugaugaccuggugccggcgcgccaaccgccccgagagcaagcagcgguccuucgggggcaccgggggcaacgugagcgugacgucccagagcgggaaggucauccccuccugggagagcuacaagagcggcggcgagauccgccucuga

SEQ ID NO: 95842 - RNA, 1575 nt, Artificial Sequence; identical to SEQ ID NO: 94596
  derived and/or modified CDS sequence (opt1) from glycoprotein__RABV__LC018482.1

SEQ ID NO: 95843 - RNA, 1575 nt, Artificial Sequence; identical to SEQ ID NO: 94595
  derived and/or modified CDS sequence (opt1) from glycoprotein__RABV__LC018483.1

SEQ ID NO: 95844 - RNA, 1575 nt, Artificial Sequence; identical to SEQ ID NO: 94622
  derived and/or modified CDS sequence (opt1) from glycoprotein__RABV__LC018484.1

SEQ ID NO: 95845 - RNA, 1575 nt, Artificial Sequence; identical to SEQ ID NO: 94619
  derived and/or modified CDS sequence (opt1) from glycoprotein__RABV__LC018485.1

SEQ ID NO: 95846 - RNA, 1575 nt, Artificial Sequence; identical to SEQ ID NO: 94596
  derived and/or modified CDS sequence (opt1) from glycoprotein__RABV__LC018486.1

SEQ ID NO: 95847 - RNA, 1575 nt, Artificial Sequence; identical to SEQ ID NO: 94619
  derived and/or modified CDS sequence (opt1) from glycoprotein__RABV__LC018487.1

SEQ ID NO: 95848 - RNA, 1575 nt, Artificial Sequence; identical to SEQ ID NO: 94623
  derived and/or modified CDS sequence (opt1) from glycoprotein__RABV__LC018488.1

SEQ ID NO: 95849 - RNA, 1575 nt, Artificial Sequence; identical to SEQ ID NO: 94619
  derived and/or modified CDS sequence (opt1) from glycoprotein__RABV__LC018489.1

SEQ ID NO: 95850 - RNA, 1575 nt, Artificial Sequence; identical to SEQ ID NO: 94619
  derived and/or modified CDS sequence (opt1) from glycoprotein__RABV__LC018490.1

SEQ ID NO: 95851 - RNA, 1575 nt, Artificial Sequence; identical to SEQ ID NO: 94596
  derived and/or modified CDS sequence (opt1) from glycoprotein__RABV__LC018493.1

SEQ ID NO: 95852 - RNA, 1575 nt, Artificial Sequence; identical to SEQ ID NO: 94619
  derived and/or modified CDS sequence (opt1) from glycoprotein__RABV__LC018494.1

SEQ ID NO: 95853 - RNA, 1575 nt, Artificial Sequence; identical to SEQ ID NO: 94619
  derived and/or modified CDS sequence (opt1) from glycoprotein__RABV__LC018495.1

SEQ ID NO: 95854 - RNA, 1575 nt, Artificial Sequence; identical to SEQ ID NO: 94619
  derived and/or modified CDS sequence (opt1) from glycoprotein__RABV__LC018496.1

SEQ ID NO: 95855 - RNA, 1575 nt, Artificial Sequence
  derived and/or modified CDS sequence (opt1) from glycoprotein__RABV__LC018497.1
augaucccccaggcccugcuguucgugccgcugcuggucuucagccucugcuucggcaaguuccccaucuacaccauccccgacaagcuggggcccugguccccgaucgacauccaccaccugagcugccccaacaaccucgugguggaggacgagggcugcaccaaccuguccggguucagcuacauggagcugaaggucggcuacaucuccgccaucaaggugaacggguucacgugcaccggcguggucaccgaggcggagaccuacacgaacuucgugggcuacgugaccaccaccuucaagcgcaagcacuuccggcccacgcccgacgccugccgcagcgccuacaacuggaagauggccggggacccgcgguacgaggagucccuccacaaccccuaccccgacuaccacuggcugcgcaccgucaagaccaccaaggagagccuggugaucaucucccccagcguggccgaccucgacccguacgacaagucccugcacagccgggucuuccccuccggcaagugcagcgggaucacgguguccagcaccuacugcuccaccaaccacgacuacaccaucuggaugcccgagaacccccgccugggcacgagcugcgacaucuucaccaacucccgggggaagcgcgcgagcaagggcagcaagaccugcggcuucguggacgagcgggggcucuacaagucccugaagggcgccugcaagcugaagcucugcgggguccugggccugcgccucauggacggcaccugggccgccauccagacgagcgacgagaccaaguggugcccgcccgaccagcuggugaaccugcacgacuuccgguccgacgagaucgagcaccucguggucgaggagcuggugaagaagcgcgaggagugccuggacgcgcucgagagcaucaugaccaccaaguccgugagcuuccggcgccugucccaccuccggaagcucguccccggguucggcaaggccuacacgaucuucaacaagacccugauggaggccgacgcccacuacaagagcgugcgcaccuggaacgagaucauccccuccaaggggugccugcgggugggcgggcgcugccacccgcacgucaacggcguguucuucaacggcaucauccucgggcccgacggccacguccugauccccgagaugcagagcucccugcuccagcagcacauggagcugcuggagagcuccgugaucccccucaugcacccgcuggccgaccccagcaccguguucaaggacgacgacgaggcggaggacuucgucgaggugcaccuccccgacgugcacaagcaggucuccgggguggaccugggccugcccagcugggggaaguacgugcugauguccgccggcguccucacggcccugaugcugaugaucuuccucacccggugcugccgccgggccaaccgcgccgagagcgcgcagcacucccugggcgagcgcgggcggaaggugagcgugaccagccaguccggccgcgucaucagcuccugggagagcuacaaguccgggggcgagaccaagcuguga

SEQ ID NO: 95856 - RNA, 1575 nt, Artificial Sequence; identical to SEQ ID NO: 94619
  derived and/or modified CDS sequence (opt1) from glycoprotein__RABV__LC018498.1

SEQ ID NO: 95857 - RNA, 1575 nt, Artificial Sequence
  derived and/or modified CDS sequence (opt1) from glycoprotein__RABV__LC018501.1
augaucccccaggcccugcuguucgugccgcugcuggucuucagccucugcuucggcaaguuccccaucuacaccauccccgacaagcuggggcccugguccccgaucgacauccaccaccugagcugccccaacaaccucgugguggaggacgagggcugcaccaaccuguccggguucagcuacauggagcugaaggucggcuacaucuccgccaucaaggugaacggguucacgugcaccggcguggucaccgaggcggagaccuacacgaacuucgugggcuacgugaccaccaccuucaagcgcaagcacuuccggcccacgcccgacgccugccgcgccgccuacaacuggaagauggccggggacccgcgguacgaggagagccuccacaaccccuaccccgacuaccacuggcugcgcaccgucaagaccaccaaggagucccuggugaucaucagccccuccguggcggaccucgacccguacgacaagagccugcacucccgggucuuccccagcggcaagugcuccgggaucacggugagcuccaccuacugcagcaccaaccacgacuacaccaucuggaugcccgagaacccccgccugggcacguccugcgacaucuucaccaacagccgggggaagcgcgccuccaagggcagcaagaccugcggcuucguggacgagcgggggcucuacaagagccugaagggcgccugcaagcugaagcucugcgggguccugggccugcgccucauggacggcaccugggccgcgauccagacguccgacgagaccaaguggugcccgcccgaccagcuggugaaccugcacgacuuccggagcgacgagaucgagcaccucguggucgaggagcuggugaagaagcgcgaggagugccuggacgcccucgaguccaucaugaccaccaagagcguguccuuccggcgccugagccaccuccggaagcucguccccggguucggcaaggccuacacgaucuucaacaagacccugauggaggccgacgcccacuacaaguccgugcgcaccuggaacgagaucauccccagcaaggggugccugcgggugggcgggcgcugccacccgcacgucaacggcguguucuucaacggcaucauccucgggcccgacggccacguccugauccccgagaugcaguccagccugcuccagcagcacauggagcugcuggaguccagcgugaucccccucaugcacccgcuggcggaccccuccaccguguucaaggacgacgacgaggccgaggacuucgucgaggugcaccuccccgacgugcacaagcaggucagcgggguggaccugggccugcccuccugggggaaguacgugcugaugagcgccggcguccucacggcccugaugcugaugaucuuccucaugaccugcugccggcgcaccaaccgggccgaguccgcgcagcacagcccgggcgagcgcgggcgcaagguguccgugaccagccagagcggccgggucaucuccagcugggaguccuacaagagcgggggcgagacgaagcuguga

SEQ ID NO: 95858 - RNA, 1575 nt, Artificial Sequence; identical to SEQ ID NO: 94596
  derived and/or modified CDS sequence (opt1) from glycoprotein__RABV__LC018502.1

SEQ ID NO: 95859 - RNA, 1575 nt, Artificial Sequence
  derived and/or modified CDS sequence (opt1) from glycoprotein__RABV__LC018503.1
augaucccccaggcccuccuguucgugccgcugcuggucuucagccucugcuucggcaaguuccccaucuacaccauccccgacaagcuggggcccugguccccgaucgacauccaccaccugagcugccccaacaaccucgugguggaggacgagggcugcaccaaccuguccggguucagcuacauggagcugaaggucggcuacaucuccgccaucaaggugaacggguucacgugcaccggcguggucaccgaggcggagaccuacacgaacuucgugggcuacgugaccaccaccuucaagcgcaagcacuuccggcccacgcccgacgccugccgcgccgccuacaacuggaagauggccggggacccgcgguacgaggagagccuccacaaccccuaccccgacuaccacuggcugcgcaccgucaagaccaccaaggagucccuggugaucaucagccccuccguggcggaccucgacccguacgacaagagccugcacucccgggucuuccugaacggcaagugcagcgggaucacgguguccagcaccuacugcuccaccaaccacgacuacaccaucuggaugcccgagaacccccgccucggcacgagcugcgacaucuucaccaacucccgggggaagcgcgccagcaagggcuccaagaccugcggcuucguggacgagcgggggcuguacaagagccugaagggcgccugcaagcucaagcugugcgggguccugggccuccgccugauggacggcaccugggccgcgauccagacgagcgacgagaccaaguggugcccgcccgaccagcuggugaaccuccacgacuuccgguccgacgagaucgagcaccugguggucgaggagcuggugaagaagcgcgaggagugccucgacgcccuggagagcaucaugaccaccaaguccgugagcuuccggcgccugucccaccuccggaagcugguccccggguucggcaaggccuacacgaucuucaacaagacccugauggaggccgacgcccacuacaagagcgugcgcaccuggaacgagaucauccccuccaaggggugccuccgggugggcgggcgcugccacccccacgucaacggcguguucuucaacggcaucauccuggggccggacggccacguccugauccccgagaugcagagcucccuccugcagcagcacguggagcugcucgagagcuccgugaucccccugaugcacccccuggcggacccgagcaccgucuucaaggacgacgacgaggccgaggacuucguggaggugcaccuccccgacguccacaagcaggucuccgggguggaccugggccugcccagcugggggaaguacgugcucauguccgccggcgugcugacggcccugaugcucaugaucuuccugaugaccugcugccggcgcgccaaccgggcggagagcgcccagcacucccugggcgagcgcgggcgcaaggugagcgucaccucccagagcggccggguggugagcuccugggagagcuacaaguccgggggcgagaccaagcuguga

SEQ ID NO: 95860 - RNA, 1575 nt, Artificial Sequence; identical to SEQ ID NO: 94596
  derived and/or modified CDS sequence (opt1) from glycoprotein__RABV__LC018504.1

SEQ ID NO: 95861 - RNA, 1575 nt, Artificial Sequence
  derived and/or modified CDS sequence (opt1) from glycoprotein__RABV__LC018505.1
augaucccccaggcccugcuguucgugccgcugcuggucuucagccucugcuucggcaaguuccccaucuacaccauccccgacaagcuggggcccugguccccgaucgacauccaccaccugagcugccccaacaaccucgugguggaggacgagggcugcaccaaccuguccggguucagcuacauggagcugaaggucggcuacaucuccgccaucaaggugaacggguucacgugcaccggcguggucaccgaggcggagaccuacacgaacuucgugggcuacgugaccaccaccuucaagcgcaagcacuuccggcccacgcccgacgccugccgcgccgccuacaacuggaagauggccggggacccgcgguacgaggagagccuccacaaccccuaccccgacuaccacuggcugcgcaccgucaagaccaccaaggagucccuggugaucaucagccccuccguggcggaccucgacccguacgacaagagccugcacucccgggucuuccccaacggcaagugcagcgggaucacgguguccagcaccuacugcuccaccaaccacgacuacaccaucuggaugcccgagaacccccgccugggcacgagcugcgacaucuucaccaacucccgggggaagcgcgccagcaagggcuccaagaccugcggcuucguggacgagcgggggcucuacaagagccugaagggcgccugcaagcugaagcucugcgggguccugggccugcgccucauggacggcaccugggccgcgauccagacgagcgacgagaccaaguggugcccgcccgaccagcuggugaaccugcacgacuuccgguccgacgagaucgagcaccucguggucgaggagcuggugaagaagcgcgaggagugccuggacgcccucgagagcaucaugaccaccaaguccgugagcuuccggcgccugucccaccuccggaagcucguccccggguucggcaaggccuacacgaucuucaacaagacccugauggaggccgacgcccacuacaagagcgugcgcaccuggaacgagaucauccccuccaaggggugccugcgggugggcgggcgcugccacccgcacgucaacggcguguucuucaacggcaucauccucgggcccgacggccacguccugauccccgagaugcagagcucccugcuccagcagcacauggagcugcuggagagcuccgugaucccccucaugcacccgcuggcggaccccagcaccguguucaaggacgacgacgaggccgaggacuucgucgaggugcaccuccccgacgugcacaagcaggucuccgggguggaccugggccugcccagcugggggaaguacgugcugauguccgccggcguccucacggcccugaugcugaugaucuuccucaugaccugcugccggcgcgccaaccgggcggagagcgcccagcacucccugggcgagcgcgggcgcaaggugagcgugaccucccagagcggccgggucaucagcuccugggagagcuacaaguccgggggcgagaccaagcuguga

SEQ ID NO: 95862 - RNA, 1575 nt, Artificial Sequence
  derived and/or modified CDS sequence (opt1) from glycoprotein__RABV__LC018506.1
augaucccccaggcccugcuguucgugccgcugcuggucuucagccucugcuucggcaaguuccccaucuacaccauccccgacaagcuggggcccugguccccgaucgacauccaccaccugagcugccccaacaaccucgugguggaggacgagggcugcaccaaccuguccggguucagcuacauggagcugaaggucggcuacaucuccacgaucaaggugaacggguucacgugcaccggcguggucaccgaggccgagaccuacaccaacuucgugggcuacgugaccaccacguucaagcgcaagcacuuccggcccacccccgacgcgugccgcgccgccuacaacuggaagauggccggggacccgcgguacgaggagagccuccacaaccccuaccccgacuaccacuggcugcgcaccgucaagaccacgaaggagucccuggugaucaucagccccuccguggccgaccucgacccguacgacaagagccugcacucccgggucuuccccaacggcaagugcagcgggaucaccguguccagcaccuacugcuccaccaaccacgacuacacgaucuggaugcccgagaacccccgccugggcaccagcugcgacaucuucaccaacucccgggggaagcgcgcgagcaagggcuccaagaccugcggcuucguggacgagcgggggcucuacaagagccugaagggcgccugcaagcugaagcucugcgggguccugggccugcgccucauggacggcacgugggccgccauccagaccagcgacgagaccaaguggugcccgcccgaccagcuggugaaccugcacgacuuccgguccgacgagaucgagcaccucguggucgaggagcuggugaagaagcgcgaggagugccuggacgcgcucgagagcaucaugaccacgaaguccgugagcuuccggcgccugucccaccuccggaagcucguccccggguucggcaaggccuacaccaucuucaacaagacccugauggaggccgacgcccacuacaagagcgugcgcaccuggaacgagaucauccccuccaaggggugccugcgggugggcgggcgcugccacccgcacgucaacggcguguucuucaacggcaucauccucgggcccgacggccacguccugauccccgagaugcagagcucccugcuccagcagcacauggagcugcuggagagcuccgugaucccccucaugcacccgcuggccgaccccagcacgguguucaaggacgacgacgaggcggaggacuucgucgaggugcaccuccccgacgugcacaagcaggucuccgggguggaccugggccugcccagcugggggaaguacgugcugauguccgccggcguccucaccgcccugaugcugaugaucuuccucaugaccugcugccggcgcgccaaccgggccgagagcgcgcagcacucccugggcgagcgcgggcgcaaggugagcgugaccucccagagcggccgggucaucagcuccugggagagcuacaaguccgggggcgagacgaagcuguga

SEQ ID NO: 95863 - RNA, 1575 nt, Artificial Sequence; identical to SEQ ID NO: 94596
  derived and/or modified CDS sequence (opt1) from glycoprotein__RABV__LC018507.1

SEQ ID NO: 95864 - RNA, 1575 nt, Artificial Sequence; identical to SEQ ID NO: 94619
  derived and/or modified CDS sequence (opt1) from glycoprotein__RABV__LC018508.1

SEQ ID NO: 95865 - RNA, 1575 nt, Artificial Sequence; identical to SEQ ID NO: 94642
  derived and/or modified CDS sequence (opt1) from glycoprotein__RABV__LC018509.1

SEQ ID NO: 95866 - RNA, 1575 nt, Artificial Sequence; identical to SEQ ID NO: 94619
  derived and/or modified CDS sequence (opt1) from glycoprotein__RABV__LC018513.1

SEQ ID NO: 95867 - RNA, 1575 nt, Artificial Sequence; identical to SEQ ID NO: 94619
  derived and/or modified CDS sequence (opt1) from glycoprotein__RABV__LC018514.1

SEQ ID NO: 95868 - RNA, 1575 nt, Artificial Sequence; identical to SEQ ID NO: 94619
  derived and/or modified CDS sequence (opt1) from glycoprotein__RABV__LC018515.1

SEQ ID NO: 95869 - RNA, 1575 nt, Artificial Sequence
  derived and/or modified CDS sequence (opt1) from glycoprotein__RABV__LC018516.1
augaucccccaggcccugcuguucgugccgcugcuggucuucagccucugcuucggcaaguuccccaucuacaccauccccgacaagcuggggcccugguccccgaucgacauccaccaccugagcugccccaacaaccucgugguggaggacgagggcugcaccaaccuguccggguucagcuacauggagcugaaggucggcuacaucuccgccaucaaggugaacggguucacgugcaccggcguggucaccgaggcggagaccuacacgaacuucgugggcuacgugaccaccaccuucaagcgcaagcacuuccggcccacgcccgacgccugccgcgccgccuacaacuggaagauggccggggacccgcgguacgaggagagccuccacaaccccuaccccgacuaccacuggcugcgcaccgucaagaccaccaaggagucccuggugaucaucagccccuccguggcggaccucgacccguacgacaagagccugcacucccgggucuuccccagcggcaagugcuccgggaucacggugagcuccaccuacugcagcaccaaccacgacuacaccaucuggaugcccgagaacccccgccugggcacguccugcgacaucuucaccaacagccgggggaagcgcgccuccaagggcagcaagaccugcggcuucguggacgagcgggggcucuaccgcagccugaagggcgccugcaagcugaagcucugcgggguccugggccugcggcucauggacggcaccugggccgcgauccagacguccgacgagaccaaguggugcccgcccgaccagcuggugaaccugcacgacuuccgcagcgacgagaucgagcaccucguggucgaggagcuggugaagaagcgggaggagugccuggacgcccucgaguccaucaugaccaccaagagcguguccuuccgccggcugagccaccuccgcaagcucguccccggguucggcaaggccuacacgaucuucaacaagacccugauggaggccgacgcccacuacaaguccgugcggaccuggaacgagaucauccccagcaaggggugccugcgcgugggcgggcggugccacccgcacgucaacggcguguucuucaacggcaucauccucgggcccgacggccacguccugauccccgagaugcaguccagccugcuccagcagcacauggagcugcuggaguccagcgugaucccccucaugcacccgcuggcggaccccuccaccguguucaaggacgacgacgaggccgaggacuucgucgaggugcaccuccccgacgugcacaagcaggucagcgggguggaccugggccugcccuccugggggaaguacgugcugaugagcgccggcguccucacggcccugaugcugaugaucuuccucaugaccugcugccgccggaccaaccgcgccgaguccgcgcagcacagccugggcgagcgcgggcggaagguguccgugaccagccagagcggccgcgucaucuccagcugggaguccuacaagagcgggggcgagacgaagcuguga

SEQ ID NO: 95870 - RNA, 1575 nt, Artificial Sequence
  derived and/or modified CDS sequence (opt1) from glycoprotein__RABV__LC018517.1
augaucccccaggcccugcuguucgugccgcugcuggucuucagccucugcuucggcaaguuccccaucuacaccauccccgacaagcuggggcccugguccccgaucgacauccaccaccugagcugccccaacaaccucgugguggaggacgagggcugcaccaaccuguccggguucagcuacauggagcugaaggucggcuacaucuccgccaucaaggugaacggguucacgugcaccggcguggucaccgaggcggagaccuacacgaacuucgugggcuacgugaccaccaccuucaagcgcaagcacuuccggcccacgcccgacgccugccgcgccgccuacaacuggaagauggccggggacccgcgguacgaggagagccuccacaaccccuaccccgacuaccacuggcugcgcaccgucaagaccaccaaggagucccuggugaucaucagccccuccguggcggaccucgacccguacgacaagagccugcacucccgggucuuccccaacggcaagugcagcgggaucacgguguccagcaccuacugcuccaccaaccacgacuacaccaucuggaugcccgagaacccccgccugggcacgagcugcgacaucuucaccaacucccgggggaagcgcgccagcaagggcuccaagaccugcggcuucguggacgagcgggggcucuacaagagccugaagggcgccugcaagcugaagcucugcgggguccugggccugcgccucauggacggcaccugggccgcgauccagacgagcgacgagaccaaguggugcccgcccgaccagcuggugaaccugcacgacuuccgguccgacgagaucgagcaccucguggucgaggagcuggugaagaagcgcgaggagugccuggacgcccucgagagcaucaugaccaccaaguccgugagcuuccggcgccugucccaccuccggaagcucguccccggguucggcaaggccuacacgaucuucaacaagacccugauggaggccgacgcccacuacaagagcgugcgcaccuggaacgagaucauccccuccaaggggugccugcgggugggcgggcgcugccacccgcacgucaacggcguguucuucaacggcaucauccucgggcccgacggccacguccugauccccgagaugcagagcucccugcuccagcagcacauggagcugcuggagagcuccgugaucccccucaugcacccgcuggcggaccccagcaccguguucaaggacgacgacgaggccgaggacuucgucgaggugcaccuccccgacgugcacaagcaggucuccgggguggaccugggccugcccagcugggggaaguacgugcugauguccgccggcgucagcacggcccucaugcugaugaucuuccugaugaccugcugccggcgcgccaaccgggcggaguccgcccagcacagccucggcgagcgcgggcgcaagguguccgugaccagccagagcggccgggucaucuccagcugggaguccuacaagagcgggggcgagaccaagcuguga

SEQ ID NO: 95871 - RNA, 1575 nt, Artificial Sequence; identical to SEQ ID NO: 94595
  derived and/or modified CDS sequence (opt1) from glycoprotein__RABV__LC018518.1

SEQ ID NO: 95872 - RNA, 1575 nt, Artificial Sequence; identical to SEQ ID NO: 94595
  derived and/or modified CDS sequence (opt1) from glycoprotein__RABV__LC018519.1

SEQ ID NO: 95873 - RNA, 1575 nt, Artificial Sequence; identical to SEQ ID NO: 94596
  derived and/or modified CDS sequence (opt1) from glycoprotein__RABV__LC018520.1

SEQ ID NO: 95874 - RNA, 1575 nt, Artificial Sequence
  derived and/or modified CDS sequence (opt1) from glycoprotein__RABV__LC018522.1
augaucccccaggcccugcuguucgugccgcugcuggucuucagccucugcuucggcaaguuccccaucuacaccauccccgacaagcuggggcccugguccccgaucgacauccaccaccugagcugccccaacaaccucgugguggaggacgagggcugcaccaaccuguccggguucagcuacauggagcugaaggucggcuacaucuccgccaucaaggugaacggguucacgugcaccggcguggucaccgaggcggagaccuacacgaacuucgugggcuacgugaccaccaccuucaagcgcaagcacuuccggcccacgcccgacgccugccgcgccgccuacaacuggaagauggccggggacccgcgguacgaggagagccuccacaaccccuaccccgacuaccacuggcugcgcaccgucaagaccaccaaggagucccuggugaucaucagccccuccguggcggaccucgacccguacgacaagagccugcacucccgggucuuccccaacggcaagugcagcgggaucacgguguccagcaccuacugcuccaccaaccacgacuacaccaucuggaugcccgagaacccccgccugggcacgagcugcgacaucuucaccaacucccgggggaagcgcgccagcaagggcucccggaccugcggcuucguggacgagcgcgggcucuacaagagccugaagggcgccugcaagcugaagcucugcgggguccugggccugcggcucauggacggcaccugggccgcgauccagacgagcgacgagaccaaguggugcccgcccgaccagcuggugaaccugcacgacuuccgcuccgacgagaucgagcaccucguggucgaggagcuggugaagaagcgggaggagugccuggacgcccucgagagcaucaugaccaccaaguccgugagcuuccgccggcugucccaccuccgcaagcucguccccggguucggcaaggccuacacgaucuucaacaagacccugauggaggccgacgcccacuacaagagcgugcggaccuggaacgagaucauccccuccaaggggugccugcgcgugggcgggcggugccacccgcacgucaacggcguguucuucaacggcaucauccucgggcccgacggccacguccugauccccgagaugcagagcucccugcuccagcagcacauggagcugcuggagagcuccgugaucccccucaugcacccgcuggcggaccccagcaccguguucaaggacgacgacgaggccgaggacuucgucgaggugcaccuccccgacgugcacaagcaggucuccgggguggaccugggccugcccagcugggggaaguacgugcugauguccgccggcguccucacggcccugaugcugaugaucuuccucaugaccugcugccgccgggccaaccgcgcggagagcgcccagcacucccugggcgagcgcgggcggaaggugagcgugaccucccagagcggccgcgucaucagcuccugggagagcuacaaguccgggggcgagaccaagcuguga

SEQ ID NO: 95875 - RNA, 1575 nt, Artificial Sequence
  derived and/or modified CDS sequence (opt1) from glycoprotein__RABV__LC018523.1
augaucccccaggcccugcuguucgugccgcugcuggucuucagccucugcuucggcaaguuccccaucuacaccauccccgacaagcuggggcccugguccccgaucgacauccaccaccugagcugccccaacaaccucgugguggaggacgagggcugcaccaaccuguccggguucagcuacauggagcugaaggucggcuacaucuccgccaucaaggugaacggguucacgugcaccggcguggucaccgaggcggagaccuacacgaacuucgugggcuacgugaccaccaccuucaagcgcaagcacuuccggcccacgcccgacgccugccgcgccgccuacaacuggaagauggccggggacccgcgguacgaggagagccuccacaaccccuaccccgacuaccacuggcugcgcaccgucaagaccaccaaggagucccuggugaucaucagccccuccguggcggaccucgacccguacgacaagagccugcacucccgggucuuccccagcggcaagugcuccgggaucacggugagcuccaccuacugcagcaccaaccacgacuacaccaucuggaugcccgagaacccccgccugggcacguccugcgacaucuucaccaacagccgggggaagcgcgccuccaagggcagcaagaccugcggcuucguggacgagcgggggcucuacaagagccugaagggcgccugcaagcugaagcucugcgggguccugggccugcgccucauggacggcaccugggccgcgauccagacguccgacgagaccaaguggugcccgcccgaccagcuggugaaccugcacgacuuccggagcgacgagaucgagcaccucguggucgaggagcuggugaagaagcgcgaggagugccuggacgcccucgaguccaucaugaccaccaagagcguguccuuccggcgccugagccaccuccggaagcucguccccggguucggcaaggccuacacgaucuucaacaagacccugauggaggccgacgcccacuacaaguccgugcgcaccuggaacgagaucauccccagcaaggggugccugcgggugggcgggcgcugccacccgcacgucaacggcguguucuucaacggcaucauccucgggcccgacggccacguccugauccccgagaugcaguccagccugcuccagcagcacauggagcugcuggaguccagcgugaucccccucaugcacccgcuggcggaccccuccaccguguucaaggacgacgacgaggccgaggacuucgucgaggugcaccuccccgacgugcacaagcaggucagcgggguggaccugggccugcccuccugggggaaguacgugcugaugagcgccggcauccucacggcccugaugcugaugaucuuccucaugaccugcugccggcgcgccaaccgggucgaguccgcgcagcacagccugggcgagcgcgggcgcaagguguccgugaccagccagagcggccgggucaucuccagcugggaguccuacaagagcgggggcgagaccaagcuguga

SEQ ID NO: 95876 - RNA, 1575 nt, Artificial Sequence; identical to SEQ ID NO: 94595
  derived and/or modified CDS sequence (opt1) from glycoprotein__RABV__LC018524.1

SEQ ID NO: 95877 - RNA, 1575 nt, Artificial Sequence
  derived and/or modified CDS sequence (opt1) from glycoprotein__RABV__LC018525.1
augaucccccaggcccugcuguucgugccgcugcuggucuucagccucugcuucggcaaguuccccaucuacaccauccccgacaagcuggggcccugguccccgaucgacauccaccaccugagcugccccaacaaccucgugguggaggacgagggcugcaccaaccuguccggguucagcuacauggagcugaaggucggcuacaucuccgccaucaaggugaacggguucacgugcaccggcguggucaccgaggcggagaccuacacgaacuucgugggcuacgugaccaccaccuucaagcgcaagcacuuccggcccacgcccgacgccugccgcgccgccuacaacuggaagauggccggggacccgcgguacgaggagagccuccacaaccccuaccccgacuaccacuggcugcgcaccgucaagaccaccaaggagucccuggugaucaucagccccuccguggcggaccucgacccguacgacaagagccugcacucccgggucuuccccagcggcaagugcuccgggaucacggugagcuccaccuacugcagcaccaaccacgacuacaccaucuggaugcccgagaacccccgccugggcacguccugcgacaucuucaccaacagccgggggaagcgcgccuccaagggcagcaagaccugcggcuucguggacgagcgggggcucuacaagagccugaagggcgccugcaagcugaagcucugcgggguccugggccugcgccucauggacggcaccugggccgcgauccagacguccgacgagaccaaguggugcccgcccgaccagcuggugaaccugcacgacuuccggagcgacgagaucgagcacuucguggucgaggagcucgugaagaagcgcgaggagugccuggacgcccuggaguccaucaucaccaccaagagcguguccuuccggcgccucagccaccuccggaagcugguccccggguucggcaaggccuacacgaucuucaacaagacccucauggaggccgacgcccacuacaaguccgugcgcaccuggaacgagaucauccccagcaaggggugccugcgggugggcgggcgcugccacccgcacgucaacggcguguucuucaacggcaucauccuggggcccgacggccacguccucauccccgagaugcaguccagccugcugcagcagcacauggagcuccuggaguccagcgugaucccccugaugcacccgcucgcggaccccuccaccguguucaaggacgacgacgaggccgaggacuucgucgaggugcaccuccccgacgugcacaagcaggucagcgggguggaccugggccugcccuccugggggaaguacgugcugaugagcgccggcguccugacggcccucaugcugaugaucuuccugaugaccugcugccggcgcgccaaccgggcggaguccgcccagcacagccucggcgagcgcgggcgcaagguguccgugaccagccagagcggccgggucaucuccagcugggaguccuacaagagcgggggcgagaccaagcuguga

SEQ ID NO: 95878 - RNA, 1575 nt, Artificial Sequence
  derived and/or modified CDS sequence (opt1) from glycoprotein__RABV__LC018526.1
augaucccccaggcccugcuguucgugccgcugauggucuucagccugugcuucggcaaguuccccaucuacaccauccccgacaagcucgggcccugguccccgaucgacauccaccaccugagcugccccaacaaccuggugguggaggacgagggcugcaccaaccucuccggguucagcuacauggagcugaaggucggcuacaucuccgccaucaaggugaacggguucacgugcaccggcguggucaccgaggcggagaccuacacgaacuucgugggcuacgugaccaccaccuucaagcgcaagcacuuccggcccacgcccgacgccugccgcgccgccuacaacuggaagauggccggggacccgcgguacgaggagagccugcacaaccccuaccccgacuaccacuggcuccgcaccgucaagaccaccaaggagucccuggugaucaucagccccuccguggcggaccuggacccguacgacaagagccuccacucccgggucuuccccagcggcaagugcuccgggaucacggugagcuccaccuacugcagcaccaaccacgacuacaccaucuggaugcccgagaacccccgccugggcacguccugcgacaucuucaccaacagccgggggaagcgcgccuccaagggcagcaagaccugcggcuucguggacgagcgggggcuguacaagagccucaagggcgccugcaagcugaagcugugcgggguccucggccugcgccugauggacggcaccugggccgcgauccagacguccgacgagaccaaguggugcccgcccgaccagcucgugaaccugcacgacuuccggagcgacgagaucgagcaccugguggucgaggagcucgugaagaagcgcgaggagugccuggacgcccuggaguccaucaugaccaccaagagcguguccuuccggcgccucagccaccuccggaagcugguccccggguucggcaaggccuacacgaucuucaacaagacccucauggaggccgacgcccacuacaaguccgugcgcaccuggaacgagaucauccccagcaaggggugccugcgggugggcgggcgcugccacccgcacgucaacggcguguucuucaacggcaucauccuggggcccgacggccacguccucauccccgagaugcaguccagccugcugcagcagcacauggagcuccuggaguccagcgugaucccccugaugcacccgcucgcggaccccuccaccguguucaaggacgacgacgaggccgaggacuucgucgaggugcaccuccccgacgugcacaagcaggucagcgggguggaccugggccugcccuccugggggaaguacgugcugaugagcgccggcguccugacggcccucaugcugaugaucuuccugaugaccugcugccggcgcaccaaccgggccgaguccgcgcagcacagccucggcgagcgcgggcgcaagguguccgugaccagccagagcggccgggucaucuccagcugggaguccuacaagagcgggggcgagacgaagcuguga

SEQ ID NO: 95879 - RNA, 1575 nt, Artificial Sequence
  derived and/or modified CDS sequence (opt1) from glycoprotein__RABV__LC018527.1
augaucccccaggcccugcuguucgugccgcugcuggucuucagccucugcuucggcaaguuccccaucuacaccauccccgacaagcuggggcccugguccccgaucgacauccaccaccugagcugccccaacaaccucaucguggaggacgagggcugcaccaaccuguccggguucagcuacauggagcugaaggugggcuacaucuccgccaucaaggucaacggguucacgugcaccggcguggugaccgaggcggagaccuacacgaacuucgucggcuacgugaccaccaccuucaagcgcaagcacuuccggcccacgcccgacgccugccgcgccgccuacaacuggaagauggccggggacccgcgguacgaggagagccuccacaaccccuaccccgacuaccacuggcugcgcaccgugaagaccaccaaggagucccuggucaucaucagccccuccguggcggaccucgacccguacgacaagagccugcacucccggguguuccccagcggcaagugcuccgggaucacggucagcuccaccuacugcagcaccaaccacgacuacaccaucuggaugcccgagaacccccgccugggcacguccugcgacaucuucaccaacagccgggggaagcgcgccuccaagggcagcaagaccugcggcuucguggacgagcgggggcucuacaagagccugaagggcgccugcaagcugaagcucugcggggugcugggccugcgccucauggacggcaccugggccgcgauccagacguccgacgagaccaaguggugcccgcccgaccagcuggucaaccugcacgacuuccggagcgacgagaucgagcaccucgugguggaggagcuggucaagaagcgcgaggagugccuggacgcccucgaguccaucaugaccaccaagagcguguccuuccggcgccugagccaccuccggaagcucgugcccggguucggcaaggccuacacgaucuucaacaagacccugauggaggccgacgcccacuacaaguccguccgcaccuggaacgagaucauccccagcaaggggugccugcgggugggcgggcgcugccacccgcacgugaacggcgucuucuucaacggcaucauccucgggcccgacggccacgugcugauccccgagaugcaguccagccugcuccagcagcacauggagcugcuggaguccagcgucaucccccucaugcacccgcuggcggaccccuccaccguguucaaggacgacgacgaggccgaggacuucguggagguccaccuccccgacgugcacaagcaggucagcgggguggaccugggccugcccuccugggggaaguacgugcugaugagcgccggcgugcucacggcccugaugcugaugaucuuccucaugaccugcugccggcgcaccaaccgggccgaguccgcgcagcacagccugggcgagcgcgggcgcaaggucuccgugaccagccagagcggccgggugaucuccagcugggaguccuacaagagcgggggcgagacgaagcuguga

SEQ ID NO: 95880 - RNA, 1575 nt, Artificial Sequence; identical to SEQ ID NO: 94619
  derived and/or modified CDS sequence (opt1) from glycoprotein__RABV__LC018529.1

SEQ ID NO: 95881 - RNA, 1575 nt, Artificial Sequence; identical to SEQ ID NO: 94619
  derived and/or modified CDS sequence (opt1) from glycoprotein__RABV__LC018531.1

SEQ ID NO: 95882 - RNA, 1575 nt, Artificial Sequence; identical to SEQ ID NO: 94595
  derived and/or modified CDS sequence (opt1) from glycoprotein__RABV__LC018532.1

SEQ ID NO: 95883 - RNA, 1575 nt, Artificial Sequence; identical to SEQ ID NO: 94619
  derived and/or modified CDS sequence (opt1) from glycoprotein__RABV__LC018534.1

SEQ ID NO: 95884 - RNA, 1575 nt, Artificial Sequence; identical to SEQ ID NO: 94619
  derived and/or modified CDS sequence (opt1) from glycoprotein__RABV__LC018535.1

SEQ ID NO: 95885 - RNA, 1575 nt, Artificial Sequence; identical to SEQ ID NO: 94595
  derived and/or modified CDS sequence (opt1) from glycoprotein__RABV__LC018536.1

SEQ ID NO: 95886 - RNA, 1575 nt, Artificial Sequence; identical to SEQ ID NO: 94619
  derived and/or modified CDS sequence (opt1) from glycoprotein__RABV__LC018539.1

SEQ ID NO: 95887 - RNA, 1575 nt, Artificial Sequence
  derived and/or modified CDS sequence (opt1) from glycoprotein__RABV__LC018540.1
augaucccccaggcccugcuguucgugccgcugcuggucuucagccucugcuucggcaaguuccccaucuacaccauccccgacaagcuggggcccugguccccgaucgacauccaccaccugagcugccccaacaaccucgugguggaggacgagggcugcaccaaccuguccggguucagcuacauggagcugaaggucggcuacaucuccgccaucaaggugaacggguucacgugcaccggcguggucaccgaggcggagaccuacacgaacuucgugggcuacgugaccaccaccuucaagcgcaagcacuuccggcccacgcccgacgccugccgcgccgccuacaacuggaagauggccggggacccgcgguacgaggagagccuccacaaccccuaccccgacuaccacuggcugcgcaccgucaagaccaccaaggagucccuggugaucaucagccccuccguggcggaccucgacccguacgaccggagccugcacucccgcgucuuccccagcggcaagugcuccgggaucacggugagcuccaccuacugcagcaccaaccacgacuacaccaucuggaugcccgagaacccccggcugggcacguccugcgacaucuucaccaacagccgcgggaagcgggccuccaagggcagcaagaccugcggcuucguggacgagcgcgggcucuacaagagccugaagggcgccugcaagcugaagcucugcgggguccugggccugcggcucauggacggcaccugggccgcgauccagacguccgacgagaccaaguggugcccgcccgaccagcuggugaaccugcacgacuuccgcagcgacgagaucgagcaccucguggucgaggagcuggugaagaagcgggaggagugccuggacgcccucgaguccaucaugaccaccaagagcguguccuuccgccggcugagccaccuccgcaagcucguccccggguucggcaaggccuacacgaucuucaacaagacccugauggaggccgacgcccacuacaaguccgugcggaccuggaacgagaucauccccagcaaggggugccugcgcgugggcgggcggugccacccgcacgucaacggcguguucuucaacggcaucauccucgggcccgacggccacguccugauccccgagaugcaguccagccugcuccagcagcacauggagcugcuggaguccagcgugaucccccucaugcacccgcuggcggaccccuccaccguguucaaggacgacgacgaggccgaggacuucgucgaggugcaccuccccgacgugcacaagcaggucagcgggguggaccugggccugcccuccugggggaaguacgugcugaugagcgccggcguccucacggcccugaugcugaugaucuuccucaugaccugcugccgccgggccaaccgcguggaguccgcgcagcacagccugggcgagcgcgggcggaagguguccgucaccagccagagcggccgcgugaucuccagcugggaguccuacaagagcgggggcgagaccaagcuguga

SEQ ID NO: 95888 - RNA, 1575 nt, Artificial Sequence
  derived and/or modified CDS sequence (opt1) from glycoprotein__RABV__LC018542.1
augaucccccaggcccugcuguucgugccgcugcuggucuucagccucugcuucggcaaguuccccaucuacaccauccccgacaagcuggggcccugguccccgaucgacauccaccaccugagcugccccaacaaccucgugguggaggacgagggcugcaccaaccuguccggguucagcuacauggagcugaaggucggcuacaucuccgccaucaaggugaacggguucacgugcaccggcguggucaccgaggcggagaccuacacgaacuucgugggcuacgugaccaccaccuucaagcgcaagcacuuccggcccacgcccgacgccugccgcgccgccuacaacuggaagauggccggggacccgcgguacgaggagagccuccacaaccccuaccccgacuaccacuggcugcgcaccgucaagaccaccaaggagucccuggugaucaucagccccuccguggcggaccucgacccguacgacaagagccugcacucccgggucuuccccagcggcaagugcuccgggaucacggugagcuccaccuacugcagcaccaaccacgacuacaccaucuggaugcccgagaacccccgccugggcacguccugcgacaucuucaccagcucccgggggaagcgcgccagcaagggcagcaagaccugcggcuucguggacgagcgggggcucuacaagucccugaagggcgccugcaagcugaagcucugcgggguccugggccugcgccucauggacggcaccugggccgcgauccagacgagcgacgagaccaaguggugcccgcccgaccagcuggugaaccugcacgacuuccgguccgacgagaucgagcaccucguggucgaggagcuggugaagaagcgcgaggagugccuggacgcccucgagagcaucaugaccaccaaguccgugagcuuccggcgccugucccaccuccggaagcucguccccggguucggcaaggccuacacgaucuucaacaagacccugauggaggccgacgcccacuacaagagcgugcgcaccuggaacgagaucauccccuccaaggggugccugcgggugggcgggcgcugccacccgcacgucaacggcguguucuucaacggcaucauccucgggcccgacggccacguccugauccccgagaugcagagcucccugcuccagcagcacauggagcugcuggagagcuccgugaucccccucaugcacccgcuggcggaccccagcaccguguucaaggacgacgacgaggccgaggacuucgucgaggugcaccuccccgacgugcacaagcaggucuccgggguggaccugggccugcccagcugggggaaguacgugcugauguccgccggcguccucacggcccugaugcugaugaucuuccucaugaccugcugccggcgcgccaaccggguggagagcgcgcagcacucccugggcgagcgcgggcgcaaggugagcgucaccagccaguccggccgggugaucagcuccugggagagcuacaaguccgggggcgagaccaagcuguga

SEQ ID NO: 95889 - RNA, 1575 nt, Artificial Sequence
  derived and/or modified CDS sequence (opt1) from glycoprotein__RABV__LC018544.1
augaucccccaggcccugcuguucgugccgcugcuggucuucagccucugcuucggcaaguuccccaucuacaccauccccgacaagcuggggcccugguccccgaucgacauccaccaccugagcugccccaacaaccucgugguggaggacgagggcugcaccaaccuguccggguucagcuacauggagcugaaggucggcuacaucuccgccaucaaggugaacggguucacgugcaccggcguggucaccgaggcggagaccuacacgaacuucgugggcuacgugaccaccaccuucaagcgcaagcacuuccggcccacgcccgacgccugccgcgccgccuacaacuggaagauggccggggacccgcgguacgaggagagccuccacaaccccuaccccgacuaccacuggcugcgcaccgucaagaccaccaaggagucccuggugaucaucagccccuccguggcggaccucgacccguacgacaagagccugcacucccgggucuuccccagcggcaagugcuccgggaucacggugagcuccaccuacugcagcaccaaccacgacuacaccaucuggaugcccgagaacccccgccugggcacguccugcgacaucuucaccaacagccgggggaagcgcgccuccaagggcagcaagaccugcggcuucguggacgagcgggggcucuacaagagccugaagggcgccugcaagcugaagcucugcgggguccugggccugcgccucauggacggcaccugggccgcgauccagacguccgacgagaccaaguggugcccgcccgaccagcuggugaaccugcacgacuuccggagcgacgagaucgagcaccucguggucgaggagcuggugaagaagcgcgaggagugccuggacgcccucgaguccaucaugaccaccaagagcguguccuuccggcgccugagccaccuccggaagcucguccccggguucggcaaggccuacacgaucuucaacaagacccugauggaggccgacgcccacuacaaguccgugcgcaccuggaacgagaucauccccagcaaggggugccugcgggugggcgggcgcugccacccgcacgucaacggcguguucuucaacggcaucauccucgggcccgacggccacguccugauccccgagaugcaguccagccugcuccagcagcacauggagcugcuggaguccagcgugaucccccucaugcacccgcuggcggaccccuccaccguguucaaggacgacgacgaggccgaggacuucgucgaggugcaccuccccgacgugcacaagcaggucagcgggguggaccugggccugcccuccugggggaaguacgugcugaugagcgccggcguccucacggcccugaugcugaugaucuuccucaugaccugcugccggcgcgccaacaucguggaguccgcgcagcacagccugggcgagcgggggcgcaagguguccgucaccagccagagcggccgcgugaucuccagcugggaguccuacaagagcgggggcgagaccaagcuguga

SEQ ID NO: 95890 - RNA, 1575 nt, Artificial Sequence
  derived and/or modified CDS sequence (opt1) from glycoprotein__RABV__LC018545.1
augaucccccaggcccugcuguucgugccgcugcuggucuucagccucugcuucggcaaguuccccaucuacaccauccccgacaagcuggggcccugguccccgaucgacauccaccaccugagcugccccaacaaccucgugguggaggacgagggcugcaccaaccuguccggguucagcuacauggagcugaaggucggcuacaucuccgccaucaaggugaacggguucacgugcaccggcguggucaccgaggcggagaccuacacgaacuucgugggcuacgugaccaccaccuucaagcgcaagcacuuccggcccacgcccgacgccugccgcgccgccuacaacuggaagauggccggggacccgcgguacgaggagagccuccacaaccccuaccccgacuaccacuggcugcgcaccgucaagaccaccaaggagucccuggugaucaucagccccuccguggcggaccucgacccguacgacaagagccugcacucccgggucuuccccagcggcaagugcuccgggaucacggugagcuccaccuacugcagcaccaaccacgacuacaccaucuggaugcccgagaacccccgccugggcacguccugcgacaucuucaccaacagccgggggaagcgcgccuccaagggcagcaagaccugcggcuucguggacgagcgggggcucuacaagagccugaagggcgccugcaagcugaagcucugcgggguccugggccugcgccucauggacggcaccugggccgcgauccagacguccgacgagaccaaguggugcccgcccgaccagcuggugaaccugcacgacuuccggagcgacgagaucgagcaccucguggucgaggagcuggugaagaagcgcgaggagugccuggacgcccucgaguccaucaugaccaccaagagcguguccuuccggcgccugagccaccuccggaagcucguccccggguucggcaaggccuacacgaucuucaacaagacccugauggaggccgacgcccacuacaaggcggugcgcaccuggaacgagaucauccccuccaaggggugccugcgggugggcgggcgcugccacccgcacgucaacggcguguucuucaacggcaucauccucgggcccgacggccacguccugauccccgagaugcagagcucccugcuccagcagcacauggagcugcuggagagcuccgugaucccccucaugcacccgcuggccgaccccagcaccguguucaaggacgacgacgaggccgaggacuucgucgaggugcaccuccccgacgugcacaagcaggucuccgggguggaccugggccugcccagcugggggaaguacgugcugauguccgccggcguccucacggcccugaugcugaugaucuuccucaugaccugcugccggcgcgcgaaccgggccgagagcgcccagcacucccugggcgagcgcgggcgcaaggugagcgugaccucccagagcggccgggucaucagcuccugggagagcuacaaguccgggggcgagaccaagcuguga

SEQ ID NO: 95891 - RNA, 1575 nt, Artificial Sequence
  derived and/or modified CDS sequence (opt1) from glycoprotein__RABV__LC018546.1
augaucccccaggcccugcuguucgugccgcugcuggucagcucccucugcuucggcaaguuccccaucuacaccauccccgacaagcuggggcccuggagcccgaucgacauccaccaccuguccugccccaacaaccucgugguggaggacgagggcugcaccaaccugagcggguucuccuacauggagcugaaggucggcuacaucagcgccaucaaggugaacggguucacgugcaccggcguggucaccgaggcggagaccuacacgaacuucgugggcuacgugaccaccaccuucaagcgcaagcacuuccggcccacgcccgacgccugccgcgccgccuacaacuggaagauggccggggacccgcgguacgaggagucccuccacaaccccuaccccgacuaccacuggcugcgcaccgucaagaccaccaaggagagccuggugaucaucucccccagcguggcggaccucgacccguacgacaagucccugcacagccgggucuuccccuccggcaagugcagcgggaucacgguguccagcaccuacugcuccaccaaccacgacuacaccaucuggaugcccgagaacccccgccugggcacgagcugcgacaucuucaccaacucccgggggaagcgcgccagcaagggcagcaagaccugcggcuucguggacgagcgggggcucuacaagucccugaagggcgccugcaagcugaagcucugcgggguccugggccugcgccucauggacggcaccugggccgcgauccagacgagcgacgagaccaaguggugcccgcccgaccagcuggugaaccugcacgacuuccgguccgacgagaucgagcaccucguggucgaggagcuggugaagaagcgcgaggagugccuggacgcccucgagagcaucaugaccaccaaguccgugagcuuccggcgccugucccaccuccggaagcucguccccggguucggcaaggccuacacgaucuucaacaagacccugauggaggccgacgcccacuacaagagcgugcgcaccuggaacgagaucauccccuccaaggggugccugcgggugggcgggcgcugccacccgcacgucaacggcguguucuucaacggcaucauccucgggcccgacggccacguccugauccccgagaugcagagcucccugcuccagcagcacauggagcugcuggagagcuccgugaucccccucaugcacccgcuggcggaccccagcaccguguucaaggacgacgacgaggccgaggacuucgucgaggugcaccuccccgacgugcacaagcaggucuccgggguggaccugggccugcccagcugggggaaguacgugcugacguccgccggcguccucaccgcccugaugcugaugaucuuccucaugaccugcugccggaaggccaaccgcgcggagagcgcccagcacucccugggcgagcgggggcgcaaggugagcgugaccagccaguccggccgcgucaucagcuccugggagagcuacaaguccgggggcgagacgaagcuguga

SEQ ID NO: 95892 - RNA, 1575 nt, Artificial Sequence
  derived and/or modified CDS sequence (opt1) from glycoprotein__RABV__LC018548.1
augaucccccaggcccugcuguucgugccgcugcuggucuucagccucugcuucggcaaguuccccaucuacaccauccccgacaagcuggggcccugguccccgaucgacauccaccaccugagcugccccaacaaccucgugguggaggacgagggcugcaccaaccuguccggguucagcuacauggagcugaaggucggcuacaucuccgccaucaaggugaacggguucacgugcaccggcguggucaccgaggcggagaccuacacgaacuucgugggcuacgugaccaccaccuucaagcgcaagcacuuccggcccacgcccgacgccugccgcgccgccuacaacuggaagauggccggggacccgcgguacgaggagagccuccacaaccccuaccccgacuaccacuggcugcgcaccgucaagaccaccaaggagucccuggugaucaucagccccuccguggcggaccucgacccguacgacaagagccugcacucccgggucuuccccagcggcaagugcuccgggaucacggugagcuccaccuacugcagcaccaaccacgacuacaccaucuggaugcccgagaacccccgccugggcacguccugcgacaucuucaccaacagccgggggaagcgcgccuccaagggcagcaagaccugcggcuucguggacgagcgggggcucuacaagagccugaagggcgccugcaagcugaagcucugcggggucccgggccugcgccugauggacggcaccugggccgcgauccagacguccgacgagaccaaguggugcccgcccgaccagcucgugaaccugcacgacuuccggagcgacgagaucgagcaccugguggucgaggagcucgugaagaagcgcgaggagugccuggacgcccuggaguccaucaugaccaccaagagcguguccuuccggcgccucagccaccuccggaagcugguccccggguucggcaaggccuacacgaucuucaacaagacccucauggaggccgacgcccacuacaaguccgugcgcaccuggaacgagaucauccccagcaaggggugccugcgggugggcgggcgcugccacccccacgucaacggcguguucuucaacggcaucauccuggggcccgacggccacguccucauccccgagaugcaguccagccugcugcagcagcacauggagcuccuggaguccagcgugaucccgcugaugcacccccucgcggaccccuccaccguguucaaggacgacgacgaggccgaggacuucgucgaggugcaccuccccgacgugcacaagcaggucagcgggguggaccugggccugccguccugggggaaguacgugcugaugagcgccggcguccugacggcccucaugcugaugaucuuccugaugaccugcugccggcgcgccaaccgggcggaguccgcccagcacagccucggcgagcgcgggcgcaagguguccgugaccagccagagcggccgggucaucuccagcugggaguccuacaagagcgggggcgagaccaagcuguga

SEQ ID NO: 95893 - RNA, 1575 nt, Artificial Sequence; identical to SEQ ID NO: 94595
  derived and/or modified CDS sequence (opt1) from glycoprotein__RABV__LC018549.1

SEQ ID NO: 95894 - RNA, 1575 nt, Artificial Sequence; identical to SEQ ID NO: 95861
  derived and/or modified CDS sequence (opt1) from glycoprotein__RABV__LC018552.1

SEQ ID NO: 95895 - RNA, 1575 nt, Artificial Sequence; identical to SEQ ID NO: 94596
  derived and/or modified CDS sequence (opt1) from glycoprotein__RABV__LC018553.1

SEQ ID NO: 95896 - RNA, 1575 nt, Artificial Sequence
  derived and/or modified CDS sequence (opt1) from glycoprotein__RABV__LC018554.1
augaucccccaggcccugcuguucgugccgcugcuggucuucagccucugcuucggcaaguuccccaucuacaccauccccgacaagcuggggcccugguccccgaucgacauccaccaccugagcugccccaacaaccucgugguggaggacgagggcugcaccaaccuguccggguucagcuacauggagcugaaggucggcuacaucuccgccaucaaggugaacggguucacgugcaccggcguggucaccgaggcggagaccuacacgaacuucgugggcuacgugaccaccaccuucaagcgcaagcacuuccggcccacgcccgacgccugccgcgccgccuacaacuggaagauggccggggacccgcgguacgaggagagccuccacaaccccuaccccgacuaccacuggcugcgcaccgucaagaccaccaaggagucccuggugaucaucagccccuccguggcggaccucgacccguacgacaagagccugcacucccgggucuuccccagcggcaagugcuccgggaucacggugagcuccaccuacugcagcaccaaccacgacuacaccaucuggaugcccgagaacccccgccugggcacguccugcgacaucuucaccaacagccgggggaagcgcgccuccaagggcagcaagaccugcggcuucguggacgagcgggggcucuacaagagccugaagggcgccugcaagcugaagcucugcgggguccugggccugcgccucauggacggcaccugggccgcgauccagacguccgacgagaccaaguggugcccgcccgaccagcuggugaaccugcacgacuuccggagcgacgagaucgagcaccucguggucgaggagcuggugaagaagcgcgaggagugccuggacgcccucgaguccaucaugaccaccaagagcguguccuuccggcgccugagccaccuccggaagcucguccccggguucggcaaggccuacacgaucuucaacaagacccugauggaggccgacgcccacuacaaguccgugcgcaccuggaacgagaucauccccagcaaggggugccugcgggugggcgggcgcugccacccgcacgucaacggcguguucuucaacggcaucauccucgggcccgacggccacguccugauccccgagaugcaguccagccugcuccagcagcacauggagcugcuggaguccagcgugaucccccucaugcacccgcuggcggaccccuccaccguguucaaggacgacgacgaggccgaggacuucgucgaggugcaccuccccgacgugcacaagcaggucagcgggguggaccugggcuuccccuccugggggaaguacgugcugaugagcgccggcguccugacgucccucaugcugaugaucuuccugaugaccugcugccggcgcgccaaccggguggagagcgcccagcacucccucggcgagcgcgggcgcaaggugagcgucaccagccaguccggccgggugaucagcuccugggagagcuacaaguccgggggcgagaccaagcuguga

SEQ ID NO: 95897 - RNA, 1575 nt, Artificial Sequence
  derived and/or modified CDS sequence (opt1) from glycoprotein__RABV__LC018555.1
augaucccccaggcccugcuguucgugccgcugcuggucuucagccucugcuucggcaaguuccccaucuacaccauccccgacaagcuggggcccugguccccgaucgacauccaccaccugagcugccccaacaaccucgugguggaggacgagggcugcaccaaccuguccggguucagcuacauggagcugaaggucggcuacaucuccgccaucaaggugaacggguucacgugcaccggcguggucaccgaggcggagaccuacacgaacuucgugggcuacgugaccaccaccuucaagcgcaagcacuuccggcccacgcccgacgccugccgcgccgccuacaacuggaagauggccggggacccgcgguacgaggagagccuccacaaccccuaccccgacuaccacuggcugcgcaccgucaagaccaccaaggagucccuggugaucaucagccccuccguggcggaccucgacccguacgacaagagccugcacucccgggucuuccccagcggccgcugcuccgggaucacggugagcuccaccuacugcagcaccaaccacgacuacaccaucuggaugcccgagaacccccggcugggcacguccugcgacaucuucaccaacagccgcgggaagcgggccuccaagggcagcaagaccugcggcuucguggacgagcgcgggcucuacaagagccugaagggcgccugcaagcugaagcucugcgggguccugggccugcggcucauggacggcaccugggccgcgauccagacguccgacgagaccaaguggugcccgcccgaccagcuggugaaccugcacgacuuccgcagcgacgagaucgagcaccucguggucgaggagcuggugaagaagcgggaggagugccuggacgcccucgaguccaucaugaccaccaagagcguguccuuccgccggcugagccaccuccgcaagcucguccccggguucggcaaggccuacacgaucuucaacaagacccugauggaggccgacgcccacuacaaguccgugcggaccuggaacgagaucauccccagcaaggggugccugcgcgugggcgggcggugccacccgcacgucaacggcguguucuucaacggcaucauccucgggcccgacggccacguccugauccccgagaugcaguccagccugcuccagcagcacauggagcugcuggaguccagcgugaucccccucaugcacccgcuggcggaccccuccaccguguucaaggacgacgacgaggccgaggacuucgucgaggugcaccuccccgacgugcacaagcaggucagcgggguggaccugggccugcccuccugggggaaguacgugcugaugagcgccggcguccucacggcccugaugcugaugaucuuccucaugaccugcugccgccgggccaaccgcgcggaguccgcccagcacagccugggcgagcgcgggcggaagguguccgugaccagccagagcggccgcgucaucuccagcugggaguccuacaagagcgggggcgagaccaagcuguga

SEQ ID NO: 95898 - RNA, 1575 nt, Artificial Sequence; identical to SEQ ID NO: 94596
  derived and/or modified CDS sequence (opt1) from glycoprotein__RABV__LC018556.1

SEQ ID NO: 95899 - RNA, 1575 nt, Artificial Sequence
  derived and/or modified CDS sequence (opt1) from glycoprotein__RABV__LC018557.1
augaucccccaggcccugcuguucgugccgcugcuggucuucagccucugcuucggcaaguuccccaucuacaccauccccgacaagcuggggcccugguccccgaucgacauccaccaccugagcugccccaacaaccucgugguggaggacgagggcugcaccaaccuguccggguucagcuacauggagcugaaggucggcuacaucuccgccaucaaggugaacggguucacgugcaccggcguggucaccgaggcggagaccuacacgaacuucgugggcuacgugaccaccaccuucaagcgcaagcacuuccggcccacgcccgacgccugccgcgccgccuacaacuggaagauggccggggacccgcgguacgaggagagccuccacaaccccuaccccgacuaccacuggcugcgcaccgucaagaccaccaaggagucccuggugaucaucagccccuccguggcggaccucgacccguacgacaagagccugcacucccgggucuuccccagcggcaagugcuccgggaucacggugagcuccaccuacugcagcaccaaccacgacuacaccaucuggaugcccgagaacccccgccugggcacguccugcgacaucuucaccaacagccgggggaagcgcgccuccaagggcagcaagaccugcggcuucguggacgagcgggggcucuacaagagccugaagggcgccugcaagcugaagcucugcgggguccugggccugcgccucauggacggcaccugggccgcgauccagacguccgacgagaccaaguggugcccgcccgaccagcuggugaaccugcacgacuuccggagcgacgagaucgagcaccucguggucgaggagcuggugaagaagcgcgaggagugccuggacgcccucgaguccaucaugaccaccaagagcguguccuuccggcgccugagccaccuccggaagcucguccccggguucggcaaggccuacacgaucuucaacaagacccugauggaggccgacgcccacuacaaguccgugcgcaccuggaacgagaucauccccagcaaggggugccugcgggugggcgggcgcugccacccgcacgucaacggcguguucuucaacggcaucauccucgggcccgacggccacguccugauccccgagaugcaguccagccugcuccagcagcacauggagcugcuggaguccagcgugaucccccucaugcacccgcuggcggaccccuccaccguguucaaggacgacgacgaggccgaggacuucgucgaggugcaccuccccgacgugcacaagcaggucagcgggguggaccugggccugcccuccugggggaaguacgugcugaugagcgccugcguccucacggcccugaugcugaugaucuuccucaugaccugcugccggcgcgccaaccgggcggaguccgcccagcacagccugggcgagcgcggccgcaagguguccgugaccagccagagcgggcgggucaucuccagcugggaguccuacaagagcggcggggagaccaagcuguga

SEQ ID NO: 95900 - RNA, 1575 nt, Artificial Sequence; identical to SEQ ID NO: 94619
  derived and/or modified CDS sequence (opt1) from glycoprotein__RABV__LC018558.1

SEQ ID NO: 95901 - RNA, 1575 nt, Artificial Sequence; identical to SEQ ID NO: 94619
  derived and/or modified CDS sequence (opt1) from glycoprotein__RABV__LC018561.1

SEQ ID NO: 95902 - RNA, 1575 nt, Artificial Sequence; identical to SEQ ID NO: 94619
  derived and/or modified CDS sequence (opt1) from glycoprotein__RABV__LC018562.1

SEQ ID NO: 95903 - RNA, 1575 nt, Artificial Sequence; identical to SEQ ID NO: 94619
  derived and/or modified CDS sequence (opt1) from glycoprotein__RABV__LC018564.1

SEQ ID NO: 95904 - RNA, 1575 nt, Artificial Sequence
  derived and/or modified CDS sequence (opt1) from glycoprotein__RABV__LC018565.1
augaucccccaggcccugcuguucgugccgcugcuggucuucagccucugcuucggcaaguuccccaucuacaccauccccgacaagcuggggcccugguccccgaucgacauccaccaccugagcugccccaacaaccucgugguggaggacgagggcugcaccaaccuguccggguucagcuacauggagcugaaggucggcuacaucuccgccaucaaggugaacggguucacgugcaccggcguggucaccgaggcggagaccuacacgaacuucgugggcuacgugaccaccaccuucaagcgcaagcacuuccggcccacgcccgacgccugccgcgccgccuacaacuggaagauggccggggacccgcgguacgaggagagccuccacaaccccuaccccgacuaccacuggcugcgcaccgucaagaccaccaaggagucccuggugaucaucagccccuccguggcggaccucgacccguacgacaagagccugcacucccgggucuuccccagcggcaagugcuccgggaucacggugagcuccaccuacugcagcaccaaccacgacuacaccaucuggaugcccgagaacccccgccugggcacguccugcgacaucuucaccaacagccgggggaagcgcgccuccaagggcagcaagaccugcggcuucguggacgagcgggggcucuacaagagccugaagggcgccugcaagcugaagcucugcgggguccugggccugcgccucauggacggcaccugggccgcgauccagacguccgacgagaccaaguggugcccgcccgaccagcuggugaaccugcacgacuuccggagcgacgagaucgagcaccucguggucgaggagcuggugaagaagcgcgaggagugccuggacgcccucgaguccaucaugaccaccaagagcguguccuuccggcgccugagccaccuccggaagcucguccccggguucggcaaggccuacacgaucuucaacaagacccugauggaggccgacgcccacuacaaguccgugcgcaccuggaacgagaucauccccagcaaggggugccugcgggugggcgggcgcugccacccgcacgucaacggcguguucuucaacggcaucauccucgggcccgacggccacguccugauccccgagaugcaguccagccugcuccagcagcacauggagcugcuggaguccagcgugaucccccucaugcacccgcuggcggaccccuccaccguguucaaggacgacgacgaggccgaggacuucgucgaggugcaccuccccgacgugcacaagcaggucagcgggguggaccugggccugcccuccugggggaacuacgugcugaugagcgccggcguccucacggcccugaugcugaugaucuuccucaugaccugcugccggcgcaccaaccgggccgaguccgcgcagcacagccugggcgagcgcgggcgcaagguguccgugaccagccagagcggccgggucaucuccagcugggaguccuacaagagcgggggcgagacgaagcuguga

SEQ ID NO: 95905 - RNA, 1575 nt, Artificial Sequence; identical to SEQ ID NO: 94619
  derived and/or modified CDS sequence (opt1) from glycoprotein__RABV__LC018567.1

SEQ ID NO: 95906 - RNA, 1575 nt, Artificial Sequence
  derived and/or modified CDS sequence (opt1) from glycoprotein__RABV__LC018569.1
augaucccccaggcccugcuguucgugccgcugcuggucuucagccucugcuucggcaaguuccccaucuacaccauccccgacaagcuggggcccugguccccgaucgacauccaccaccugagcugccccaacaaccucgugguggaggacgagggcugcaccaaccuguccggguucagcuacauggagcugaaggucggcuacaucuccgccaucaaggugaacggguucacgugcaccggcguggucaccgaggcggagaccuacacgaacuucgugggcuacgugaccaccaccuucaagcgcaagcacuuccggcccacgcccgacgccugccgcgccgccuacaacuggaagauggccggggacccgcgguacgaggagagccuccacaaccccuaccccgacuaccacuggcugcgcaccgucaagaccaccaaggagucccuggugaucaucagccccuccguggcggaccucgacccguacgacaagagccugcacucccgggucuuccccagcggcaagugcuccgggaucacggugagcuccaccuacugcagcaccaaccacgacuacaccaucuggaugcccgagaacccccgccugggcacguccugcgacaucuucaccaacagccgggggaagcgcgccuccaagggcagcaagaccugcggcuucguggacgagcgggggcucuacaagagccugaagggcgccugcaagcugaagcucugcgggguccugggccugcgccucauggacggcaccugggccgcgauccagacguccgacgagaccaaguggugcccgcccgaccagcuggugaaccugcacgacuuccacagcgacgagaucgagcaccucguggucgaggagcuggugaagaagcgggaggagugccuggacgcccucgaguccaucaugaccaccaagagcguguccuuccgccggcugagccaccuccgcaagcucguccccggguucggcaaggccuacacgaucuucaacaagacccugauggaggccgacgcccacuacaaguccgugcggaccuggaacgagaucauccccagcaaggggugccugcgcgugggcgggcggugccacccgcacgucaacggcguguucuucaacggcaucauccucgggcccgacggccacguccugauccccgagaugcaguccagccugcuccagcagcacauggagcugcuggaguccagcgugaucccccucaugcacccgcuggcggaccccuccaccguguucaaggacgacgacgaggccgaggacuucgucgaggugcaccuccccgacgugcacaagcaggucagcgggguggaccugggccugcccuccugggggaaguacgugcugaugagcgccggcguccucacggcccugaugcugaugaucuuccucaugaccugcugccgccggaccaaccgcgccgaguccgcgcagcacagccugggcgagcgggggcgcaagguguccgugaccagccagagcggccgcgucaucuccagcugggaguccuacaagagcgggggcgagacgaagcuguga

SEQ ID NO: 95907 - RNA, 1575 nt, Artificial Sequence; identical to SEQ ID NO: 94619
  derived and/or modified CDS sequence (opt1) from glycoprotein__RABV__LC018570.1

SEQ ID NO: 95908 - RNA, 1575 nt, Artificial Sequence
  derived and/or modified CDS sequence (opt1) from glycoprotein__RABV__LC018571.1
augaucccccaggcccugcuguucgugccgcugcuggucuucagccucugcuucggcaaguuccccaucuacaccauccccgacaagcuggggcccugguccccgaucgacauccaccaccugagcugccccaacaaccucgugguggaggacgagggcugcaccaaccuguccggguucagcuacauggagcugaaggucggcuacaucuccgccaucaaggugaacggguucacgugcaccggcguggucaccgaggcggagaccuacacgaacuucgugggcuacgugaccaccaccuucaagcgcaagcacuuccggcccacgcccgacgccugccgcgccgccuacaacuggaagauggccggggacccgcgguacgaggagagccuccacaaccccuaccccgacuaccacuggcugcgcaccgucaagaccaccaaggagucccuggugaucaucagccccuccguggcggaccucgacccguacgacaagagccugcacucccgggucuucagcuccggcaagugcagcgggaucacgguguccagcaccuacugcuccaccaaccacgacuacaccaucuggaugcccgagaacccccgccugggcacgagcugcgacaucuucaccaacucccgggggaagcgcgccagcaagggcagcaagaccugcggcuucguggacgagcgggggcucuacaagucccugaagggcgccugcaagcugaagcucugcgggguccugggccugcgccucauggacggcaccugggccgcgauccagacgagcgacgagaccaaguggugcccgcccgaccagcuggugaaccugcacgacuuccgguccgacgagaucgagcaccucguggucgaggagcuggugaagaagcgcgaggagugccuggacgcccucgagagcaucaugaccaccaaguccgugagcuuccggcgccugucccaccuccggaagcucguccccggguucggcaaggccuacacgaucuucaacaagacccugauggaggccgacgcccacuacaagagcgugcgcaccuggaacgagaucauccccuccaaggggugccugcgggugggcgggcgcugccacccccacgucaacggcguguucuucaacggcaucauccucgggccggacggccacguccugauccccgagaugcagagcucccugcuccagcagcacauggagcugcuggagagcuccgugaucccccucaugcacccccuggcggacccgagcaccguguucaaggacgacgacgaggccgaggacuucgucgaggugcaccuccccgacgugcacaagcaggucuccgggguggaccugggccugcccagcugggggaaguacgugcugauguccgccggcguccucacggcccugaugcugaugaucuuccucaugaccugcugccggcgcaccaaccgggccgagagcgcgcagcacucccugggcgagcgcgggcgcaaggugagcgugaccagccaguccggccgggucaucagcuccugggagagcuacaaguccgggggcgagacgaagcuguga

SEQ ID NO: 95909 - RNA, 1575 nt, Artificial Sequence; identical to SEQ ID NO: 94619
  derived and/or modified CDS sequence (opt1) from glycoprotein__RABV__LC018572.1

SEQ ID NO: 95910 - RNA, 1575 nt, Artificial Sequence; identical to SEQ ID NO: 94619
  derived and/or modified CDS sequence (opt1) from glycoprotein__RABV__LC018573.1

SEQ ID NO: 95911 - RNA, 1575 nt, Artificial Sequence; identical to SEQ ID NO: 94619
  derived and/or modified CDS sequence (opt1) from glycoprotein__RABV__LC018581.1

SEQ ID NO: 95912 - RNA, 1575 nt, Artificial Sequence
  derived and/or modified CDS sequence (opt1) from glycoprotein__RABV__LC018584.1
augaucccccaggcccugcuguucgugccgcugcuggucuucagccucugcuucggcaaguuccccaucuacaccauccccgacaagcuggggcccugguccccgaucgacauccaccaccugagcugccccaacaaccucgugguggaggacgagggcugcaccaaccuguccggguucagcuaccuggagcucaaggucggcuacaucuccgccaucaaggugaacggguucacgugcaccggcguggucaccgaggcggagaccuacacgaacuucgugggcuacgugaccaccaccuucaagcgcaagcacuuccggcccaugcccgacgccugccgcgccgccuacaacuggaagauggccggggacccgcgguacgaggagagccugcacaaccccuaccccgacuaccacuggcugcgcacggucaagaccaccaaggagucccucgugaucaucagccccuccguggcggaccuggacccguacaacaagagccugcacucccgggucuuccccagcggcaagugcuccgggaucaccgugagcuccacguacugcagcaccaaccacgacuacaccaucuggaugcccgagaacccccgccucggcaccuccugcgacaucuucacgaacagccgggggaagcgcgccuccaagggcagcaagaccugcggcuucguggacgagcgggggcuguacaagagccugaagggcgccugcaagcucaagcugugcgggguccugggccuccgccugauggacggcaccugggccgcgauccagaccuccgacgagacgaaguggugcccgcccgaccagcuggugaaccuccacgacuuccggagcgacgagaucgagcaccugguggucgaggagcuggugaagaagcgcgaggagugccucgacgcccuggaguccaucaugaccaccaagagcguguccuuccggcgccugagccaccuccggaagcugguccccggguucggcaaggccuacaccaucuucaacaagacgcugauggaggccgacgcccacuacaaguccgugcgcaccuggaacgagauccuccccagcaaggggugccugcgggugggcgggcgcugccacccgcacgucaacggcguguucuucaacggcaucauccuggggcccgacggccacguccucauccccgagaugcaguccagccugcugcagcagcacauggagcuccuggaguccagcgugaucccccugaugcacccgcucgcggaccccuccaccguguucaaggacgacgacgaggccgaggacuucgucgaggugcaccuccccgacgugcacaagcaggucagcgggguggaccugggccuccccuccugggggaaguacgugcugaugagcgccggcguccugaccgcccucaugcugaugaucuuccugaugacgugcugccggcgcccgaaccgggccgaguccgcgcagcacagccugggcgagcgcgagaagaagguguccgugaccagccagagcgggcgcgucaucuccagcugggaguccuacaagagcggcggggagaccaagcucuga

SEQ ID NO: 95913 - RNA, 1575 nt, Artificial Sequence
  derived and/or modified CDS sequence (opt1) from glycoprotein__RABV__LC018585.1
augaucccccaggcccuccuguucgugccgcugcuggucuucagccucugcuucggcaaguuccccaucuacaccauccccgacaagcuggggcccugguccccgaucgacauccaccaccugagcugccccaacaaccucgugguggaggacgagggcugcaccaaccuguccggguucagcuaccuggagcucaaggucggcuacaucuccgccaucaaggugaacggguucacgugcaccggcguggucaccgaggcggagaccuacacgaacuucgugggcuacgugaccaccaccuucaagcgcaagcacuuccggcccaugcccgacgccugccgcgccgccuacaacuggaagauggccggggacccgcgguacgaggagagccugcacaaccccuaccccgacuaccacuggcugcgcacggucaagaccaccaaggagucccucgugaucaucagccccuccguggcggaccuggacccguacgacaagagccugcacucccgggucuuccccagcggcaagugcuccgggaucaccgugagcuccacguacugcagcaccaaccacgacuacaccaucuggaugcccgagaacccccgccucggcaccuccugcgacaucuucacgaacagccgggggaagcgcgccuccaagggcagcaagaccugcggcuucguggacgagcgggggcuguacaagagccugaagggcgccugcaagcucaagcugugcgggguccugggccuccgccugauggacggcaccugggccgcgauccagaccuccgacgagacgaaguggugcccgcccgaccagcuggugaaccuccacgacuuccggagcgacgagaucgagcaccugguggucgaggagcuggugaagaagcgcgaggagugccucgacgcccuggaguccaucaugaccaccaagagcguguccuuccggcgccugagccaccuccggaagcugguccccggguucggcaaggccuacaccaucuucaacaagacgcugauggaggccgacgcccacuacaaguccgugcgcaccuggaacgagaucauccccagcaaggggugccuccgggugggcgggcgcugccacccgcacgucaacggcguguucuucaacggcaucauccuggggcccgacggccacguccugauccccgagaugcaguccagccuccugcagcagcacauggagcugcucgaguccagcgugaucccccugaugcacccgcuggcggaccccuccaccguguucaaggacgacgacgaggccgaggacuucgucgaggugcaccuccccgacgugcacaagcaggucagcgggguggaccugggccugcccuccugggggaaguacgugcucaugagcgccggcguccugaccgcccugaugcucaugaucuuccugaugacgugcugccggcgcccgaaccgggccgaguccgcgcagcacagccugggcgagcgcgagaagaagguguccgugaccagccagagcgggcgcgucaucuccagcugggaguccuacaagagcggcggggagaccaagcuguga

SEQ ID NO: 95914 - RNA, 1575 nt, Artificial Sequence; identical to SEQ ID NO: 94596
  derived and/or modified CDS sequence (opt1) from glycoprotein__RABV__LC018586.1

SEQ ID NO: 95915 - RNA, 1575 nt, Artificial Sequence
  derived and/or modified CDS sequence (opt1) from glycoprotein__RABV__LC018587.1
augaucccccaggcccugcuguucgugccgcugcuggucuucagccucugcuucggcaaguuccccaucuacaccauccccgacaagcuggggcccugguccccgaucgacauccaccaccugagcugccccaacaaccucgugguggaggacgagggcugcaccaaccuguccggguucagcuacauggagcugaaggucggcuacaucuccgccaucaaggugaacggguucacgugcaccggcguggucaccgaggcggagaccuacacgaacuucgugggcuacgugaccaccaccuucaagcgcaagcacuuccggcccacgcccgacgccugccgcgccgccuacaacuggaagauggccggggacccgcgguacgaggagagccuccacaaccccuaccccgacuaccacuggcugcgcaccgucaagaccaccaaggagucccuggugaucaucagccccuccguggcggaccucgacccguacgacaagagccugcacucccgggucuuccccagcggcaagugcuccgggaucacggugagcuccaccuacugcagcaccaaccacgacuacaccaucuggaugcccgagaacccccgccugggcacguccugcgacaucuucaccaacagccgggggaagcgcgccuccaagggcagcaagaccugcggcuucguggacgagcgggggcucuacaagagccugaagggcgccugcaagcugaagcucugcgggguccugggccugcgccucauggacggcaccuggguggccauccagacguccgacgagaccaaguggugcccgcccgaccagcuggugaaccugcacgacuuccggagcgacgagaucgagcaccucgucguggaggagcuggugaagaagcgcgaggagugccuggacgcgcucgaguccaucaugaccaccaagagcgucuccuuccggcgccugagccaccuccggaagcucgugcccggguucggcaaggccuacacgaucuucaacaagacccugauggaggccgacgcccacuacaaguccgugcgcaccuggaacgagaucauccccagcaaggggugccugcgggucggcgggcgcugccacccgcacgugaacggcgucuucuucaacggcaucauccucgggcccgacggccacgugcugauccccgagaugcaguccagccugcuccagcagcacauggagcugcuggaguccagcgugaucccccucaugcacccgcuggccgaccccuccaccgucuucaaggacgacgacgaggcggaggacuucguggaggugcaccuccccgacguccacaagcaggucagcgggguggaccugggccugcccuccugggggaaguacgugcugaugagcgccggcgugcucacggcccugaugcugaugaucuuccucaugaccugcugccggcgcgccaaccgggccgaguccgcgcagcacagccugggcgagcgcgggcgcaagguguccgucaccagccagagcggccgggugaucuccagcugggaguccuacaagagcgggggcgagaccaagcuguga

SEQ ID NO: 95916 - RNA, 1575 nt, Artificial Sequence; identical to SEQ ID NO: 94596
  derived and/or modified CDS sequence (opt1) from glycoprotein__RABV__LC018588.1

SEQ ID NO: 95917 - RNA, 1575 nt, Artificial Sequence
  derived and/or modified CDS sequence (opt1) from glycoprotein__RABV__LC018589.1
augaucccccaggcccugcuguucgugccgcugcuggucuucagccucugcuucggcaaguuccccaucuacaccauccccgacaagcuggggcccugguccccgaucgacauccaccaccugagcugccccaacaaccucgugguggaggacgagggcugcaccaaccuguccggguucagcuacauggagcugaaggucggcuacaucuccgccaucaaggugaacggguucacgugcaccggcguggucaccgaggcggagaccuacacgaacuucgugggcuacgugaccaccaccuucaagcgcaagcacuuccggcccacgcccgacgccugccgcgccgccuacaacuggaagauggccggggacccgcgguacgaggagagccuccacaaccccuaccccgacuaccacuggcugcgcaccgucaagaccaccaaggagucccuggugaucaucagccccuccguggcggaccucgacccguacgacaagagccugcacucccgggucuuccccagcggcaagugcuccgggaucacggugagcuccaccuacugcagcaccaaccacgacuacaccaucuggaugcccgagaacccccgccugggcacguccugcgacaucuucaccaacagccgggggaagcgcgccuccaagggcagcaagaccugcggcuucguggacgagcgggggcucuacaagagccugaagggcgccugcaagcugaagcucugcgggguccugggccugcgccucauggacggcaccugggccgcgauccagacguccgacgagaccaaguggugcccgcccgaccagcuggugaaccugcacgacuuccggagcgacgagaucgagcaccucguggucgaggagcuggugaagaagcgcgaggagugccuggacgcccucgaguccaucaugaccaccaagagcguguccuuccggcgccugagccaccuccggaagcucguccccggguucggcaaggccuacacgaucuucaacaagacccugauggaggccgacgcccacuacaaguccgugcgcaccuggaacgagaucauccccagcaaggggugccugcgggugggcgggcgcugccacccgcacgucaacggcguguucuucaacggcaucauccucgggcccgacggccacguccugauccccgagaugcaguccagccugcuccagcagcacauggagcugcuggaguccagcgugaucccccucaugcacccgcuggcggaccccuccaccguguucaaggacgacgacgaggccgaggacuucgucgaggugcaccuccccgacgugcacaagcaggucagcgggguggaccugggccugcccuccugggggaaguacgugcugaugagcgccggcguccucacggcccugaugcugaugaucuuccucaugaccugcugccggcgcgccaaccgggcggaguccgcccgccacagccugggcgagcgcgggcggaagguguccgugaccagccagagcggccgcgucaucuccagcugggaguccuacaagagcgggggcgagaccaagcuguga

SEQ ID NO: 95918 - RNA, 1575 nt, Artificial Sequence
  derived and/or modified CDS sequence (opt1) from glycoprotein__RABV__LC018590.1
augaucccccaggcccugcuguucgugccgcugcuggucuucagccucugcuucggcaaguuccccaucuacaccauccccgacaagcuggggcccugguccccgaucgacauccaccaccugagcugccccaacaaccucgugguggaggacgagggcugcaccaaccuguccggguucagcuacauggagcugaaggucggcuacaucuccgccaucaaggugaacggguucacgugcaccggcguggucaccgaggcggagaccuacacgaacuucgugggcuacgugaccaccaccuucaagcgcaagcacuuccggcccacgcccgacgccugccgcgccgccuacaacuggaagauggccggggacccgcgguacgaggagagccuccacaaccccuaccccgacuaccacuggcugcgcaccgucaagaccaccaaggagucccuggugaucaucagccccuccguggcggaccucgacccguacgacaagagccugcacucccgggucuuccccagcggcaagugcuccgggaucacggugagcuccaccuacugcagcaccaaccacgacuacaccaucuggaugcccgagaacccccgccugggcacguccugcgacaucuucaucaacagccgggggaagcgcgccuccaagggcagcaagaccugcggcuucguggacgagcgggggcucuacaagagccugaagggcgccugcaagcugaagcucugcggggucccgggccugcgccugauggacggcaccugggccgcgauccagaccuccgacgagacgaaguggugcccgcccgaccagcucgugaaccugcacgacuuccggagcgacgagaucgagcaccugguggucgaggagcucgugaagaagcgcgaggagugccuggacgcccuggaguccaucaugaccaccaagagcguguccuuccggcgccucagccaccuccggaagcugguccccggguucggcaaggccuacaccaucuucaacaagacgcucauggaggccgacgcccacuacaaguccgugcgcaccuggaacgagaucauccccagcaaggggugccugcgggugggcgggcgcugccacccccacgucaacggcguguucuucaacggcaucauccuggggcccgacggccacguccucauccccgagaugcaguccagccugcugcagcagcacauggagcuccuggaguccagcgugaucccgcugaugcacccccucgcggaccccuccaccguguucaaggacgacgacgaggccgaggacuucgucgaggugcaccuccccgacgugcacaagcaggucagcgggguggaccugggccugccguccugggggaaguacgugcugaugagcgccggcguccugaccgcccucaugcugaugaucuuccugaugacgugcugccggcgcgccaaccgggcggaguccgcccagcacagccucggcgagcgcgggcgcaagguguccgugaccagccagagcggccgggucaucuccagcugggaguccuacaagagcgggggcgagaccaagcuguga

SEQ ID NO: 95919 - RNA, 1575 nt, Artificial Sequence
  derived and/or modified CDS sequence (opt1) from glycoprotein__RABV__LC071936.1
augaucccccaggcccugcuccuggugccgcugcucgucuucccccugugcuucggcaaguuccccaucuacaccauccccgacaagcuggggccguggagccccaucgacauccaccaccucuccugccccaacaaccuggugguggaggacgagggcugcaccaaccugagcggguucuccuacauggagcucaaggucggcuacaucagcgccaucaaggugaacggguucacgugcaccggcguggucaccgaggcggagaccuacacgaacuucgugggcuacgugaccaccaccuucaagcgcaagcacuuccggcccacgccggacgccugccgcgccgccuacaacuggaagauggccggggacccccgguacgaggagucccugcacaaccccuaccccgacuaccacuggcugcgcaccgucaaggcgaccaaggagagccucgugaucaucuccccgagcguguccgaccuggaccccuacgacaagagccugcacucccgggucuuccccagcggcaagugcuccgggaucaccgugagcuccacguacugccccaccagccacgacuacaccaucuggaugccggagaacccccgccucggcaccuccugcgacaucuucaucaacagccgggggaagcgcgccuccaagggcagcaagacgugcggcuucguggacgagcgggggcuguacaagagccugaagggcgccugcaagcucaagcugugcgggguccugggccuccgccugauggacggcaccugggccgcgauccagaccuccgacgaggccaaguggugcccgcccgaccagcuggugaacauccacgacuuccacagcgacgagaucgagcaccucguggucgaggagcuggugaagaagcgggaggagugccuggacgcccucgaguccaucaugaccaccaagagcguguccuuccgccggcugagccaccuccgcaagcugguccccggguucggcaaggccuacacgaucuucaacaagacccugauggaggccgacgcgcacuacaaguccgugcggaccuggaacgagaucauccccagcaaggggugccugcgcgugggcgggcggugccacccccacgucaacggcguguucuucaacggcaucauccucgggcccgacggccacguccugaucccggagaugcaguccagccugcuccagcagcacauggagcugcuggaguccagcgugaucccccucaugcacccccuggccgaccccuccacgguguucaaggacggggacgaggccgaggacuucgucgaggugcaccucccggacgugcacaagcaggucagcggcguggaccuggggcugcccuccuggggcaaguacgugcugaugagcgucggcacccucaucgcccugauggugaugaucuuccugaugaccugcugccgcaaggccaacgggguggaguccaugcggcaccgccucggcgagaccgggcggaaggucagcgugacgucccagagcggccgcgugaucagcuccugggagagcuacaaguccgggggcgagaccaagcuguga

SEQ ID NO: 95920 - RNA, 1575 nt, Artificial Sequence
  derived and/or modified CDS sequence (opt1) from glycoprotein__RABV__LC071937.1
augaucccccaggcccugcuguucgugccgcugcuggucuucagccucugcuucggcaaguuccccaucuacaccauccccgacaagcuggggcccugguccccgaucgacauccaccaccugagcugccccaacaaccucgugguggaggacgagggcugcaccaaccuguccggguucagcuacauggagcugaaggucggcuacaucuccgccaucaaggugaacggguucacgugcaccggcguggucaccgaggcggagaccuacacgaacuucgugggcuacgugaccaccaccuucaagcgcaagcacuuccggcccacgcccgacgccugccgcgccgccuacaacuggaagauggccggggacccgcgguacgaggagagccuccacaaccccuaccccgacuaccacuggcugcgcaccgucaagaccaccaaggagucccuggugaucaucagccccuccgugagcgaccucgacccguacgacaagucccugcacagccgggucuuccccuccggcaagugcagcgggaucacgguguccagcaccuacugccccaccaaccacgacuacaccaucuggaugcccgagaacccgcgccugggcacguccugcgacaucuucaccaccagccgggggaagcgcgcguccaagggcggcaagaccugcggguucguggacgagcggggccucuacaagagccugaagggggccugcaagcugaagcucugcggcguccugggccugcgccucauggacgggacgugggccgccauccagaccagcgacgaggcgaaguggugcccgcccgaccagcuggugaacauccacgacuuccgguccgacgagaucgagcaccugguggucgaggagcucgugaagaagcgcgaggagugccuggacgcccuggagagcaucaugaccaccaaguccgugagcuuccggcgccucucccaccuccggaagcugguccccggcuucgggaaggccuacacgaucuucaacaagacccucauggaggccgacgcccacuacaagagcgugcgcaccuggaacgagaucauccccuccaagggcugccugcgggucgggggccgcugccacccccacgugaacggcguguucuucaacgggaucauccugggccccgacgggcacguccucauccccgagaugcagagcucccugcugcagcagcacauggagcuccuggagagcuccgugaucccgcugaugcacccccucgcggaccccagcaccguguucaaggacgacgacgaggccgaggacuucgucgaggugcaccuccccgacgugcacaagcaggucuccggcguggaccuggggcugccgagcuggggcaaguacgugcugauguccgucggcgccaugaucgcccugaugcucaugaucuuccugacgaccugcugccggaaggccaacggggcggagagcacgccccaccgccugggcgagaccgggcggaagguguccgugaccagccaguccggccgcgucaucagcagcugggaguccuacaagagcgggggcgagaccaagcucuga

SEQ ID NO: 95921 - RNA, 1575 nt, Artificial Sequence; identical to SEQ ID NO: 95920
  derived and/or modified CDS sequence (opt1) from glycoprotein__RABV__LC071938.1

SEQ ID NO: 95922 - RNA, 1575 nt, Artificial Sequence; identical to SEQ ID NO: 95920
  derived and/or modified CDS sequence (opt1) from glycoprotein__RABV__LC071939.1

SEQ ID NO: 95923 - RNA, 1575 nt, Artificial Sequence
  derived and/or modified CDS sequence (opt1) from glycoprotein__RABV__LC071940.1
augaucccccaggcccugcuguucgugccgcugcuggucuucagccucugcuucggcaaguucuccaucuacaccauccccgacaagcuggggcccuggagccccaucgacauccaccaccuguccugcccgaacaaccucgugguggaggacgagggcugcaccaaccugagcggguucuccuacauggagcugaaggucggcuacaucagcgccaucaaggugaacggguucacgugcaccggcguggucaccgaggcggagaccuacacgaacuucgugggcuacgugaccaccaccuucaagcgcaagcacuuccggcccacgcccgacgccugccgcgccgccuacaacuggaagauggccggggacccccgguacgaggagucccuccacaacccguaccccgacuaccacuggcugcgcaccgucaagaccaccaaggagagccuggugaucaucucccccagcguguccgaccucgaccccuacgacaagagccugcacucccgggucuucccgagcggcaagugcuccgggaucacggugagcuccaccuacugccccaccaaccacgacuacaccaucuggaugcccgagaacccccgccugggcacgagcugcgacaucuucaccaccucccgggggaagcgcgcgagcaagggcggcaagaccugcggguucguggacgagcggggccucuacaagagccugaagggggccugcaagcugaagcucugcggcguccugggccugcgccucauggacgggacgugggccgccauccagaccuccgacgaggcgaaguggugcccgcccgaccagcuggugaacauccacgacuuccggagcgacgagaucgagcaccugguggucgaggagcucgugaagaagcgcgaggagugccuggacgcccuggaguccaucaugaccaccaagagcguguccuuccggcgccucagccaccuccggaagcugguccccggcuucgggaaggccuacacgaucuucaacaagacccucauggaggccgacgcccacuacaaguccgugcgcaccuggaacgagaucauccccagcaagggcugccugcgggucgggggccgcugccacccgcacgugaacggcguguucuucaacgggaucauccugggccccgacgggcacguccucauccccgagaugcaguccagccugcugcagcagcacauggagcuccuggaguccagcgugaucccccugaugcacccgcucgcggaccccuccaccguguucaaggacgacgacgaggccgaggacuucgucgaggugcaccuccccgacgugcacaagcaggucagcggcguggaccuggggcugcccuccuggggcaaguacgugcugaugagcgucggcgccaugaucgcccugaugcucaugaucuuccugacgaccugcugccggaaggccaacggggcggaguccacccagcaccgccugggcgagaccgggcggaaggugagcgugacgucccagagcggccgcgucaucagcucccgcgagagcuacaaguccgggggcgagaccaagcucuga

SEQ ID NO: 95924 - RNA, 1575 nt, Artificial Sequence
  derived and/or modified CDS sequence (opt1) from glycoprotein__RABV__LC071941.1
augaucccccaggcccugcuguucgugccgcugcuggucuucagccucugcuucggcaaguuccccaucuacaccauccccgacaagcuggggcccugguccccgaucgacauccaccaccugagcugccccaacaaccucgugguggaggacgagggcugcaccaaccuguccggguucagcuacauggagcugaaggucggcuacaucuccgccaucaaggugaacggguucacgugcaccggcguggucaccgaggcggagaccuacacgaacuucgugggcuacgugaccaccaccuucaagcgcaagcacuuccggcccacgcccgacgccugccgcgccgccuacaacuggaagauggccggggacccgcgguacgaggagagccuccacaaccccuaccccgacuaccacuggcugcgcaccgucaagaccaccaaggagucccuggugaucaucagccccuccgugagcgaccucgaccuguacgacaagucccugcacagccgggucuucccguccggcaagugcagcgggaucacgguguccagcaccuacugccccaccaaccacgacuacaccaucuggaugcccgagaacccccgccucggcacguccugcgacaucuucaccaccagccgggggaagcgcgcguccaagggcggcaagaccugcggguucguggacgagcggggccuguacaagagccugaagggggccugcaagcucaagcugugcggcguccugggccuccgccugauggacgggacgugggccgccauccagaccagcgacgaggcgaaguggugcccgcccgaccagcuggugaacauccacgacuuccgguccgacgagaucgagcaccucguggucgaggagcuggugaagaagcgcgaggagugccuggacgcccucgagagcaucaugaccaccaaguccgugagcuuccggcgccugucccaccuccggaagcucguccccggcuucgggaaggccuacacgaucuucaacaagacccugauggaggccgacgcccacuacaagagcgugcgcaccuggaacgagaucauccccuccaagggcugccugcgggucgggggccgcugccacccgcacgugaacggcguguucuucaacgggaucauccucggccccgacgggcacguccugauccccgagaugcagagcucccugcuccagcagcacauggagcugcuggagagcuccgugaucccccucaugcacccgcuggcggaccccagcaccguguucaaggacgacgacgaggccgaggacuucgucgaggugcaccuccccgacgugcacaagcaggucuccggcguggaccuggggcugcccagcuggggcaaguacgugcugauguccgucggcgccaugaucgcccucaugcugaugaucuuccugacgaccugcugccggaaggccaacggggcggagagcacccagcaccgccucggcgagaccgggcggaagguguccgugacgagccaguccggccgcgucaucagcagcugggaguccuacaagagcgggggcgagaccaagcuguga

SEQ ID NO: 95925 - RNA, 1575 nt, Artificial Sequence
  derived and/or modified CDS sequence (opt1) from glycoprotein__RABV__LC071943.1
augaucccccaggcccugcuguucgugccgcugcuggucuucagccucugcuucggcaaguuccccaucuacaccauccccgacaagcuggggcccugguccccgaucgacauccaccaccugagcugccccaacaaccucgugguggaggacgagggcugcaccaaccuguccggguucagcuacauggagcugaaggucggcuacaucuccgccaucaaggugaacggguucacgugcaccggcguggucaccgaggcggagaccuacacgaacuucgugggcuacgugaccaccaccuucaagcgcaagcacuuccggcccacgcccgacgccugcggggccgccuacaacuggaagauggccggcgacccgcgcuacgaggagagccuccacaaccccuaccccgacuaccacuggcugcggaccgucaagaccaccaaggagucccuggugaucaucagccccuccgugagcgaccucgacccguacgacaagucccugcacagccgcgucuuccccuccgggaagugcagcggcaucacgguguccagcaccuacugccccaccaaccacgacuacaccaucuggaugcccgagaacccgcggcuggggacguccugcgacaucuucaccaccagccgcggcaagcgggcguccaagggcgggaagaccugcggcuucguggacgagcgcgggcucuacaagagccugaagggcgccugcaagcugaagcucugcggcguccuggggcugcggcucauggacggcacgugggccgccauccagaccagcgacgaggcgaaguggugcccgcccgaccagcuggugaacauccacgacuuccgcuccgacgagaucgagcaccugguggucgaggagcucgugaagaagcgggaggagugccuggacgcccuggagagcaucaugaccaccaaguccgugagcuuccgccggcucucccaccuccgcaagcugguccccggguucggcaaggccuacacgaucuucaacaagacccucauggaggccgacgcccacuacaagagcgugcacaccuggaacgagaucauccccuccaaggggugccugcgggugggcggccgcugccacccccacgucaacgggguguucuucaacggcaucauccuggggcccgacggccacguccucauccccgagaugcagagcucccugcugcagcagcacauggagcuccuggagagcuccgugaucccgcugaugcacccccucgcggaccccagcaccguguucaaggacgacgacgaggccgaggacuucgucgaggugcaccuccccgacgugcacaagcaggucuccgggguggaccugggccugccgagcuggggcaaguacgugcugauguccgucggggccaugaucgcccugaugcucaugaucuuccugacgaccugcugccggaaggccaacggcgcggagagcacccagcaccgccugggggagaccggccggaagguguccgugacgagccaguccgggcgcgucaucagcagcugggaguccuacaagagcggcggcgagaccaagcucuga

SEQ ID NO: 95926 - RNA, 1575 nt, Artificial Sequence
  derived and/or modified CDS sequence (opt1) from glycoprotein__RABV__LC071944.1
augaucccccaggcccugcuguucgugccgcugcuggucuucagccucugcuucggcaaguuccccaucuacaccauccccgacaagcuggggcccugguccccgaucgacauccaccaccugagcugccccaacaaccucgugguggaggacgagggcugcaccaaccuguccggguucagcuacauggagcugaaggucggcuacaucuccgccaucaaggugaacggguucacgugcaccggcguggucaccgaggcggagaccuacacgaacuucgugggcuacgugaccaccaccuucaagcgcaagcacuuccggcccacgcccgacgccugccgcgccgccuacaacuggaagauggccggggacccgcgguacgaggucagccuccacaaccccuaccccgacuaccacuggcugcgcaccgugaagaccaccaaggagucccuggugaucaucagccccuccgucagcgaccucgacccguacgacaagucccugcacagccggguguuccccuccggcaagugcagcgggaucacgguguccagcaccuacugccccaccaaccacgacuacaccaucuggaugcccgagaacccgcgccugggcacguccugcgacaucuucaccaccagccgggggaagcgcgcguccaagggcggcaagaccugcggguucgucgacgagcggggccucuacaagagccugaagggggccugcaagcugaagcucugcggcgugcugggccugcgccucauggacgggacgugggccgccauccagaccagcgacgaggcgaaguggugcccgcccgaccagcuggugaacauccacgacuuccgguccgacgagaucgagcaccuggucguggaggagcucgugaagaagcgcgaggagugccuggacgcccuggagagcaucaugaccaccaaguccgucagcuuccggcgccucucccaccuccggaagcuggugcccggcuucgggaaggccuacacgaucuucaacaagacccucauggaggccgacgcccacuacaagagcgugcgcaccuggaacgagaucauccccuccaagggcugccugcgggucgggggccgcugccacccccacgugaacggcgucuucuucaacgggaucauccugggccccgacgggcacgugcucauccccgagaugcagagcucccugcugcagcagcacauggagcuccuggagagcuccgugaucccgcugaugcacccccucgcggaccccagcaccgucuucaaggacgacgacgaggccgaggacuucguggaggugcaccuccccgacguccacaagcaggucuccggcguggaccuggggcugccgagcuggggcaaguacgugcugauguccgugggcgccaugaucgcccugaugcucaugaucuuccugacgaccugcugccggaaggccaacggggcggagagcacccagcaccgccugggcgagaccgggcggaagguguccgucacgagccaguccggccgcgugaucagcagcugggaguccuacaagagcgggggcgagaccaagcucuga

SEQ ID NO: 95927 - RNA, 1575 nt, Artificial Sequence
  derived and/or modified CDS sequence (opt1) from glycoprotein__RABV__LC071945.1
augaucccccaggcccugcuguucgugagccugcuggucuucucccucugcuucggcaaguucccgaucuacaccauccccgacaagcuggggcccuggagccccaucgacauccaccaccuguccugcccgaacaaccucgugguggaggacgagggcugcaccaaccugagcggguucuccuacauggagcugaaggucggcuacaucagcgccaucaaggugaacggguucacgugcaccggcguggucaccgaggcggagaccuacacgaacuucgugggcuacgugaccaccaccuucaagcgcaagcacuuccggcccacgcccgacgccugccgcgccgccuacaacuggaagauggccggggacccccgguacgaggagucccuccacaacccguaccccgacuaccacuggcugcgcaccgucaagaccaccaaggagagccuggugaucaucucccccagcguguccgaccucgaccccuacgacaagagccugcacucccggguccugccgggcgggaagugcagcggcaucacgguguccagcaccuacugccccaccaaccacgacuacaccaucuggaugcccgagaacccccgccucgggacguccugcgacaucuucaccaccagccggggcaagcgcgcguccaagggcgggaagaccugcggcuucguggacgagcgggggcuguacaagagccugaagggcgccugcaagcucaagcugugcggcguccuggggcuccgccugauggacggcacgugggccgccauccagaccagcgacgaggcgaaguggugcccgcccgaccagcuggugaacauccacgacuuccgguccgacgagaucgagcaccucguggucgaggagcuggugaagaagcgcgaggagugccuggacgcccucgagagcaucaugaccaccaaguccgugagcuuccggcgccugucccaccuccggaagcucguccccggguucggcaaggccuacacgaucuucaacaagacccugauggaggccgacgcccacuacaagagcgugcgcaccuggaacgagaucauccccuccaaggggugccugcgggugggcggccgcugccacccgcacgucaacgggguguucuucaacggcaucauccucgggcccgacggccacguccugauccccgagaugcagagcucccugcuccagcagcacauggagcugcuggagagcuccgugaucccccucaugcacccgcuggcggaccccagcaccguguucaaggacgacgacgaggccgaggacuucgucgaggugcaccuccccgacgugcacaagcaggucuccgggguggaccugggccugcccagcuggggcaaguacgugcugauguccgucggggccaugaucgcccucaugcugaugaucuuccugacgaccugcugccggaaggccaacggcgcggagagcacccagcaccgccucggggagaccggccggaagguguccgugacgagccaguccgggcgcgucaucagcagcugggaguccuacaagagcggcggcgagaccaagcuguga

SEQ ID NO: 95928 - RNA, 1575 nt, Artificial Sequence
  derived and/or modified CDS sequence (opt1) from glycoprotein__RABV__LC071946.1
augaucccccaggcccugcuguucgugccgcugcuggucuucagccucugcuucggcaaguuccccaucuacaccauccccgacaagcuggggcccugguccccgaucgacauccaccaccugagcugccccaacaaccucgugguggaggacgagggcugcaccaaccuguccggguucagcuacauggagcugaaggucggcuacaucuccgccaucaaggugaacggguucacgugcaccggcguggucaccgaggcggagaccuacacgaacuucgugggcuacgugaccaccaccuucaagcgcaagcacuuccggcccacgcccgacgccugccgcgccgccuacaacuggaagauggccggggacccgcgguacgaggagagccuccacaaccccuaccccgacuaccacuggcugcgcaccgucaagaccaccaaggagucccuggugaucaucagccccuccgugagcgaccucgacccguacgacaagucccugcacagccgggucuuccccggcgggaagugcuccggcaucacggugagcuccaccuacugccccaccaaccacgacuacaccaucuggaugcccgagaacccgcgccuggggacgagcugcgacaucuucaccaccucccggggcaagcgcgcgagcaagggcgggaagaccugcggcuucguggacgagcgggggcucuacaagucccugaagggcgccugcaagcugaagcucugcggcguccuggggcugcgccucauggacggcacgugggccgccauccagaccagcgacgaggcgaaguggugcccgcccgaccagcuggugaacauccacgacuuccggagcgacgagaucgagcaccugguggucgaggagcucgugaagaagcgcgaggagugccuggacgcccuggaguccaucaugaccaccaagagcguguccuuccggcgccucagccaccuccggaagcugguccccggguucggcaaggccuacacgaucuucaacaagacccucauggaggccgacgcccacuacaaguccgugcgcaccuggaacgagaucauccccagcaaggggugccugcgggugggcggccgcugccacccccacgucaacgggguguucuucaacggcaucauccuggggcccgacggccacguccucauccccgagaugcaguccagccugcugcagcagcacauggagcuccuggaguccagcgugaucccgcugaugcacccccucgcggaccccuccaccguguucaaggacgacgacgaggccgaggacuucgucgaggugcaccuccccgacgugcacaagcaggucagcgggguggaccugggccugccguccuggggcaagcacgugcugaugagcgucggggccaugaucgcccugaugcucaugaucuuccugacgaccugcugccggaaggccaacggcgcggaguccacccagcaccgccugggggagaccggccggaaggugagcgugacgucccagagcgggcgcgucaucuccagcugggagagcuacaaguccggcggcgagaccaagcucuga

SEQ ID NO: 95929 - RNA, 1575 nt, Artificial Sequence
  derived and/or modified CDS sequence (opt1) from glycoprotein__RABV__LC071947.1
augaucccccaggcccugcuguucgugccgcugcuggucuucagccucugcuucggcaaguuccccaucuacaccauccccgacaagcuggggcccugguccccgaucgacauccaccaccugagcugccccaacaaccucgugguggaggacgagggcugcaccaaccuguccggguucagcuacauggagcugaaggucggcuacaucuccgccaucaaggugaacggguucacgugcaccggcguggucaccgaggcggagaccuacacgaacuucgugggcuacgugaccaccaccuucaagcgcaagcacuuccggcccacgcccgacgccugccgcgccgccuacaacuggaagauggccggggacccgcgguacgaggagagccuccacaaccccuaccccgacuaccacuggcugcgcaccgucaagaccaccaaggagucccuggugaucaucagccccuccgugagcgaccucgacccguacgacaagucccugcacagccgggucuuccccuccggcaagugcagcgggaucacgguguccagcaccuacugccccaccaaccacgacuacaccaucuggaugcccgagaacccgcgccugggcacguccugcgacaucuucaccaccagccgggggaagcgcgcguccaagggcggcaagaccugcggguucguggacgagcggggccucuacaagagccugaagggggccugcaagcugaagcucugcggcguccugggccugcgccucauggacgggacgugggccgccauccagaccagcgacgaggcgaaguggugcccgcccgaccagcuggugaacauccacgacuuccgguccgacgagaucgagcaccugguggucgaggagcucgugaagaagcgcgaggagugccuggacgcccuggagagcaucaugaccaccaaguccgugagcuuccggcgccucucccaccuccggaagcugguccccggcuucgggaaggccuacacgaucuucaacaagacccucauggaggccgacgcccacuacaagagcgugcgcaccuggaacgagaucauccccuccaagggcugccugcgggucgggggccgcugccacccccacgugaacggcguguucuucaacgggaucauccugggccccgacgggcacguccucauccccgagaugcagagcucccugcugcagcagcacauggagcuccuggagagcuccgugaucccgcugaugcacccccucgcggaccccagcaccguguucaaggacgacgacgaggccgaggacuucgucgaggugcaccuccccgacgugcacaagcaggucuccggcguggaccuggggcugccgagcuggggcaaguacgugcugauguccgucggcgccaugaucgcccugaugcucaugaucuuccugacgaccugcugccggaaggccaacggggcggagagcacccagcaccgccugggcgagaccgggcggaagguguccgugacgagccaguccggccgcgucaucagcagcugggaguccuacaagagcgggggcgagaccaagcucuga

SEQ ID NO: 95930 - RNA, 1575 nt, Artificial Sequence
  derived and/or modified CDS sequence (opt1) from glycoprotein__RABV__LC071948.1
augaucccccaggcccugcuguucgugccgcugcuggucuucagccucugcuucggcaaguuccccaucuacaccauccccgacaagcuggggcccugguccccgaucgacauccaccaccugagcugccccaacaaccucgugguggaggacgagggcugcaccaaccuguccggguucagcuacauggagcugaaggucggcuacaucuccgccaucaaggugaacggguucacgugcaccggcguggucaccgaggcggagaccuacacgaacuucgugggcuacgugaccaccaccuucaagcgcaagcacuuccggcccacgcccgacgccugccgcgccgccuacaacuggaagauggccggggacccgcgguacgaggagagccuccacaaccccuaccccgacuaccacuggcugcgcaccgucaagaccaccaaggagucccuggugaucaucagccccuccgugagcgaccucgacccguacgacaagucccugcacagccgggucuuccccuccggcaagugcagcgggaucacgguguccagcaccuacugccccaccaaccacgacuacaccaucuggaugcccgagaacccgcgccugggcacguccugcgacaucuucaccaccagccgggggaagcgcgcguccaagggcggcaagaccugcggguucguggacgagcggggccucuacaagagccugaagggggccugcaagcugaagcucugcggcguccugggccugcgccucauggacgggacgugggccgccauccagaccagcgacgaggcgaaguggugcccgcccgaccagcuggugaacauccacgacuuccgguccgacgagaucgagcaccugguggucgaggagcucgugaagaagcgcgaggagugccuggacgcccuggagagcaucaugaccaccaaguccgugagcuuccggcgccucucccaccuccggaagcugguccccggcuucgggaaggccuacacgaucuucaacaagacccucauggaggccgacgcccacuacaagagcgugcgcaccuggaacgagaucauccccuccaagggcugccugcgggucgggggccgcugccacccccacgugaacggcguguucuucaacgggaucauccugggccccgacgggcacguccucauccccgagaugcagagcucccugcugcagcagcacauggagcuccuggagagcuccgugaucccgcugaugcacccccucgcggaccccagcaccguguucaaggacgacgacgaggccgaggacuucgucgaggugcaccuccccgacgugcacaagcaggucuccggcguggaccuggggcugccgagcuggggcaaguacgugcugauguccgucggcgccaugaucgcccugaugcucaugaucuuccugaugacgugcugccggaaggccaacggggcggagagcacccagcaccgccugggcgagaccgggcggaagguguccgugaccagccaguccggccgcgucaucagcagcugggaguccuacaagagcgggggcgagacgaagcucuga

SEQ ID NO: 95931 - RNA, 1575 nt, Artificial Sequence; identical to SEQ ID NO: 95929
  derived and/or modified CDS sequence (opt1) from glycoprotein__RABV__LC071949.1

SEQ ID NO: 95932 - RNA, 1575 nt, Artificial Sequence
  derived and/or modified CDS sequence (opt1) from glycoprotein__RABV__LC071950.1
augaucccccaggcccugcuguucgugccgcugcuggucuucagccucugcuucggcaaguuccccaucuacaccauccccgacaagcuggggcccugguccccgaucgacauccaccaccugagcugccccaacaaccucgugguggaggacgagggcugcaccucccugagcggguucuccuacauggagcugaaggucggcuacaucagcgccaucaaggugaacggguucacgugcaccggcguggucaccgaggcggagaccuacacgaacuucgugggcuacgugaccaccaccuucaagcgcaagcacuuccggcccacgcccgacgccugccgcgccgccuacaacuggaagauggccggggacccgcgguacgaggagucccuccacaaccccuaccccgacuaccacuggcugcgcaccgucaagaccaccaaggagagccuggugaucaucucccccagcguguccgaccucgacccguacgacaagagccugcacucccgggucuuccccagcggcaagugcuccgggaucacggugagcuccaccuacugccccaccaaccacgacuacaccaucuggaugcccgagaagccgcgccugggcacgagcugcgacaucuucaccaccucccgggggaagcgcgcgagcaagggcggcaagaccugcggguucguggacgagcggggccucuacaagagccugaagggggccugcaagcugaagcucugcggcguccugggccugcgccucauggacgggacgugggccgccauccagaccuccgacgaggcgaaguggugcccgcccgaccagcuggugaacauccacgacuuccggagcgacgagaucgagcaccugguggucgaggagcucgugaagaagcgcgaggagugccuggacgcccuggaguccaucaugaccaccaagagcguguccuuccggcgccucagccaccuccggaagcugguccccggcuucgggaaggccuacacgaucuucaacaagacccucauggaggccgacgcccacuacaaguccgugcgcaccuggaacgagaucauccccagcaagggcugccugcgggucgggggccgcugccacccccacgugaacggcguguucuucaacgggaucauccugggccccgacgggcacguccucauccccgagaugcaguccagccugcugcagcagcacauggagcuccuggaguccagcgugaucccgcugaugcacccccucgcggaccccuccaccguguucaaggacgacgacgaggccgaggacuucgucgaggugcaccuccccgacgugcacaagcaggucagcggcguggaccuggggcugccguccuggggcaaguacgugcugaugagcgucggcgccaugaucgcccugaugcucaugaucuuccugacgaccugcugccggaaggccaacggggcggaguccacccagcaccgccugggcgagaccgggcggaaggugagcgugacgucccagagcggccgcgucaucagcuccugggagagcuacaaguccgggggcgagaccaagcucuga

SEQ ID NO: 95933 - RNA, 1575 nt, Artificial Sequence
  derived and/or modified CDS sequence (opt1) from glycoprotein__RABV__LC071951.1
augaucccccaggcccugcuguucgugccgcugcuggucuucagccucugcuucggcaaguuccccaucuacaccauccccgacaagcuggggcccugguccccgaucgacauccaccaccugagcugccccaacaaccucgugguggaggacgagggcugcaccaaccuguccggguucagcuacauggagcugaaggucggcuacaucuccgccaucaaggugaacggguucacgugcaccggcguggucaccgaggcggagaccuacacgaacuucgugggcuacgugaccaccaccuucaagcgcaagcacuuccggcccacgcccgacgccugccgcgccgccuacaacuggaagauggccggggacccgcgguacgaggagagccuccacaaccccuaccccgacuaccacuggcugcgcaccgucaagaccaccaaggagucccuggugaucaucagccccuccgugagcgaccucgacccguacgacaagucccugcacagccgggucuuccccuccggcaagugcagcgggaucacgguguccagcaccuacugccccaccaaccacgacuacaccaucuggaugcccgagaacccgcgccugggcacguccugcgacaucuucaccaccagccgggggaagcgcgcguccaagggcggcaagaccugcggguucguggacgagcggggccucuacaagagccugaagggggccugcaagcugaagcucugcggcguccugggccugcgccucauggacgggacgugggccgccauccagaccagcgacgaggcgaaguggugcccgcccgaccagcuggugaacauccacgacuuccgguccgacgagaucgagcaccugguggucgaggagcucgugaagaagcgcgaggagugccuggacgcccuggagagcaucaugaccaccaaguccgugagcuuccggcgccucucccaccuccggcgccugguccccggcuucgggaaggccuacacgaucuucaacaagacccucauggaggccgacgcccacuacaagagcgugcggaccuggaacgagaucauccccuccaagggcugccugcgcgucgggggccggugccacccccacgugaacggcguguucuucaacgggaucauccugggccccgacgggcacguccucauccccgagaugcagagcucccugcugcagcagcacauggagcuccuggagagcuccgugaucccgcugaugcacccccucgcggaccccagcaccguguucaaggacgacgacgaggccgaggacuucgucgaggugcaccuccccgacgugcacaagcaggucuccggcguggaccuggggcugccgagcuggggcaaguacgugcugauguccgucggcgccaugaucgcccugaugcucaugaucuuccugacgaccugcugccgcaaggccaacggggcggagagcacccagcaccggcugggcgagaccgggcgcaagguguccgugacgagccaguccggccgcgucaucagcagcugggaguccuacaagagcgggggcgagaccaagcucuga

SEQ ID NO: 95934 - RNA, 1575 nt, Artificial Sequence; identical to SEQ ID NO: 95929
  derived and/or modified CDS sequence (opt1) from glycoprotein__RABV__LC071952.1

SEQ ID NO: 95935 - RNA, 1575 nt, Artificial Sequence
  derived and/or modified CDS sequence (opt1) from glycoprotein__RABV__LC071953.1
augaucccccaggcccugcuguucgugccgcugcuggucuucagccucugcuucggcaaguuccccaucuacaccauccccgacaagcuggggcccugguccccgaucgacauccaccaccugagcugccccaacaaccucgugguggaggacgagggcugcaccaaccuguccggguucagcuacauggagcugaaggucggcuacaucuccgccaucaaggugaacggguucacgugcaccggcguggucaccgaggcggagaccuacacgaacuucgugggcuacgugaccaccaccuucaagcgcaagcacuuccggcccacgcccgacgccugccgcgccgccuacaacuggaagauggccggggacccgcgguacgaggagagccuccacaaccccuaccccgacuaccacuggcugcgcaccgucaagaccaccaaggagucccuggugaucaucagccccuccgugagcgaccucgacccguacgacaagucccugcacagccgggucuuccccuccggcaagugcagcgggaucacgguguccagcaccuacugccccaccaaccacgacuacaccaucuggaugcccgagaacccgcgccugggcacguccugcgacaucuucaccaccagccgggggaagcgcgcguccaagggcggcaagaccugcggguucguggacgagcggggccucuacaagagccugaagggggccugcaagcugaagcucugcggcguccugggccugcgccucauggacgggacgugggccgccauccagaccagcgacgaggcgaaguggugcccgcccgaccagcuggugaacauccacgacuuccgguccgacgagaucgagcaccugguggucgaggagcucgugaagaagcgcgaggagugccuggacgcccuggagagcaucaugaccaccaaguccgugagcuuccggcgccucucccaccuccggaagcugguccccggcuucgggaaggccuacacgaucuucaacaagacccucauggaggccgacgcccacuacaagagcgugcgcaccuggaacgagaucauccccuccaagggcugccugcgggucgggggccgcugccacccccacgugaacggcguguucuucaacgggaucauccugggccccgacgggcacguccucauccccgagaugcagagcucccugcugcagcagcacauggagcuccuggagagcuccgugaucccgcugaugcacccccucgcggaccccagcaccguguucaaggacgacgacgaggccgaggacuucgucgaggugcaccuccccgacgugcacaagcaggucuccggcguggaccuggggcugccgagcuggggcaaguacgugcugauguccgucggcgccaugaucgcccugacgcucaugaucuuccugacgaccugcugccggaaggccaacggggcggagagcacccagcaccgccugggcgagaccgggcggaagguguccgugaccagccaguccggccgcgucaucagcagcugggaguccuacaagagcgggggcgagaccaagcucuga

SEQ ID NO: 95936 - RNA, 1575 nt, Artificial Sequence
  derived and/or modified CDS sequence (opt1) from glycoprotein__RABV__LC071954.1
augaucccccaggcccugcuguucgugccgcugcuggucuucagccucugcuucggcaaguuccccaucuacaccauccccgacaagcuggggcccugguccccgaucgacauccaccaccugagcugccccaacaaccucgugguggaggacgagggcugcaccaaccuguccggguucagcuacauggagcugaaggucggcuacaucuccgccaucaaggugaacggguucacgugcaccggcguggucgcggaggccgagaccuacaccaacuucgugggcuacgugacgaccaccuucaagcgcaagcacuuccggcccacccccgacgccugccgcgccgccuacaacuggaagauggcgggggacccgcgguacgaggagagccuccacaaccccuaccccgacuaccacuggcugcgcacggucaagaccaccaaggagucccuggugaucaucagccccuccgugagcgaccucgacccguacgacaagucccugcacagccgggucuuccccuccggcaagugcagcgggaucaccguguccagcacguacugccccaccaaccacgacuacaccaucuggaugcccgagaacccgcgccugggcaccuccugcgacaucuucacgaccagccgggggaagcgcgccuccaagggcggcaagaccugcggguucguggacgagcggggccucuacaagagccugaagggggccugcaagcugaagcucugcggcguccugggccugcgccucauggacgggaccugggccgcgauccagacgagcgacgaggccaaguggugcccgcccgaccagcuggugaacauccacgacuuccgguccgacgagaucgagcaccugguggucgaggagcucgugaagaagcgcgaggagugccuggacgcccuggagagcaucaugaccaccaaguccgugagcuuccggcgccucucccaccuccggaaguucguccccggcuucgggaaggccuacaccaucuucaacaagacgcugauggaggccgacgcgcacuacaagagcgugcgcaccuggaacgagaucauccccuccaagggcugccuccgggucgggggccgcugccacccccacgugaacggcguguucuucaacgggaucauccugggccccgacgggcacguccugauccccgagaugcagagcucccuccugcagcagcacauggagcugcucgagagcuccgugaucccgcugaugcacccccuggccgaccccagcaccguguucaaggacgacgacgaggccgaggacuucgucgaggugcaccuccccgacgugcacaagcaggucuccggcguggaccuggggcugccgagcuggggcaaguacgugcucauguccgucggcgccaugaucgcccugaugcugaugaucuuccucaccacgugcugccggaaggcgaacggggccgagagcacccagcaccgccugggcgagaccgggcggaagguguccgugaccagccaguccggccgcgucaucagcagcugggaguccuacaagagcgggggcgagacgaagcuguga

SEQ ID NO: 95937 - RNA, 1575 nt, Artificial Sequence
  derived and/or modified CDS sequence (opt1) from glycoprotein__RABV__LC071955.1
augaucccccaggcccugcuguucgugccgcugcuggucuucagccucugcuucggcaaguuccccaucuacaccauccccgacaagcuggggcccugguccccgaucgacauccaccaccugagcugccccaacaaccucgugguggaggacgagggcugcaccaaccuguccggguucagcuacauggagcugaaggucggcuacaucuccgccaucaaggugaacggguucacgugcaccggcguggucaccgaggcggagaccuacacgaacuucgugggcuacgugaccaccaccuucaagcgcaagcacuuccggcccacgcccgacgccugccgcgccgccuacaacuggaagauggccggggacccgcgguacgaggagagccuccacaaccccuaccccgacuaccacuggcugcgcaccgucaagaccaccaaggagucccuggugaucaucagccccuccgugagcgaccucgacccguacgacaagucccugcacagccgggucuuccccuccggcaagugcagcgggaucacgguguccagcaccuacugccccaccaaccacgacuacaccaucuggaugcccgagaacccgcgccugggcacguccugcgacaucuucaccaccagccgggggaagcgcgcguccaagggcggcaagaccugcggguucguggacgagcggggccucuacaagagccugaagggggccugcaagcugaagcucugcggcguccugggccugcgccucauggacgggacgugggccgccauccagaccagcgacgaggcgaaguggugcccgcccgaccagcuggugaacauccacgacuuccgguccgacgagaucgagcaccugguggucgaggagcucgugaagaagcgcgaggagugccuggacgcccuggagcccaucaugaccaccaagagcguguccuuccggcgccucagccaccuccggaagcugguccccggcuucgggaaggccuacacgaucuucaacaagacccucauggaggccgacgcccacuacaaguccgugcgcaccuggaacgagaucauccccagcaagggcugccugcgggucgggggccgcugccacccccacgugaacggcguguucuucaacgggaucauccugggccccgacgggcacguccucaucccggagaugcaguccagccugcugcagcagcacauggagcuccuggaguccagcgugaucccccugaugcacccccucgcggaccccuccaccguguucaaggacgacgacgaggccgaggacuucgucgaggugcaccucccggacgugcacaagcaggucagcggcguggaccuggggcugcccuccuggggcaaguacgugcugaugagcgucggcgccaugaucgcccugaugcucaugaucuuccugacgaccugcugccggaaggccaacggggcggaguccacccagcaccgccugggcgagaccgggcggaaggugagcgugacgucccagagcggccgcgucaucuccagcugggagagcuacaaguccgggggcgagaccaagcucuga

SEQ ID NO: 95938 - RNA, 1575 nt, Artificial Sequence
  derived and/or modified CDS sequence (opt1) from glycoprotein__RABV__LC071956.1
augaucccccaggcccugcuguucgugccgcugcuggucuucagccucugcuucggcaaguuccccaucuacaccauccccgacaagcuggggcccugguccccgaucgacauccaccaccugagcugccccaacaaccucgugguggaggacgagggcugcaccaaccuguccggguucagcuacauggagcugaaggucggcuacaucuccgccaucaaggugaacggguucacgugcaccggcguggucaccgaggcggagaccuacacgaacuucgugggcuacgugaccaccaccuucaagcgcaagcacuuccggcccacgcccgacgccugccgcgccgccuacaacuggaagauggccggggacccgcgguacgaggagagccuccacaaccccuaccccgacuaccacuggcugcgcaccgucaagaccaccaaggagucccuggugaucaucagccccuccgugagcgaccucgacccguacgacaagucccugcacagcaaggucuuccccuccggcaagugcagcgggaucacgguguccagcaccuacugccccaccaaccacgacuacaccaucuggaugcccgagaacccgcggcugggcacguccugcgacaucuucaccaccagccgcgggaagcgggcguccaagggcggcaagaccugcggguucguggacgagcgcggccucuacaagagccugaagggggccugcaagcugaugcucugcggcguccugggccugcggcucauggacgggacgugggccgccauccagaccagcgacgaggcgaaguggugcccgcccgaccagcuggugaacauccacgacuuccgcuccgacgagaucgagcaccugguggucgaggagcucgugaagaagcgggaggagugccuggacgcccuggagagcaucaugaccaccaaguccgugagcuuccgccggcucucccaccuccgcaagcugguccccggcuucgggaaggccuacacgaucuucaacaagacccucauggaggccgacgcccacuacaagagcgugcggaccuggaacgagaucauccccuccaagggcugccugcgcgucgggggccggugccacccccacgugaacggcguguucuucaacgggaucauccugggccccgacgggcacguccucauccccgagaugcagagcucccugcugcagcagcacauggagcuccuggagagcuccgugaucccgcugaugcacccccucgcggaccccagcaccguguucaaggacgacgacgaggccgaggacuucgucgaggugcaccuccccgacgugcacaagcaggucuccggcguggaccuggggcugccgagcuggggcaaguacgugcugauguccgucggcgccaugaucgcccugaugcucaugaucuuccugacgaccugcugccgcaaggccaacggggcggagagcacccagcaccggcugggcgagaccgggcgcaagguguccgugacgagccaguccggccgggucaucagcagcugggaguccuacaagagcgggggcgagaccaagcucuga

SEQ ID NO: 95939 - RNA, 1575 nt, Artificial Sequence; identical to SEQ ID NO: 95938
  derived and/or modified CDS sequence (opt1) from glycoprotein__RABV__LC071957.1

SEQ ID NO: 95940 - RNA, 1575 nt, Artificial Sequence
  derived and/or modified CDS sequence (opt1) from glycoprotein__RABV__LC071958.1
augaucccccaggcccuccuguucgugccgcugcuggucuucagcuccugcuucggcaaguuccccaucuacaccauccccgacaagcucgggcccuggagcccgaucgacauccaccaccuguccugccccaacaaccugguggugggcgacgaggggugcaccaaccucagcggcuucuccuacauggagcugaaggucggguacaucagcgccaucaaggugaacggcuucacgugcaccggcguggucaccgaggcggagaccuacacgaacuucgugggguacgugaccaccaccuucaagcgcaagcacuuccggcccacgcccgacgccugccgcgccgccuacaacuggaagauggccggcgacccgcgguacgaggagucccugcacaaccccuaccccgacuaccacuggcuccgcaccgucaagaccaccaaggagagccuggugaucaucucccccagcguguccgaccuggacccguacgacaagagccuccacucccgggucuuccccagcgggaagugcuccggcaucacggugagcuccaccuacugccccaccaaccacgacuacaccaucuggaugcccgagaacccgcgccuggggacgagcugcgacaucuucaccaccucccggggcaagcgcgcgagcaagggcgggaagaccugcggcuucguggacgagcgggggcuguacaagagccucaagggcgccugcaagcugaugcugugcggcguccucgggcugcgccugacggacggcaccugggccgccauccagaccuccgacgaggcgaaguggugcccgcccgaccagcucgugaacauccacgacuuccggagcgacgagaucgagcaccugguggucgaggagcuggugaagaagcgcgaggagugccucgacgcccuggaguccaucaugaccaccaagagcguguccuuccggcgccugagccaccuccggaagcugguccccggguucggcaaggccuacaccaucuucaacaagacccugauggaggccgacgcccacuacaaguccgugcgcaccuggaacgagaucauccccagcaaggggugccuccgggugggcggccgcugccacccccacgucaacgggguguucuucaacggcaucauccuggggcccgacggccacguccugauccccgagauccaguccagccuccugcagcagcacauggagcugcucgaguccagcgugaucccgcugaugcacccccuggcggaccccuccacgguguucaaggacgacgacgaggccgaggacuucgucgaggugcaccuccccgacgugcacaagcaggucagcgggguggaccugggccugccguccuggggcaaguacgugcucaugagcgucggggccaugaucgcccugaugcugaugaucuuccucacgaccugcugccggaaggccaacggcgcggaguccacccagcaccgccugggggagacgggccggaaggugagcgugaccucccagagcgggcgcgucaucagcuccugggagagcuacaaguccggcggcgagaccaagcuguga

SEQ ID NO: 95941 - RNA, 1575 nt, Artificial Sequence; identical to SEQ ID NO: 95929
  derived and/or modified CDS sequence (opt1) from glycoprotein__RABV__LC071959.1

SEQ ID NO: 95942 - RNA, 1575 nt, Artificial Sequence
  derived and/or modified CDS sequence (opt1) from glycoprotein__RABV__LC071960.1
augaucccccaggcccugcuguucgugccgcugcuggucuucagccucugcuucggcaaguuccccaucuacaccauccccgacaagcuggggcccugguccccgaucgacauccaccaccugagcugccccaacaaccucgugguggaggacgagggcugcaccaaccuguccggguucagcuacauggagcugaaggucggcuacaucuccgccaucaaggugaacggguucacgugcaccggcguggucaccgaggcggagaccuacacgaacuucgugggcuacgugaccaccaccuucaagcgcaagcacuuccggcccacgcccgacgccugccgcgccgccuacaacuggaagauggccggggacccgcgguacgaggagagccuccacaaccccuaccccgacuaccacuggcugcgcaccgucaagaccaccaaggagucccuggugaucaucagccccuccgugagcgaccucgacccguacgacaagucccugcacagccgggucuuccccuccggcaagugcagcgggaucacgguguccagcaccuacugccccaccaaccacgacuacaccaucuggaugcccgagaacccgcgccugggcacguccugcgacaucuucaccaccagccgggggaagcgcgcguccaagggcggcaagaccugcggguucguggacgagcggggccucuacaagagccugaagggggccugcaagcugaagcucugcggcguccugggccugcgccucauggacgggacguggggcgccauccagaccagcgacgaggccaaguggugcccgcccgaccagcuggugaacauccacgacuuccgguccgacgagaucgagcaccugguggucgaggagcucgugaagaagcgcgaggagugccuggacgcgcuggagagcaucaugaccaccaaguccgugagcuuccggcgccucucccaccuccggaagcugguccccggguucggcaaggccuacacgaucuucaacaagacccucauggaggccgacgcccacuacaagagcgugcgcaccuggaacgagaucauccccuccaaggggugccugcgggugggcggccgcugccacccccacgucaacgggguguucuucaacggcaucauccuggggcccgacggccacguccucauccccgagaugcagagcucccugcugcagcagcacauggagcuccuggagagcuccgugaucccgcugaugcacccccucgccgaccccagcaccguguucaaggacgacgacgaggcggaggacuucgccgagguccaccuccccgacgugcacaagcaggucuccgggguggaccugggccugccgagcuggggcaaguacgugcugauguccgugggggccaugaucgcccugaugcucaugaucuuccugacgaccugcugccggaaggccaacggcgcggagagcacccagcaccgccugggggagaccggccggaaggucuccgugacgagccaguccgggcgcgugaucagcagcugggaguccuacaagagcggcggcgagaccaagcucuga

SEQ ID NO: 95943 - RNA, 1575 nt, Artificial Sequence
  derived and/or modified CDS sequence (opt1) from glycoprotein__RABV__LC071961.1
augaucccccaggcccugcuguucgugccgcugcuggucuucagccucugcuucggcaaguuccccaucuacaccauccccgacaagcuggggcccugguccccgaucgacauccaccaccugagcugccccaacaaccucgugguggaggacgagggcugcaccaaccuguccggguucagcuacauggagcugaaggucggcuacaucuccgccaucaaggugaacggguucacgugcaccggcguggucaccgaggcggagaccuacacgaacuucgugggcuacgugaccaccaccuucaagcgcaagcacuuccggcccacgcccgacgccugccgcgccgccuacaacuggaagauggccggggacccgcgguacgaggagagccuccacaaccccuaccccgacuaccacuggcugcgcaccgucaagaccaccaaggagucccuggacaucaucagccccuccgugagcgaccucgacccguacgacaagucccugcacagccggguguuccccuccggcaagugcagcgggaucacggucuccagcaccuacugccccaccaaccacgacuacaccaucuggaugcccgagaacccgcgccugggcacguccugcgacaucuucaccaccagccgggggaagcgcgcguccaagggcggcaagaccugcggguucguggacgagcggggccucuacaagagccugaagggggccugcaagcugaagcucugcggcgugcugggccugcgccucauggacgggacgugggccgccauccagaccagcgacgaggcgaaguggugcccgcccgaccagcuggucaacauccacgacuuccgguccgacgagaucgagcaccuggugguggaggagcucgucaagaagcgcgaggagugccuggacgcccuggagagcaucaugaccaccaaguccgugagcuuccggcgccucucccaccuccggaagcuggugcccggcuucgggaaggccuacacgaucuucaacaagacccucauggaggccgacgcccacuacaagagcguccgcaccuggaacgagaucauccccuccaagggcugccugcgggucgggggccgcugccacccccacgugaacggcguguucuucaacgggaucauccugggccccgacgggcacgugcucauccccgagaugcagagcucccugcugcagcagcacauggagcuccuggagagcuccgucaucccgcugaugcacccccucgcggaccccagcaccguguucaaggacgacgacgaggccgaggacuucguggagguccaccuccccgacgugcacaagcaggucuccggcguggaccuggggcugccgagcuggggcaaguacgugcugauguccgugggcgccaugaucgcccugaugcucaugaucuuccugacgaccugcugccggaaggccaacggggcggagagcacccagcaccgccugggcgagaccgggcggaaggucuccgugacgagccaguccggccgcgugaucagcagcugggaguccuacaagagcgggggcgagaccaagcucuga

SEQ ID NO: 95944 - RNA, 1575 nt, Artificial Sequence; identical to SEQ ID NO: 95929
  derived and/or modified CDS sequence (opt1) from glycoprotein__RABV__LC071962.1

SEQ ID NO: 95945 - RNA, 1575 nt, Artificial Sequence; identical to SEQ ID NO: 95929
  derived and/or modified CDS sequence (opt1) from glycoprotein__RABV__LC071963.1

SEQ ID NO: 95946 - RNA, 1575 nt, Artificial Sequence
  derived and/or modified CDS sequence (opt1) from glycoprotein__RABV__LC071965.1
augaucccccaggcccugcuguucgugccgcugcuggucuucagccucugcuucggcaaguuccccaucuacaccauccccgacaagcuggggcccugguccccgaucgacauccaccaccugagcugccccaacaaccucgugguggaggacgagggcugcaccaaccuguccggguucagcuacauggagcugaaggucggcuacaucuccgccaucaaggugaacggguucacgugcaccggcguggucaccgaggcggagaccuacacgaacuucgugggcuacgugaccaccaccuucaagcgcaagcacuuccggcccacgcccgacgccugccgcgccgccuacaacuggaagauggccggggacccgcgguacgaggagagccuccacaaccccuaccccgacuaccacuggcugcgcaccgucaagaccaccaaggagucccuggugaucaucagccccuccgugagcgaccucgacccguacgacaagucccugcacagccgggucuuccccuccggcaagugcagcgggaucacgguguccagcaccuacugccccaccaaccacgacuacaccaucuggaugcccgagaacccgcgccugggcacguccugcgacaucuucaccaccagccgggggaagcgcgcguccaagggcggcaagaccugcggguucguggacgagcggggccucuacaagagccugaagggggccugcaagcugaagcucugcggcguccugggccugcgccucauggacgggacgugggccgccauccagaccagcgacgaggcgaaguggugcccgcccgaccagcuggugaacauccacgacuuccgguccgacgagaucgagcaccugguggucgaggagcucgugaagaagcgcgaggagugccuggacgcccuggagagcaucaugaccaccaaguccgugagcuuccggcgccucucccaccuccggaagcugguccccggcuucgggaaggccuacacgaucuucaacaagacccucauggaggccgacgcccacuacaagagcgugcgcaccuggaacgagaucauccccuccaagggcugccugcgggucgggggccgcugccacccccacgugaacggcguguucuucaacgggaucauccugggccccgacgggcacguccucauccccgagaugcagagcucccugcugcagcagcacauggagcuccuggagagcuccgugaucccgcugaugcacccccucgcggaccccagcaccguguucaaggacgacgacgaggccgaggacuucgucgaggugcaccuccccgacgugcacaagcaggucuccggcguggaccuggggcugccgagcuggggcaaguacgugcugauguccgucggcgccaugaucgcccugaugcucaugaucuuccugacgaugugcugccggaaggccaacggggcggagagcacccagcaccgccugggcgagaccgggcggaagguguccgugaccagccaguccggccgcgucaucagcagcugggaguccuacaagagcgggggcgagacgaagcucuga

SEQ ID NO: 95947 - RNA, 1575 nt, Artificial Sequence
  derived and/or modified CDS sequence (opt1) from glycoprotein__RABV__LC071966.1
augaucccccaggcccugcuguucgugccgcugcuggucuucagccucugcuucggcaaguuccccaucuacaccauccccgacaagcuggggcccugguccccgaucgacauccaccaccugagcugccccaacaaccucgugguggaggacgagggcugcaccaaccuguccggguucagcuacauggagcugaaggucggcuacaucuccgccaucaaggugaacggguucacgugcaccggcguggucaccgaggcggagaccuacacgaacuucgugggcuacgugaccaccaccuucaagcgcaagcacuuccggcccacgcccgacgccugcagcgccgccuacaacuggaagauggccggggacccgcgcuacgaggagucccuccacaaccccuaccccgacuaccacuggcugcggaccgucaagaccaccaaggagagccuggugaucaucucccccagcguguccgaccucgacccguacgacaagagccugcacucccgcgucuuccccagcggcaagugcuccgggaucacggugagcuccaccuacugccccaccaaccacgacuacaccaucuggaugcccgagaacccgcggcugggcacgagcugcgacaucuucaccaccucccgcgggaagcgggcgagcaagggcggcaagaccugcggguucgccgacgagcgcggccucuacaagagccugaagggggccugcaagcugaagcucugcggcgugcugggccugcggcucauggacgggacgugggccgcgauccagaccuccgacgaggccaaguggugcccgcccgaccagcuggucaacauccacgacuuccgcagcgacgagaucgagcaccuggugguggaggagcucgucaagaagcgggaggagugccuggacgcccuggaguccaucaugaccaccaagagcguguccuuccgccggcucagccaccuccgcaagcuggugcccggcuucgggaaggccuacacgaucuucaacaagacccucauggaggccgacgcgcacuacaaguccguccggaccuggaacgagaucauccccagcaagggcugccugcgcgucgggggccggugccacccccacgugaacggcguguucuucaacgggaucauccugggccccgacgggcacgugcucauccccgagaugcaguccagccugcugcagcagcacauggagcuccuggaguccagcgucaucccgcugaugcacccccucgccgaccccuccaccguguucaaggacgacgacgaggccgaggacuucguggagguccaccuccccgacgugcacaagcaggucagcggcguggaccuggggcugccguccuggggcaaguacgugcugaugagcgugggcgccaugaucgcccugaugcucaugaucuuccugacgaugugcugccgcaaggcgaacggggccgaguccacccagcaccggcugggcgagaccgggcgcaaggucagcgugaccucccagagcggccgggugaucagcuccugggagagcuacaaguccgggggcgagacgaagcucuga

SEQ ID NO: 95948 - RNA, 1575 nt, Artificial Sequence
  derived and/or modified CDS sequence (opt1) from glycoprotein__RABV__LC071967.1
augaucccccaggcccuccuguucgugccgcugcuggucuucagccucugcuucggcaaguuccccaucuacaccauccccgacaagcuggggcccugguccccgaucgacauccaccaccugagcugccccaacaaccucgugguggaggacgagggcugcaccaaccuguccggguucagcuacauggagcugaaggucggcuacaucuccgccaucaaggugaacggguucacgugcaccggcguggucaccgaggcggagaccuacacgaacuucgugggcuacgugaccaccaccuucaagcgcaagcacuuccggcccacgcccgacgccugccgcgccgccuacaacuggaagauggccggggacccgcgguacgaggagagccuccacaaccccuaccccgacuaccacuggcugcgcaccgucaagaccaccaaggagucccuggugaucaucagccccuccgugagcgaccucgacccguacgacaagucccugcacagccgggucuuccccuccggcaagugcagcgggaucacgguguccagcaccuacugccccaccaaccacgacuacaccaucuggaugcccgagaacccgcgccugggcacguccugcgacaucuucaccaccagccgggggaagcgcgcguccaagggcggcaagaccugcggguucguggacgagcggggccucuacaagagccugaagggggccugcaagcugaagcucugcggcguccugggccugcgccucauggacgggacgugggccgccauccagaccagcgacgaggcgaaguggugcccgcccgaccagcuggugaacauccacgacuuccgguccgacgagaucgagcaccugguggucgaggagcucgugaagaagcgcgaggagugccuggacgcccuggagagcaucaugaccaccaaguccgugagcuuccggcgcuucucccaccuccggaagcugguccccggcuucgggaaggccuacacgaucuucaacaagacccugauggaggccgacgcccacuacaagagcgugcgcaccuggaacgagaucauccccuccaagggcugccuccgggucgggggccgcugccacccccacgugaacggcguguucuucaacgggaucauccugggccccgacgggcacguccugauccccgagaugcagagcucccuccugcagcagcacauggagcugcucgagagcuccgugaucccgcugaugcacccccuggcggaccccagcaccguguucaaggacgacgacgaggccgaggacuucgucgaggugcaccuccccgacgugcacaagcaggucuccggcguggaccuggggcugccgagcuggggcaaguacgugcucauguccgucggcgccaugaucgcccugaugcugaugaucuuccucacgaugugcugccggaaggccaacggggcggagagcacccagcaccgccugggcgagaccgggcggaagguguccgugaccagccaguccggccgcgucaucagcagcugggaguccuacaagagcgggggcgagacgaagcuguga

SEQ ID NO: 95949 - RNA, 1575 nt, Artificial Sequence; identical to SEQ ID NO: 95946
  derived and/or modified CDS sequence (opt1) from glycoprotein__RABV__LC071968.1

SEQ ID NO: 95950 - RNA, 1575 nt, Artificial Sequence
  derived and/or modified CDS sequence (opt1) from glycoprotein__RABV__LC071969.1
augaucccccaggcccuccuguucgugccgcugcuggucuucagcuccugcuucggcaaguuccccaucugcaccauccccgacaagcucgggcccuggagcccgaucgacauccaccaccuguccugccccaacaaccuggugguggaggacgagggcugcaccaaccucagcggguucuccuacauggagcugaaggucggcuacaucagcgccaucaaggugaacggguucacgugcaccggcguggucaccgaggcggagaccuacacgaacuucgugggcuacgugaccaccaccuucaagcgcaagcacuuccggcccacgcccgacgccugccgcgccgccuacaacuggaagauggccggggacccgcgguacgaggagucccugcacaaccccuaccccgacuaccacuggcuccgcaccgucaagaccaccaaggagagccuggugaucaucucccccagcguguccgaccuggacccguacgacaagagccuccacucccgggucuuccccagcggcaagugcuccgggaucacggugagcuccaccuacugccccaccaaccacgacuacaccguguggaugcccgagaacccgcgccugggcacgagcugcgacaucuucaccaacucccgggggaagcgcgcgagcaagggcggcaagaccugcggguucgucgacgagcggggccuguacaagagccucaagggggccugcaagcugaagcugugcggcgugcucggccugcgccugauggacgggaccuggguggccauccagacguccgacgaggccaaguggugcccgcccgaccagcucgucaacauccacgacuuccggagcgacgagaucgagcaccuggugguggaggagcuggucaagaagcgcgaggagugccucgacgcgcuggaguccaucaugaccaccaagagcguguccuuccggcgccugagccaccuccggaagcuggugcccggcuucgggaaggccuacaccaucuucaacaagacgcugauggaggccgacgcccacuacaaguccguccgcaccuggaacgagaucauccccagcaagggcugccuccgggucgggggccgcugccacccccacgugaacggcguguucuucaacgggaucauccugggccccgacgggcacgugcugauccccgagaugcaguccagccuccugcagcagcacauggagcugcucgaguccagcgucaucccgcugaugcacccccuggccgaccccuccaccguguucaaggacggcgacgaggcggaggacuucguggagguccaccuccccgacgugcacaagcaggucagcgggguggaccugggccugccguccuggggcaaguacgugcucaugagcgugggggccaugaucgcccugaugcugaugaucuuccucaugaccugcugccggaaggccaacggcgccgagacgauccagcaccgccugggggagaccggccggaaggucuccgugaccagccaguccgggcgcgugaucagcagcugggaguccuacaagagcggcggcgagaccaagcuguga

SEQ ID NO: 95951 - RNA, 1575 nt, Artificial Sequence
  derived and/or modified CDS sequence (opt1) from glycoprotein__RABV__LC071970.1
augaucccccaggcccugcuguucgugccgcugcuggucuucagcuccugcuucggcaaguuccccaucuacaccauccccgacaagcucgggcccuggagcccgaucgacauccaccaccuguccugccccaacaaccuggugguggaggacgagggcugcaccaaccucagcggguucuccuacauggagcugaaggucggcuacaucagcgccaucaaggugaacggguucacgugcaccggcguggucaccgaggcggagaccuacacgaacuucgugggcuacgugaccaccaccuucaagcgcaagcacuuccggcccacgcccgacgccugccgcgccgccuacaacuggaagauggccggggacccgcgguacgaggagucccugcacaaccccuaccccgacuaccacuggcuccgcaccgucaagaccaccaaggagagccuggugaucaucucccccagcguguccgaccuggacccguacgacaagagcuuccacucccgggucuuccccagcggcaagugcuccgggaucacggugagcuccaccuacugccccaccaaccacgacuacaccaucuggaugcccgagaacccgcgccucggcacgagcugcgacaucuucaccaacucccgggggaagcgcgcgagcaagggcggcaagaccugcggguucguggacgagcggggccuguacaagagccugaagggggccugcaagcucaagcugugcggcguccugggccuccgccugauggacgggaccuggguggccauccagacguccgacgaggccaaguggugcccgcccgaccagcuggugaacauccacgacuuccggagcgacgagaucgagcaccucgucguggaggagcuggugaagaagcgcgaggagugccuggacgcgcucgaguccaucaugaccaccaagagcgucuccuuccggcgccugagccaccuccggaagcucgugcccggcuucgggaaggccuacaccaucuucaacaagacgcugauggaggccgacgcccacuacaaguccgugcgcaccuggaacgagaucauccccagcaagggcugccugcgggucgggggccgcugccacccccacgugaacggcgucuucuucaacgggaucauccucggccccgacgggcacgugcugauccccgagaugcaguccagccugcuccagcagcacauggagcugcuggaguccagcgugaucccgcucaugcacccccuggccgaccccuccaccgucuucaaggacggcgacgaggcggaggacuucguggaggugcaccuccccgacguccacaagcaggucagcgggguggaccugggccugccguccuggggcaaguacgugcugaugagcgugggggccaugaucgcccucaugcugaugaucuuccugaugaccugcugccggaaggccaacggcgccgagacgauccagcaccgccucggggagaccggccggaagguguccgucaccagccaguccgggcgcgugaucagcagcugggaguccuacaagagcggcggcgagaccaagcuguga

SEQ ID NO: 95952 - RNA, 1575 nt, Artificial Sequence
  derived and/or modified CDS sequence (opt1) from glycoprotein__RABV__LC071971.1
augaucccccaggcccuccuguucgugccgcugcuggucuucagcuccugcuucggcaaguuccccaucuacaccauccccgacaagcucgggcccuggagcccgaucgacauccaccaccuguccugccccaacaaccuggugguggaggacgagggcugcaccaaccucagcggguucuccuacauggagcugaaggucggcuacaucagcgccaucaaggugaacggguucacgugcaccggcguggucaccgaggcggagaccuacacgaacuucgugggcuacgugaccaccaccuucaagcgcaagcacuuccggcccacgcccgacgccugccgcgccgccuacaacuggaagauggccggggacccgcgguacgaggagucccugcacaaccccuaccccgacuaccacuggcuccgcaccgucaagaccaccaaggagagccuggugaucaucucccccagcguguccgaccuggacccguacgacaagagccuccacucccgggucuuccccagcggcaagugcuccgggaucacggugagcuccaccuacugccccaccaaccgcgacuacaccaucuggaugcccgagaacccgcggcugggcacgagcugcgacaucuucaccaacucccgcgggaagcgggcgagcaagggcggcaagaccugcggguucguggacgagcgcggccuguacaagagccucaagggggccugcaagcugaagcugugcggcguccucggccugcggcugauggacgggaccuggguggccauccagacguccgacgaggccaaguggugcccgcccgaccagcucgugaacauccacgacuuccgcagcgacgagaucgagcaccuggucguggaggagcuggugaagaagcgggaggagugccucgacgcgcuggaguccaucaugaccaccaagagcgucuccuuccgccggcugagccaccuccgcaagcuggugcccggcuucgggaaggccuacaccaucuucaacaagacgcugauggaggccgacgcccacuacaaguccgugcggaccuggaacgagaucauccccagcaagggcugccuccgcgucgggggccggugccacccccacgugaacggcgucuucuucaacgggaucauccugggccccgacgggcacgugcugauccccgagaugcaguccagccuccugcagcagcacauggagcugcucgaguccagcgugaucccgcugaugcacccccuggccgaccccuccaccgucuucaaggacggcgacgaggcggaggacuucguggaggugcaccuccccgacguccacaagcaggucagcgggguggaccugggccugccguccuggggcaaguacgugcucaugagcgugggggccaugaucgcccugaugcugaugaucuuccucaugaccugcugccgcaaggccaacggcgccgagacgauccagcaccggcugggggagaccggccgcaagguguccgucaccagccaguccgggcgcgugaucagcagcugggaguccuacaagagcggcggcgagaccaagcuguga

SEQ ID NO: 95953 - RNA, 1575 nt, Artificial Sequence; identical to SEQ ID NO: 95052
  derived and/or modified CDS sequence (opt1) from glycoprotein__RABV__LC071972.1

SEQ ID NO: 95954 - RNA, 1575 nt, Artificial Sequence
  derived and/or modified CDS sequence (opt1) from glycoprotein__RABV__LC071973.1
augaucccccaggcccuccuguucgugccgcugcuggucuucagcuccugcuucggcaaguuccccaucuacaccauccccgacaagcucgggcccuggagcccgaucgacauccaccaccuguccugccccaacaaccuggugguggaggacgagggcugcaccaaccucagcggguucuccuacauggagcugaaggucggcuacaucagcgccaucaaggugaacggguucacgugcaccggcguggucaccgaggcggagaccuacacgaacuucgugggcuacgugaccaccaccuucaagcgcaagcacuuccggcccacgcccgacgccugccgcgccgccuacaacuggaagauggccggggacccgcgguacgaggagucccugcacaaccccuaccccgacuaccacuggcuccgcaccgucaagaccaccaaggagagccuggugaucaucucccccagcguguccgaccuggacccguacgacaagagccuccacucccgggucuuccccagcggcaagugcuccgggaucacggugagcuccaccuacugccccaccaaccacgacuacaccaucuggaugcccgagaacccgcgccugggcacgagcugcgacaucuucaccaacucccgggggaagcgcgcgagcaagggcggcaagaccugcggguucguggacgagcggggccuguacaagagccucaagggggccugcaagcugaagcugugcggcguccucggccugcgccugauggacgggaccuggguggccauccagacguccgacgaggccaaguggugcccgcccgaccagcucgugaacauccacgacuuccggagcgacgagaucgagcaccuggucguggaggagcuggugaagaagcgcgaggagugccucgacgcgcuggaguccaucaugaccaccaagagcgucuccuuccggcgccugagccaccuccggaagcuggugcccggcuucgggaaggccuacaccaucuucaacaagacgcugauggaggccgacgcccacuacaaguccgugcgcaccuggaacgagaucauccccagcaagggcugccuccgggucgggggccgcugccacccccacgugaacggcgucuucuucaacgggaucauccugggccccgacgggcacgugcugauccccgagaugcaguccagccuccugcagcagcacaugggccugcucgaguccagcgugaucccgcugaugcacccccuggccgaccccuccaccgucuucaaggacggggacgaggcggaggacuucguggaggugcaccuccccgacguccacaagcaggucagcggcguggaccugggccugccguccugggggaaguacgugcucaugagcgugggcgccaugaucgcccugaugcugaugaucuuccucaugaccugcugccggaaggccaacggggccgagacgauccagcaccgccugggcgagaccgggcggaagguguccgucaccagccaguccggccgcgugaucagcagcugggaguccuacaagagcggcggggagaccaagcuguga

SEQ ID NO: 95955 - RNA, 1575 nt, Artificial Sequence
  derived and/or modified CDS sequence (opt1) from glycoprotein__RABV__LC071974.1
augaucccccaggcccuccuguucgugccgcugcuggucuucagcuccugcuucggcaaguuccccaucuacaccauccccgacaagcucgggcccuggagcccgaucgacauccaccaccuguccugccccaacaaccuggugguggaggacgagggcugcaccaaccucagcggguucuccuacauggagcugaaggucggcuacaucagcgccaucaaggugaacggguucacgugcaccggcguggucaccgaggcggagaccuacacgaacuucgugggcuacgugaccaccaccuucaagcgcaagcacuuccggcccacgcccgacgccugccgcgccgccuacaacuggaagauggccggggacccgcgguacgaggagucccugcacaaccccuaccccgacuaccacuggcuccgcaccgucaagaccaccaaggagagccuggugaucaucucccccagcguguccgaccuggacccguacgacaagagccuccacucccgggucuuccccagcggcaagugcuccgggaucacggugagcuccaccuacugccccaccaaccacgacuacaccaucuggaugcccgagaacccgcgccugggcacgagcugcgacaucuucaccaacucccgggggaagcgcgcgagcaagggcggcaagaccugcggguucguggacgagcggggccuguacaagagccucaagggggccugcaagcugaagcugugcggcguccucggccugcgccugauggacgggaccuggguggccauccagacguccgacgaggccaaguggugcccgcccgaccagcucgugaacauccacgacuuccggagcgacgagaucgagcaccuggucguggaggagcuggugaagaagcgcgaggagugccucgacgcgcuggaguccaucaugaccaccaagagcgucuccuucggccggcugagccaccuccgcaagcuggugcccggguucggcaaggccuacaccaucuucaacaagacgcugauggaggccgacgcccacuacaaguccgugcggaccuggaacgagaucauccccagcaaggggugccuccgcgucggcggccggugccacccccacgugaacggggucuucuucaacggcaucauccuggggcccgacggccacgugcugauccccgaggugcaguccagccuccugcagcagcacauggagcugcucgaguccagcgucaucccgcugaugcacccccuggccgaccccuccaccguguucaaggacggggacgaggcggaggacuucguggagguccaccuccccgacgugcacaagcaggucagcggcguggaccugggccugccguccugggggaaguacgugcucaugagcgugggcgccaugaucgcccugaugcugaugaucuuccucaugaccugcugccgcaaggccaacggggccgagacgauccagcaccggcugggcgagaccgggcgcaaggucuccgugaccagccaguccggccgggugaucagcagcugggaguccuacaagagcggcggggagaccaagcuguga

SEQ ID NO: 95956 - RNA, 1575 nt, Artificial Sequence
  derived and/or modified CDS sequence (opt1) from glycoprotein__RABV__LC071975.1
augaucccccaggcccuccuguucgugccgcugcuggucuucagcuccugcuucggcaaguuccccaucuacaccauccccgacaagcucgggcccuggagcccgaucgacauccaccaccuguccugccccaacaaccuggugguggaggacgagggcugcaccaaccucagcggguucuccuacauggagcugaaggucggcuacaucagcgccaucaaggugaacggguucacgugcaccggcguggucaccgaggcggagaccuacacgaacuucgugggcuacgugaccaccaccuucaagcgcaagcacuuccggcccacgcccgacgccugccgcgccgccuacaacuggaagauggccggggacccgcgguacgaggagucccugcacaaccccuaccccgacuaccacuggcuccgcaccgucaagaccaccaaggagagccuggugaucaucucccccagcguguccgaccuggacccguacgacaagagccuccacucccgggucuuccccagcggcaagugcuccgggaucacggugagcuccaccuacugccccaccaaccacgacuacaccaucuggaugcccgagaacccgcgccugggcacgagcugcgacaucuucaccaacucccgggggaagcgcgcgagcaagggcggcaagaccugcggguucguggacgagcggggccuguacaagagccucaagggggccugcaagcugaagcugugcggcguccucggccugcgccugauggacgggaccuggguggccauccagacguccgacgaggccaaguggugcccgcccgaccagcucgugaacauccacgacuuccggagcgacgagaucgagcaccuggucguggaggagcuggugaagaagcgcgaggagugccucgacgcgcuggaguccgucaugaccaccaagagcguguccuuccggcgccugagccaccuccggaagcuggugcccggcuucgggaaggccuacaccaucuucaacaagacgcugauggaggccgacgcccacuacaaguccguccgcaccuggaacgagaucauccccagcaagggcugccuccgggucgggggccgcugccacccccacgugaacggcguguucuucaacgggaucauccugggccccgacgggcacgugcugauccccgagaugcaguccagccuccugcagcagcacauggagcugcucgaguccagcgucaucccgcugaugcacccccuggccgaccccuccaccguguucaaggacggcgacgaggcggaggacuucguggagguccaccuccccgacgugcacaagcaggucagcgggguggaccugggccugccguccuggggcaaguacgugcucaugagcgugggggccaugaucgcccugaugcugaugaucuuccucaugaccugcugccggaaggccaacggcgccgagacgauccagcaccgccugggggagaccggccggaaggucuccgugaccagccaguccgggcgcgugaucagcagcugggaguccuacaagagcggcggcgagaccaagcuguga

SEQ ID NO: 95957 - RNA, 1575 nt, Artificial Sequence; identical to SEQ ID NO: 95052
  derived and/or modified CDS sequence (opt1) from glycoprotein__RABV__LC071976.1

SEQ ID NO: 95958 - RNA, 1575 nt, Artificial Sequence
  derived and/or modified CDS sequence (opt1) from glycoprotein__RABV__LC071977.1
augaucccccaggcccuccuguucgugccgcugcuggucuucagcuccugcuucggcaaguuccccaucuacaccauccccgacaagcucgggcccuggagcccgaucgacauccaccaccuguccugccccaacaaccuggugguggaggacgagggcugcaccaaccucagcggguucuccuacauggagcugaaggucggcuacaucagcgccaucaaggugaacggguucacgugcaccggcguggucaccgaggcggagaccuacacgaacuucgugggcuacgugaccaccaccuucaagcgcaagcacuuccggcccacgcccgacgccugccgcgccgccuacaacuggaagauggccggggacccgcgguacgaggagucccugcacaaccccuaccccgacuaccacuggcuccgcgcggucaagaccaccaaggagagccuggugaucaucucccccagcguguccgaccuggacccguacgacaagagccuccacucccgggucuuccccagcggcaagugcuccgggaucaccgugagcuccacguacugccccaccaaccacgacuacaccaucuggaugcccgagaacccgcgccugggcaccagcugcgacaucuucacgaacucccgggggaagcgcgccagcaagggcggcaagaccugcggguucguggacgagcggggccuguacaagagccucaagggggccugcaagcugaagcugugcggcguccucggccugcgccugauggacgggaccuggguggccauccagaccuccgacgaggcgaaguggugcccgcccgaccagcucgugaacauccacgacuuccggagcgacgagaucgagcaccuggucguggaggagcuggugaagaagcgcgaggagugccucgacgcccuggaguccaucaugacgaccaagagcgucuccuuccggcgccugagccaccuccggaagcuggugcccggcuucgggaaggccuacaccaucuucaacaagacccugauggaggccgacgcccacuacaaguccgugcgcacguggaacgagaucauccccagcaagggcugccuccgggucgggggccgcugccacccccacgugaacggcgucuucuucaacgggaucauccugggccccgacgggcacgugcugauccccgagaugcaguccagccuccugcagcagcacauggagcugcucgaguccagcgugaucccgcugaugcacccccuggcggaccccuccaccgucuucaaggacggcgacgaggccgaggacuucguggaggugcaccuccccgacguccacaagcaggucagcgggguggaccugggccugccguccuggggcaaguacgugcucaugagcgugggggccaugaucgcccugaugcugaugaucuuccucaugaccugcugccggaaggccaacggcgcggagaccauccagcaccgccugggggagacgggccggaagguguccgucaccagccaguccgggcgcgugaucagcagcugggaguccuacaagagcggcggcgagaccaagcuguga

SEQ ID NO: 95959 - RNA, 1575 nt, Artificial Sequence; identical to SEQ ID NO: 95052
  derived and/or modified CDS sequence (opt1) from glycoprotein__RABV__LC071978.1

SEQ ID NO: 95960 - RNA, 1575 nt, Artificial Sequence
  derived and/or modified CDS sequence (opt1) from glycoprotein__RABV__LC071979.1
augaucccccaggcccuccuguucgugccgcugcuggucuucagcuccugcuucggcaaguuccccaucuacaccauccccgacaagcucgggcccuggagcccgaucgacauccaccaccuguccugccccaacaaccuggugguggaggacgagggcugcaccaaccucagcggguucuccuacauggagcugaaggucggcuacaucagcgccaucaaggugaacggguucacgugcaccggcguggucaccgaggcggagaccuacacgaacuucgugggcuacgugaccaccaccuucaagcgcaagcacuuccggcccacgcccgacgccugccgcgccgccuacaacuggaagauggccggggacccgcgguacgaggagucccugcacaaccccuaccccgacuaccacuggcuccgcaccgucaagaccaccaaggagagccuggugaucaucucccccagcguguccgaccuggacccguacgacaagagccuccacucccgggucuuccccagcggcaagugcuccgggaucacggugagcuccaccuacugccccaccaaccacgacuacaccaucuggaugcccgagaacccgcgccugggcacgagcugcgacaucuucaccaacucccgggggaagcgcgcgagcaagggcggcaagaccugcggguucguggacgagcggggccuguacaagagccucaagggggccugcaagcugaagcugugcggcguccucggccugcgccugauggacgggaccuggguggccauccagacguccgacgaggccaaguggugcccgcccgaccagcucgugaacauccacgacuuccggagcgacgagaucgagcaccuggucguggaggagcuggugaagaagcgcgaggagugccucgacgcgcuggaguccaucaugaccaccaagagcgucuccuuccggcgccugagccaccuccggaagcuggugcccggcuucggggaggccuacaccaucuucaacaagacgcugauggaggccgacgcccacuacaaguccgugcgcaccuggaacgagaucauccccagcaagggcugccuccgggucgggggccgcugccacccccacgugaacggcgucuucuucaacgggaucauccugggccccgacgggcacgugcugauccccgagaugcaguccagccuccugcagcagcacauggagcugcucgaguccagcgugaucccgcugaugcacccccuggccgaccccuccaccgucuucaaggacggcgacgaggcggaggacuucguggaggugcaccuccccgacguccacaagcaggucagcgggguggaccugggccugccguccuggggcaaguacgugcucaugagcgugggggccaugaucgcccugaugcugaugaucuuccucaugaccugcugccggaaggccaacggcgccgagacgauccagcaccgccugggggagaccggccggaagguguccgucaccagccaguccgggcgcgugaucagcagcugggaguccuacaagagcggcggcgagaccaagcuguga

SEQ ID NO: 95961 - RNA, 1575 nt, Artificial Sequence; identical to SEQ ID NO: 95052
  derived and/or modified CDS sequence (opt1) from glycoprotein__RABV__LC071980.1

SEQ ID NO: 95962 - RNA, 1575 nt, Artificial Sequence
  derived and/or modified CDS sequence (opt1) from glycoprotein__RABV__LC071981.1
augaucccccaggcccuccuguucgugccgcugcuggucuucagcuccugcuucggcaaguuccccaucuacaccauccccgacaagcucgggcccuggagcccgaucgacauccaccaccuguccugccccaacaaccuggugguggaggacgagggcugcaccaaccucagcggguucuccuacauggagcugaaggucggcuacaucagcgccaucaaggugaacggguucacgugcaccggcguggucaccgaggcggagaccuacacgaacuucgugggcuacgugaccaccaccuucaagcgcaagcacuuccggcccacgcccgacgccugccgcgccgccuacaacuggaagauggccggggacccgcgguacgaggagucccugcacaaccccuaccccgacuaccacuggcuccgcaccgucaagaccaccaaggagagccuggugaucaucucccccagcguguccgaccuggacccguacgacaagagccuccacucccgggucuuccccagcggcaagcgcuccgggaucacggugagcuccaccuacugccccaccaaccacgacuacaccaucuggaugcccgagaacccgcggcugggcacgagcugcgacaucuucaccaacucccgcgggaagcgggcgagcaagggcggcaagaccugcggguucguggacgagcgcggccuguacaagagccucaagggggccugcaagcugaagcugugcggcguccucggccugcggcugauggacgggaccuggguggccauccagacguccgacgaggccaaguggugcccgcccgaccagcucgugaacauccacgacuuccgcagcgacgagaucgagcaccuggucguggaggagcuggugaagaagcgggaggagugccucgacgcgcuggaguccaucaugaccaccaagagcgucuccuuccgccggcugagccaccuccgcaagcuggugcccggcuucgggaaggccuacaccaucuucaacaagacgcugauggaggccgacgcccacuacaaguccgugcggaccuggaacgagaucauccccagcaagggcugccuccgcgucgggggccggugccacccccacgugaacggcgucuucuucaacgggaucgugcugggccccgacgggcacgugcugauccccgagaugcaguccagccuccugcagcagcacauggagcugcucgaguccagcgucaucccgcugaugcacccccuggccgaccccuccaccguguucaaggacggcgacgaggcggaggacuucguggagguccaccuccccgacgugcacaagcaggucagcgggguggaccugggccugccguccuggggcaaguacgcccucaugagcgugggggccaugaucgcccugaugcugaugaucuuccucaugaccugcugccgcaaggccaacggcgcggagacgaagcagcaccggcugggggagaccggccgcaagguguccgucaccagccaguccgggcgcgugaucagcagcugggaguccuacaagagcggcggcgagaccaagcuguga

SEQ ID NO: 95963 - RNA, 1575 nt, Artificial Sequence
  derived and/or modified CDS sequence (opt1) from glycoprotein__RABV__LC071983.1
augaucccccaggcccuccuguucaucccgcugagcguguucucccugugcuucggcaaguuccccaucuacaccauccccgacaagcucgggcccuggagcccgaucgacauccaccaccuguccugccccaacaaccuggucguggaggacgagggcugcaccaaccucagcggguucuccuacauggagcugaaggugggcuacaucagcgccaucaaggucaacggguucacgugcaccggcguggugaccgaggcggagaccuacacgaacuucgucggcuacgugaccaccaccuucaagcgcaagcacuuccggcccacgcccgacgccugccgcgccgccuacaacuggaagauggccggggacccgcgguacgaggagucccugcacaaccccuaccccgacuaccacuggcuccgcaccgugaagaccaccaaggagagccuggucaucaucucccccagcguguccgaccuggacccguacgacaagagccuccacucccggguguuccccagcggcaagugcuccgggaucacggucagcuccaccuacugccccaccaaccacgacuacaccaucuggaugcccgagagcccgcgccugggcacguccugcgacaucuucaccaacagccgggggaagcgcgcgagcaagggcuccaagaccugcggcuucguggacgagcgggggcuguacaagagccucaagggcgccugcaagcugaagcugugcggggugcucggccugcgccugauggacggcaccugggccgccauccagacgcccgacgaggucaaguggugcccgcccgaccagcucgugaacauccacgacuuccgguccgacgagaucgagcaccugguggucgaggagcuggugaagaagcgcgaggagugccucgacgcgcuggagagcaucaugaccaccaaguccgugagcuuccggcgccugucccaccuccggaagcugguccccggguucggcaaggccuacaccaucuucaacaagacgcugauggaggccgacgcccacuacaagagcgugcgcaccuggaacgagaucauccccuccaaggggugccuccgggugggcgggcgcugccacccccacgucaacggcguguucuucaacggcaucauccuggggcccgacggccacguccugaucccggagaugcagagcucccuccugcagcagcacauggagcugcucgagagcuccgugaucccccugaugcacccccuggccgaccccagcaccguguucaaggacggggacgaggcggaggacuucgucgaggugcaccucccggacgugcacaagcaggucuccggcguggaccuggggcugcccagcuggggcaaguacgugcucauguccgucggcgccaugaucgcccugaugcugaugaucuuccucaccacgugcugccggaaggccaacggggccgagagcauccagcaccgccggggcgagaccgggcgcaagguguccgugaccagccagagcggccgcgucaucuccagcugggaguccuacaagagcgggggcgagaccaagcuguga

SEQ ID NO: 95964 - RNA, 1575 nt, Artificial Sequence
  derived and/or modified CDS sequence (opt1) from glycoprotein__RABV__LM645015.1
auggugccccaggcccugcuguucgucccgcugcuggccuuccccaugugcuucggcaaguuccccaucuacaccauccccgacaagcucgggccguggagccccaucgacauccaccaccuguccugccccaacaaccuggugguggaggacgagggcugcaccaaccucagcggguucuccuacauggagcugaaggucggcuacaucagcgcgaucaaggugaacggguucacgugcaccggcguggucaccgaggccgagaccuacacgaacuucgugggcuacgugaccaccaccuucaagcgcaagcacuuccggcccacgccggacgccugccgcgccgccuacaacuggaagauggcgggggacccccgguacgaggagucccugcacaaccccuaccccgacuaccacuggcuccgcaccgucaagaccaccaaggagagccugaucaucaucuccccgagcguggccgaccuggaccccuacgacaagucccuccacagccggguguuccccuccggcaagugccuggggaucacgaucagcuccaccuacugcagcaccaaccacgacuacaccaucuggaugcccgagaacguccgccugggcacguccugcgacaucuucaccaacagccgggggaagcgcgccuccaagggcagcaagaccugcggcuucguggacgagcgggggcucuacaagucccugaagggcgccugcaagcugaagcucugcggggugcugggccugcgccucauggacggcaccugggucgcgaugccgacgagcgacgagaccaaguggugcccgcccgaccagcuggugaaccugcacgacuuccggagcgacgagaucgagcaccucguggucgaggagcuggugcgcaagcgggaggagugccuggacgcccucgaguccaucaugaccaccaagagcguguccuuccgccggcugagccaccuccgcaagcucguccccggguucggcaaggccuacacgaucuucaacaagacccugauggaggccgacgcccacuacaaguccgugcggaccuggaacgagaucauccccagcaaggggugccugcgcgugggcgggcggugccacccccacgucaacggcguguucuucaacggcaucauccucgggcccgacggccacguccugauccccgagaugcaguccagccugcuccagcagcacauggagcugcuggaguccagcgugaucccgcucaugcacccccuggcggaccccuccaccguguucaaggacggggacgaggccgaggacuucgucgaggugcaccuccccgacgugcacaagcaggucagcggcguggaccuggggcugccgaacuggggcaaguacgugcugaucaucgccggcguccucaucgccaugauccugacgaucuuccugaugaccugcugcgggcgcggcaaccggcccaaguccacccagcacagccucgggggcaucgggcgcaagguguccagcaccucccagagcggcaaggugaucuccagcugggagagcuacaaguccggcggggagacgcgccuguga

SEQ ID NO: 95965 - RNA, 1575 nt, Artificial Sequence
  derived and/or modified CDS sequence (opt1) from glycoprotein__RABV__LM645016.1
auggugccccaggcccugcuguucgucccgcugcuggccuuccccaugugcuucggcaaguuccccaucuacaccauccccgacaagcucgggccguggagccccaucgacauccaccaccuguccugccccaacaaccuggugguggaggacgagggcugcaccaaccucagcggguucuccuacauggagcugaaggucggcuacaucagcgcgaucaaggugaacggguucacgugcaccggcguggucaccgaggccgagaccuacacgaacuucgugggcuacgugaccaccaccuucaagcgcaagcacuuccggcccacgccggacgccugccgcgccgccuacaacuggaagauggcgggggacccccgguacgaggagucccugcacaaccccuaccccgacuaccacuggcuccgcaccgucaagaccaccaaggagagccugaucaucaucuccccgagcguggccgaccuggaccccuacgacaagucccuccacagccggguguuccccuccggcaagugccuggggaucacgaucagcuccaccuacugcagcaccaaccacgacuacaccaucuggaugcccgagaacguccgccugggcacguccugcgacaucuucaccaacagccgggggaagcgcgccuccaagggcagcaagaccugcggcuucguggacgagcgggggcucuacaagucccugcgcggcgccugcaagcugaagcucugcggggugcugggccugcggcucauggacggcaccugggucgcgaugccgacgagcgacgagaccaaguggugcccgcccgaccagcuggugaaccugcacgacuuccgcagcgacgagaucgagcaccucguggucgaggagcuggugcggaagcgcgaggagugccuggacgcccucgaguccaucaugaccaccaagagcguguccuuccggcgccugagccaccuccggaagcucguccccggguucggcaaggccuacacgaucuucaacaagacccugauggaggccgacgcccacuacaaguccgugcgcaccuggaacgagaucauccccagcaaggggugccugcgggugggcgggcgcugccacccccacgucaacggcguguucuucaacggcaucauccucgggcccgacggccacguccugauccccgagaugcaguccagccugcuccagcagcacauggagcugcuggaguccagcgugaucccgcucaugcacccccuggcggaccccuccaccguguucaaggacggggacgaggccgaggacuucgucgaggugcaccuccccgacgugcacaagcagaucagcggcgucgaccuggggcugccgaacuggggcaaguacgugcugaucaucgccggcgugcucaucgccaugauccugacgaucuuccugaugaccugcugcgggcggggcaaccgccccaaguccacccagcacagccucgggggcaucgggcgcaaggucuccagcaccucccagagcggcaaggugaucuccagcugggagagcuacaaguccggcggggagacgcggcuguga

SEQ ID NO: 95966 - RNA, 1575 nt, Artificial Sequence
  derived and/or modified CDS sequence (opt1) from glycoprotein__RABV__LM645018.1
auggugccccaggcccugcuguucgucccgcugcuggccuuccccaugugcuucggcaaguuccccaucuacaccauccccgacaagcucgggccguggagccccaucgacauccaccaccuguccugccccaacaaccuggugguggaggacgagggcugcaccaaccucagcggguucuccuacauggagcugaaggucggcuacaucagcgcgaucaaggugaacggguucacgugcaccggcguggucaccgaggccgagaccuacacgaacuucgugggcuacgugaccaccaccuucaagcgcaagcacuuccggcccacgccggacgccugccgcgccgccuacaacuggaagauggcgggggacccccgguacgaggagucccugcacaaccccuaccccgacuaccacuggcuccgcaccgucaagaccaccaaggagagccugaucaucaucuccccgagcguggccgaccuggaccccuacgacaagucccuccacagccggguguuccccuccggcaagugccuggggaucacgaucagcuccaccuacugcagcaccaaccacgacuacaccaucuggaugcccgagaacguccgccugggcacguccugcgacaucuucaccaacagccgggggaagcgcgccuccaagggcagcaagaccugcggcuucguggacgagcgggggcucuacaagucccugaagggcgccugcaagcugaagcucugcggggugcugggccugcgccucauggacggcaccugggucgcgaugccgacgagcgacgagaccaaguggugcccgcccgaccagcuggugaaccugcacgacuuccggagcgacgagaucgagcaccucguggucgaggagcuggugcgcaagcgggaggagugccuggacgcccucgaguccaucaugaccaccaagagcguguccuuccgccggcugagccaccuccgcaagcucguccccggguucggcaaggccuacacgaucuucaacaagacccugauggaggccgacgcccacuacaaguccgugcggaccuggaacgagaucauccccagcaaggggugccugcgcgugggcgggcggugccacccccacgucaacggcguguucuucaacggcaucauccucgggcccgacggccacguccugauccccgagaugcaguccagccugcuccagcagcacauggagcugcuggaguccagcgugaucccgcucaugcacccccuggcggaccccuccaccguguucaaggacggggacgaggccgaggacuucgucgaggugcaccuccccgacgugcacaagcagaucagcggcgucgaccuggggcugccgaacuggggcaaguacgugcugaucaucacgggcgugcucaucgccaugauccugaccaucuuccugaugaccugcugcgggcgcggcaaccggcccaaguccaagcagcacagccucgggggcaucgggcgcaaggucuccagcaccucccagagcggcaaggugaucuccagcugggagagcuacaaguccggcggggagacgcgccuguga

SEQ ID NO: 95967 - RNA, 1575 nt, Artificial Sequence; identical to SEQ ID NO: 95833
  derived and/or modified CDS sequence (opt1) from glycoprotein__RABV__LM645019.1

SEQ ID NO: 95968 - RNA, 1575 nt, Artificial Sequence
  derived and/or modified CDS sequence (opt1) from glycoprotein__RABV__LM645021.1
auggugccgcaggcccugcuguucgucccgcugcuggccuuccccaugugcuucggcaaguuccccaucuacaccauccccgacaagcucgggccguggagccccaucgacauccaccaccuguccugccccaacaaccuggugguggaggacgagggcugcaccaaccucagcggguucuccuacauggagcugaaggucggcuacaucagcgcgaucaaggugaacggguucacgugcaccggcguggucaccgaggccgagaccuacacgaacuucgugggcuacgugaccaccaccuucaagcgcaagcacuuccggcccacgccggacgccugccgcgccgccuacaacuggaagauggcgggggacccccgguacgaggagucccugcacaaccccuaccccgacuaccacuggcuccgcaccgucaagaccaccaaggagagccugaucaucaucuccccgagcguggccgaccuggaccccuacgacaagucccuccacagccggguguuccccuccggcaagugccuggggaucacgaucagcuccaccuacugcagcaccaaccacgacuacaccaucuggaugcccgagaacguccgccugggcacguccugcgacaucuucaccaacagccgggggaagcgcgccuccaagggcagcaagaccugcggcuucguggacgagcgggggcucuacaagucccugaagggcgccugcaagcugaagcucugcggggugcugggccugcgccucauggacggcaccugggucgcgaugccgacgagcgacgagaccaaguggugcagccccgaccagcuggugaaccugcacgacuuccgguccgacgagaucgagcaccucguggucgaggagcuggugcgcaagcgggaggagugccuggacgcccucgagagcaucaugaccaccaaguccgugagcuuccgccggcugucccaccuccgcaagcucguccccggguucggcaaggccuacacgaucuucaacaagacccugauggaggccgacgcccacuacaagagcgugcggaccuggaacgagaucauccccuccaaggggugccugcgcgugggcgggcggugccacccgcacgucaacggcguguucuucaacggcaucauccucgggcccgacggccacguccugauccccgagaugcagagcucccugcuccagcagcacauggagcugcuggagagcuccgugaucccccucaugcacccgcuggcggaccccagcaccguguucaaggacggggacgaggccgaggacuucgucgaggugcaccuccccgacgugcacaagcagaucuccggcgucgaccuggggcugcccaacuggggcaaguacgugcugaucaucgccggcgugcucaucgccaugauccugacgaucuuccugaugaccugcugcgggcgcggcaaccggcccaagagcaagcagcacucccucgggggcaucgggcgcaaggucagcuccaccagccaguccggcaaggugaucagcagcugggaguccuacaagagcggcggggagacccgccuguga

SEQ ID NO: 95969 - RNA, 1575 nt, Artificial Sequence
  derived and/or modified CDS sequence (opt1) from glycoprotein__RABV__LM645022.1
auggugccccaggcccugcuguucgucccgcugcuggccuuccccaugugcuucggcaaguuccccaucuacaccauccccgacaagcucgggccguggagccccaucgacauccaccaccuguccugccccaacaaccuggugguggaggacgagggcugcaccaaccucagcggguucuccuacauggagcugaaggucggcuacaucagcgcgaucaaggugaacggguucacgugcaccggcguggucaccgaggccgagaccuacacgaacuucgugggcuacgugaccaccaccuucaagcgcaagcacuuccggcccacgccggacgccugccgcgccgccuacaacuggaagauggcgggggacccccgguacgaggagucccugcacaaccccuaccccgacuaccacuggcuccgcaccgucaagaccaccaaggagagccugaucaucaucuccccgagcguggccgaccuggaccccuacgacaagucccuccacagccggguguuccccuccggcaagugccuggggaucacgaucagcuccaccuacugcagcaccaaccacgacuacaccaucuggaugcccgagaacguccgccugcggacguccugcgacaucuucaccaacagccgcggcaagcgggccuccaaggggagcaagaccugcggcuucguggacgagcgcggccucuacaagucccugaagggggccugcaagcugaagcucugcggcgugcuggggcugcggcucauggacggcaccugggucgcgaugccgacgagcgacgagaccaaguggugcccgcccgaccagcuggugaaccugcacgacuuccgcagcgacgagaucgagcaccucguggucgaggagcuggugcggaagcgcgaggagugccuggacgcccucgaguccaucaugaccaccaagagcguguccuuccggcgccugagccaccuccggaagcucguccccggcuucgggaaggccuacacgaucuucaacaagacccugauggaggccgacgcccacuacaaguccgugcgcaccuggaacgagaucauccccagcaagggcugccugcgggucgggggccgcugccacccccacgugaacgggguguucuucaacggcaucauccucggccccgacgggcacguccugauccccgagaugcaguccagccugcuccagcagcacauggagcugcuggaguccagcgugaucccgcucaugcacccccuggcggaccccuccaccguguucaaggacggcgacgaggccgaggacuucgucgaggugcaccuccccgacgugcacaagcagaucagcggggucgaccugggccugccgaacugggggaaguacgugcugaucaucgccggcgugcucaucgccaugauccugacgaucuuccugaugaccugcugcggccgggggaaccgccccaaguccaagcagcacagccucggcgggaucggccgcaaggucuccagcaccucccagagcgggaaggugaucuccagcugggagagcuacaaguccggcggcgagacccggcuguga

SEQ ID NO: 95970 - RNA, 1575 nt, Artificial Sequence; identical to SEQ ID NO: 95833
  derived and/or modified CDS sequence (opt1) from glycoprotein__RABV__LM645024.1

SEQ ID NO: 95971 - RNA, 1575 nt, Artificial Sequence; identical to SEQ ID NO: 95833
  derived and/or modified CDS sequence (opt1) from glycoprotein__RABV__LM645026.1

SEQ ID NO: 95972 - RNA, 1575 nt, Artificial Sequence
  derived and/or modified CDS sequence (opt1) from glycoprotein__RABV__LM645027.1
auggugccccaggcccugcuguucgucccgcugcuggccuuccccaugugcuucggcaaguuccccaucuacaccauccccgacaagcuggggccguggagccccaucgacauccaccaccuguccugccccaacaaccuggugguggaggacgagggcugcaccaaccucagcggguucuccuacauggagcugaaggucggcuacaucagcgcgaucaaggugaacggguucacgugcaccggcguggucaccgaggccgagaccuacacgaacuucgugggcuacgugaccaccaccuucaagcgcaagcacuuccggcccacgccggacgccugccgcgccgccuacaacuggaagauggcgggggacccccgguacgaggagucccugcacaaccccuaccccgacuaccacuggcuccgcaccgucaagaccaccaaggagagccugaucaucaucuccccgagcguggccgaccuggaccccuacgacaagucccuccacagccggguguuccccuccggcaagugccuggggaucacgaucagcuccaccuacugcagcaccaaccacgacuacaccaucuggaugcccgagaacguccgccugggcacguccugcgacaucuucaccaacagccgggggaagcgcgccuccaagggcagcaagaccugcggcuucguggacgagcgggggcucuacaagucccugaagggcgccugcaagcugaagcucugcggggugcugggccugcgccucauggacggcaccugggucgcgaugccgacgagcgacgagaccaaguggugcccgcccgaccagcuggugaaccugcacgacuuccggagcgacgagaucgagcaccucguggucgaggagcuggugcgcaagcgggaggagugccuggacgcccucgaguccaucaugaccaccaagagcguguccuuccgccggcugagccaccuccgcaagcucguccccggguucggcaaggccuacacgaucuucaacaagacccugauggaggccgacgcccacuacaaguccgugcggaccuggaacgagaucauccccagcaaggggugccugcgcgugggcgggcggugccacccccacgucaacggcguguucuucaacggcaucauccucgggcccgacggccacguccugauccccgagaugcaguccagccugcuccagcagcacauggagcugcuggaguccagcgugaucccgcucaugcacccccuggcggaccccuccaccguguucaaggacggggacgaggccgaggacuucgucgaggugcaccuccccgacgugcacaagcagaucagcggcgucgaccuggggcugccgaacuggggcaaguacgugcugaucaucgccggccuccugaucgccaugauccugacgaucuuccucaugaccugcugcgggcgcggcaaccggcccaaguccacccagcacagccucgggggcaucgggcgcaagguguccagcaccucccagagcggcaaggucaucuccagcugggagagcuacaaguccggcggggagacgcgccuguga

SEQ ID NO: 95973 - RNA, 1575 nt, Artificial Sequence
  derived and/or modified CDS sequence (opt1) from glycoprotein__RABV__LM645029.1
auggugccccaggcccugcuguucgucccgcugcuggccuuccccaugugcuucggcaaguuccccaucuacaccauccccgacaagcucgggccguggagccccaucgacauccaccaccuguccugccccaacaaccuggugguggaggacgagggcugcaccaaccucagcggguucuccuacauggagcugaaggucggcuacaucagcgcgaucaaggugaacggguucacgugcaccggcguggucaccgaggccgagaccuacacgaacuucgugggcuacgugaccaccaccuucaagcgcaagcacuuccggcccacgccggacgccugccgcgccgccuacaacuggaagauggcgggggacccccgguacgaggagucccugcacaaccccuaccccgacuaccacuggcuccgcaccgucaagaccaccaaggagagccugaucaucaucuccccgagcguggccgaccuggaccccuacgacaagucccuccacagccggguguuccccuccggcaagugccuggggaucacgaucagcuccaccuacugcagcaccaaccacgacuacaccaucuggaugcccgagaacguccgccugggcacguccugcgacaucuucaccaacagccgggggaagcgcgccuccaagggcagcaagaccugcggcuucguggacgagcgggggcucuacaagucccugaagggcgccugcaagcugaagcucugcggggugcugggccugcgccucauggacggcaccugggucgcgaugccgacgagcgacgagaccaaguggugcccgcccgaccagcuggugaaccugcacgacuuccggagcgacgagaucgagcaccucguggucgaggagcuggugcgcaagcgggaggagugccuggacgcccucgaguccaucaucaccaccaagagcguguccuuccgccggcugagccaccuccgcaagcucguccccggguucggcaaggccuacacgaucuucaacaagacccugauggaggccgacgcccacuacaaguccgugcggaccuggaacgagaucauccccagcaaggggugccugcgcgugggcgggcggugccacccccacgucaacggcguguucuucaacggcaucauccucgggcccgacggccacguccugauccccgagaugcaguccagccugcuccagcagcacauggagcugcuggaguccagcgugaucccgcucaugcacccccuggcggaccccuccaccguguucaaggacggggacgaggccgaggacuucgucgaggugcaccuccccgacgugcacaagcagaucagcggcgucgaccuggggcugccgaacuggggcaaguacgugcugaucaucgccggcgugcucaucgccaugauccugacgaucuuccugaugaccugcugcgggcgcggcaaccggcccaaguccaagcagcacagccucgggggcaucgggcgcaaggucuccagcaccucccagagcggcaaggugaucuccagcugggagagcuacaaguccggcggggagacccgccuguga

SEQ ID NO: 95974 - RNA, 1575 nt, Artificial Sequence
  derived and/or modified CDS sequence (opt1) from glycoprotein__RABV__LM645031.1
auggugccccaggcccugcuguucgucccgcugcuggccuuccccaugugcuucggcaaguuccccaucuacaccauccccgacaagcucgggccguggagccccaucgacauccaccaccuguccugccccaacaaccuggugguggaggacgagggcugcaccaaccucagcggguucuccuacauggagcugaaggucggcuacaucagcgcgaucaaggugaacggguucacgugcaccggcguggucaccgaggccgagaccuacacgaacuucgugggcuacgugaccaccaccuucaagcgcaagcacuuccggcccacgccggacgccugccgcgccgccuacaacuggaagauggcgggggacccccgguacgaggagucccugcacaaccccuaccccgacuaccacuggcuccgcaccgucaagaccaccaaggagagccugaucaucaucuccccgagcguggccgaccuggaccccuacgacaagucccuccacagccggguguuccccuccggcaagugccuggggaucacgaucagcuccaccuacugcagcaccaaccacgacuacaccaucuggaugcccgagaacguccgccugggcacguccugcgacaucuucaccaacagccgggggaagcgcgccucccggggcagcaagaccugcggcuucguggacgagcgcgggcucuacaagucccugaagggcgccugcaagcugaagcucugcggggugcugggccugcggcucauggacggcaccugggucgcgaugccgacgagcgacgagaccaaguggugcccgcccgaccagcuggugaaccugcacgacuuccgcagcgacgagaucgagcaccucguggucgaggagcuggugcggaagcgcgaggagugccuggacgcccucgaguccaucaugaccaccaagagcguguccuuccggcgccugagccaccuccggaagcucguccccggguucggcaaggccuacacgaucuucaacaagacccugauggaggccgacgcccacuacaaguccgugcgcaccuggaacgagaucauccccagcaaggggugccugcgggugggcgggcgcugccacccccacgucaacggcguguucuucaacggcaucauccucgggcccgacggccacguccugauccccgagaugcaguccagccugcuccagcagcacauggagcugcuggaguccagcgugaucccgcucaugcacccccuggcggaccccuccaccguguucaaggacggggacgaggccgaggacuucgucgaggugcaccuccccgacgugcacaagcagaucagcggcgucgaccuggggcugccgaacuggggcaaguacgugcugaucaucgccggcgugcucaucgccaugauccugacgaucuuccugaugaccugcugcgggcggggcaaccgccccaaguccaagcagcacagccucgggggcaucgggcgcaaggucuccagcaccucccagagcggcaaggugaucuccagcugggagagcuacaaguccggcggggagacccggcuguga

SEQ ID NO: 95975 - RNA, 1575 nt, Artificial Sequence; identical to SEQ ID NO: 95833
  derived and/or modified CDS sequence (opt1) from glycoprotein__RABV__LM645034.1

SEQ ID NO: 95976 - RNA, 1575 nt, Artificial Sequence; identical to SEQ ID NO: 95833
  derived and/or modified CDS sequence (opt1) from glycoprotein__RABV__LM645035.1

SEQ ID NO: 95977 - RNA, 1575 nt, Artificial Sequence
  derived and/or modified CDS sequence (opt1) from glycoprotein__RABV__LM645036.1
auggugccccaggcccugcuguucgucccccugcuggccuuccccaugugcuucggcaaguuccccaucuacaccauccccgacaagcucgggccguggagccccaucgacauccaccaccuguccugccccaacaaccuggugguggaggacgagggcugcaccaaccucagcggguucuccuacauggagcugaaggucggcuacaucagcgcgaucaaggugaacggguucacgugcaccggcguggucaccgaggccgagaccuacacgaacuucgugggcuacgugaccaccaccuucaagcgcaagcacuuccggcccacgccggacgccugccgcgccgccuacaacuggaagauggcgggggacccccgguacgaggagucccugcacaaccccuaccccgacuaccacuggcuccgcaccgucaagaccaccaaggagagccugaucaucaucuccccgagcguggccgaccuggaccccuacgacaagucccuccacagccggguguuccccuccggcaagugccuggggaucacgaucagcuccaccuacugccugaccaaccacgacuacaccaucuggaugcccgagaacguccgccucggcacgagcugcgacaucuucaccaacucccgggggaagcgcgccagcaagggcuccaagaccugcggcuucguggacgagcgggggcuguacaagagccugaagggcgccugcaagcucaagcugugcggggugcugggccuccgccugauggacggcaccugggucgcgaugccgacguccgacgagaccaaguggugcccgcccgaccagcuggugaaccuccacgacuuccggagcgacgagaucgagcaccugguggucgaggagcuggugcgcaagcgggaggagugccucgacgcccuggagagcaucaugaccaccaaguccgugagcuuccgccggcugucccaccuccgcaagcugguccccggguucggcaaggccuacacgaucuucaacaagacccugauggaggccgacgcccacuacaagagcgugcggaccuggaacgagaucauccccuccaaggggugccuccgcgugggcgggcggugccacccccacgucaacggcguguucuucaacggcaucauccuggggcccgacggccacguccugauccccgagaugcagagcucccuccugcagcagcacauggagcugcucgagagcuccgugaucccgcugaugcacccccuggcggaccccagcaccguguucaaggacggggacgaggccgaggacuucgucgaggugcaccuccccgacgugcacaagcagaucuccggcgucgaccuggggcugccgaacuggggcaaguacgugcucaucaucgccggcgugcugaucgccaugauccugacgaucuuccucaugaccugcugcgggcgcggcaaccggcccaagagcaagcagcacucccucgggggcaucgggcgcaaggucagcuccaccccgcagagcggcaaggugaucuccagcugggaguccuacaagagcggcggggagacccgccuguga

SEQ ID NO: 95978 - RNA, 1575 nt, Artificial Sequence; identical to SEQ ID NO: 95498
  derived and/or modified CDS sequence (opt1) from glycoprotein__RABV__LM645037.1

SEQ ID NO: 95979 - RNA, 1575 nt, Artificial Sequence
  derived and/or modified CDS sequence (opt1) from glycoprotein__RABV__LM645039.1
auggugccccaggcccugcuguucgucccgcugcuggccuuccccaugugcuucggcaaguuccccaucuacaccauccccgacaagcucgggccguggagccccaucgacauccaccaccuguccugccccaacaaccuggugguggaggacgagggcugcaccaaccucagcggguucuccuacauggagcugaaggucggcuacaucagcgcgaucaaggugaacggguucacgugcaccggcguggucaccgaggccgagaccuacacgaacuucgugggcuacgugaccaccaccuucaagcgcaagcacuuccugcccacgccggacgccugccgggccgccuacaacuggaagauggcgggggacccccgcuacgaggagucccuccacaaccccuaccccgacuaccacuggcugcggaccgucaagaccaccaaggagagccugaucaucaucuccccgagcguggccgaccucgaccccuacgacaagucccugcacagccgcguguuccccuccggcaagugccuggggaucacgaucagcuccaccuacugcagcaccaaccacgacuacaccaucuggaugcccgagaacguccggcucggcacguccugcgacaucuucaccaacagccgcgggaagcgggccuccaagggcagcaagaccugcggcuucguggacgagcgcgggcuguacaagucccugaagggcgccugcaagcucaagcugugcggggugcugggccuccggcugauggacggcaccugggucgcgaugccgacgagcgacgagaccaaguggugcccgcccgaccagcuggugaaccuccacgacuuccgcagcgacgagaucgagcaccugguggucgaggagcuggugcggaagcgcgaggagugccucgacgcccuggaguccaucaugaccaccaagagcguguccuuccggcgccugagccaccuccggaagcugguccccggguucggcaaggccuacacgaucuucaacaagacccugauggaggccgacgcccacuacaaguccgugcgcaccuggaacgagaucauccccagcaaggggugccuccgggugggcgggcgcugccacccccacgucaacggcguguucuucaacggcaucauccuggggcccgacggccacguccugauccccgagaugcaguccagccuccugcagcagcacauggagcugcucgaguccagcgugaucccgcugaugcacccccuggcggaccccuccaccguguucaaggacggggacgaggccgaggacuucgucgaggugcaccuccccgacgugcacaagcagaucagcggcgucgaccuggggcugccgaacuggggcaaguacgugcucaucaucgccggcgugcugaucgccaugauccugacgaucuuccucaugaccugcugcgggcggggcaaccgccccaaguccacccagcacagccucgggggcaucgggcggaaggucuccagcaccucccagagcggcaaggugaucuccagcugggagagcuacaaguccggcggggagacgcgccuguga

SEQ ID NO: 95980 - RNA, 1575 nt, Artificial Sequence; identical to SEQ ID NO: 95498
  derived and/or modified CDS sequence (opt1) from glycoprotein__RABV__LM645041.1

SEQ ID NO: 95981 - RNA, 1575 nt, Artificial Sequence
  derived and/or modified CDS sequence (opt1) from glycoprotein__RABV__LM645042.1
auggugccccaggcccugcuguucgucccgcugcuggccuuccccaugugcuucggcaaguuccccaucuacaccauccccgacaagcucgggccguggagccccaucgacauccaccaccuguccugccccaacaaccuggugguggaggacgagggcugcaccaaccucagcggguucuccuacauggagcugaaggucggcuacaucagcgcgaucaaggugaacggguucacgugcaccggcguggucaccgaggccgagaccuacacgaacuucgugggcuacgugaccaccaccuucaagcgcaagcacuuccugcccacgccggacgccugccgggccgccuacaacuggaagauggcgggggacccccgcuacgaggagucccuccacaaccccuaccccgacuaccacuggcugcggaccgucaagaccaccaaggagagccugaucaucaucuccccgagcguggccgaccucgaccccuacgacaagucccugcacagccgcguguuccccuccggcaagugccuggggaucacgaucagcuccaccuacugcagcaccaaccacgacuacaccaucuggaugcccgagaacguccggcucggcacguccugcgacaucuucaccaacagccgcgggaagcgggccuccaagggcagcaagaccugcggcuucguggacaagcgcgggcuguacaagucccugaagggcgccugcaagcucaagcugugcggggugcugggccuccggcugauggacggcaccugggucgcgaugccgacgagcgacgagaccaaguggugcccgcccgaccagcuggugaaccuccacgacuuccgcagcgacgagaucgagcaccugguggucgaggagcuggugcggaagcgcgaggagugccucgacgcccuggaguccaucaugaccaccaagagcguguccuuccggcgccugagccaccuccggaagcugguccccggguucggcaaggccuacacgaucuucaacaagacccugauggaggccgacgcccacuacaaguccgugcgcaccuggaacgagaucauccccagcaaggggugccuccgggugggcgggcgcugccacccccacgucaacggcguguucuucaacggcaucauccuggggcccgacggccacguccugauccccgagaugcaguccagccuccugcagcagcacauggagcugcucgaguccagcgugaucccgcugaugcacccccuggcggaccccuccaccguguucaaggacggggacgaggccgaggacuucgucgaggugcaccuccccgacgugcacaagcagaucagcggcgucgaccuggggcugccgaacuggggcaaguacgugcucaucaucgccggcgugcugaucgccaugauccugacgaucuuccucaugaccugcugcgggcggggcaaccgccccaaguccacccagcacagccucgggggcaucgggcggaaggucuccagcaccucccagagcggcaaggugaucuccagcugggagagcuacaaguccggcggggagacgcgccuguga

SEQ ID NO: 95982 - RNA, 1575 nt, Artificial Sequence; identical to SEQ ID NO: 95498
  derived and/or modified CDS sequence (opt1) from glycoprotein__RABV__LM645043.1

SEQ ID NO: 95983 - RNA, 1575 nt, Artificial Sequence
  derived and/or modified CDS sequence (opt1) from glycoprotein__RABV__LM645045.1
auggugccccaggcccugcuguucgucccgcugcuggccuuccccaugugcuucggcaaguuccccaucuacaccauccccgacaagcucgggccguggagccccaucgacauccaccaccuguccugccccaacaaccuggugguggaggacgagggcugcaccaaccucagcggguucuccuacauggagcugaaggucggcuacaucagcgcgaucaaggugaacggguucacgugcaccggcguggucaccgaggccgagaccuacacgaacuucgugggcuacgugaccaccaccuucaagcgcaagcacuuccggcccacgccggacgccugccgcgccgccuacaacuggaagauggcgggggacccccgguacgaggagucccugcacaaccccuaccccgacuaccacuggcuccgcaccgucaagaccaccaaggagagccugaucaucaucuccccgagcguggccgaccuggaccccuacgacaagucccuccacagccggguguuccccuccggcaagugccuggggaucacgaucagcuccaccuacugcagcaccaaccacgacuacaccaucuggaugcccgagaacguccgccugggcacguccugcgacaucuucaccaacagccgggggaagcgcgccuccaagggcagcaagaccugcggcuucguggacgagcgggggcucuacaagucccugaagggcgccugcaagcugaagcucugcggggugcugggccugcgccucauggacggcaccugggucgcgaugccgacgagcgacgagaccaaguggugcccgcccgaccagcuggugaaccugcacgacuuccggagcgacgagaucgagcaccucguggucgaggagcuggugcgcaagcgggaggagugccuggacgcccucgaguccaucaugaccaccaagagcguguccuuccgccggcugagccaccuccgcaagcucguccccggguucggcaaggccuacacgaucuucaacaagacccugauggaggccgacgcccacuacaaguccgugcggaccuggaacgagaucauccccagcaaggggugccugcgcgugggcgggcggugccacccccacgucaacggcguguucuucaacggcaucauccucgggcccgacggccacguccugauccccgagaugcaguccagccugcuccagcagcacauggagcugcuggaguccagcgugaucccgcucaugcacccccuggcggaccccuccaccguguucaaggacggggacgaggccgaggacuucgucgaggugcacuuccccgacgugcacaagcagaucagcggcgucgaccuggggcucccgaacuggggcaaguacgugcugaucaucgccggcgugcugaucgccaugauccucacgaucuuccugaugaccugcugcgggcgcggcaaccggcccaaguccacccagcacagccucgggggcaucgggcgcaaggucuccagcaccucccagagcggcaaggugaucuccagcugggagagcuacaaguccggcggggagacgcgccuguga

SEQ ID NO: 95984 - RNA, 1575 nt, Artificial Sequence; identical to SEQ ID NO: 95983
  derived and/or modified CDS sequence (opt1) from glycoprotein__RABV__LM645049.1

SEQ ID NO: 95985 - RNA, 1575 nt, Artificial Sequence; identical to SEQ ID NO: 95498
  derived and/or modified CDS sequence (opt1) from glycoprotein__RABV__LM645052.1

SEQ ID NO: 95986 - RNA, 1575 nt, Artificial Sequence; identical to SEQ ID NO: 95498
  derived and/or modified CDS sequence (opt1) from glycoprotein__RABV__LM645053.1

SEQ ID NO: 95987 - RNA, 1575 nt, Artificial Sequence; identical to SEQ ID NO: 95498
  derived and/or modified CDS sequence (opt1) from glycoprotein__RABV__LM645056.1

SEQ ID NO: 95988 - RNA, 1575 nt, Artificial Sequence
  derived and/or modified CDS sequence (opt1) from glycoprotein__RABV__LN713547.1
auggugccccaggcccugcuguucgucccccugcugguguucccccucugcuucggcaaguuccccaucuacaccauccccgacaagcuggggccguggagccccaucgacauccaccaccuguccugccccaacaaccucguggucgaggacgagggcugcaccaaccugagcggguucuccuacauggagcugaaggugggcaacauccucgccaucaagaugaacggguucacgugcaccggcguggucaccgaggcggagaccuacacgaacuucgugggcuacgugaccaccaccuucaagcgcaagcacuuccggcccacgccggacgccugccgcgccgccuacaacuggaagauggccggggacccccgguacgaggagagccugcacaaccccuaccccgacuaccgcuggcugcggaccgucaagaccaccaaggagucccucgugaucaucagcccguccguggcggaccuggaccccuacgaccgcagccugcacucccgggucuuccccagcggcaagugcuccgggguggccgugagcuccacguacugcagcaccaaccacgacuacaccaucuggaugcccgaguccccgcgccucggcaugagcugcgacaucuucaccaacucccgggggaagcgcgccagcaagggcuccgagacgugcggcuucgucgacgagcgggggcuguacaagagccugaagggcgccugcaagcucaagcugugcggggugcugggccuccgccugauggacggcaccugggugagcaugcagaccuccaacgagaccaaguggugcccgcccgaccagcuggucaaccuccacgacuuccggagcgacgagaucgagcaccuggugguggaggagcugguccgcaagcgggaggagugccucgacgcgcuggaguccaucaugacgaccaagagcguguccuuccgccggcugagccaccuccgcaagcuggugcccggguucggcaaggccuacaccauccugaacaagacccucauggaggccgacgcccacuacaaguccguccggacguggaacgagauccugcccagcaaggggugccugcgcgugggcgggcggugccacccccacgucaacggcguguucuucaacggcaucauccucgggcccgacggcaacgugcugauccccgagaugcaguccagccugcuccagcagcacauggagcugcuggaguccagcgucaucccgcucgugcacccccuggccgaccccuccaccguguucaaggacggggacgaggcggaggacuucgucgaggugcaccuccccgacgugcacaaccaggucagcggcguggaccucgggcugccgaacuggggcaaguacgugcugcucuccgccggcgcccugaccgcccugaugcugaucaucuuccucaugaccugcugccgccgcgucaaccggagcgagcccacgcagcacaaccugcgcgggaccggccgggagguguccgugaccccgcagagcgggaagaucaucuccagcugggagagccacaaguccggcggggagacccgccuguga

SEQ ID NO: 95989 - RNA, 1575 nt, Artificial Sequence; identical to SEQ ID NO: 95988
  derived and/or modified CDS sequence (opt1) from glycoprotein__RABV__LN713552.1

SEQ ID NO: 95990 - RNA, 1575 nt, Artificial Sequence
  derived and/or modified CDS sequence (opt1) from glycoprotein__RABV__LN713556.1
auggugccccaggcccugcuguucgucccccugcugguguucccccucugcuucggcaaguuccccaucuacaccauccccgacaagcuggggccguggagccccaucgacauccaccaccuguccugccccaacaaccucguggucgaggacgagggcugcaccaaccugagcggguucuccuacauggagcugaaggugggcaacauccucgccaucaagaugaacggguucacgugcaccggcguggucaccgaggcggagaccuacacgaacuucgugggcuacgugaccaccaccuucaagcgcaagcacuuccggcccacgccggacgccugccgcgccgccuacaacuggaagauggccggggacccccgguacgaggagagccugcacaaccccuaccccgacuaccgcuggcugcggaccgucaagaccaccaaggagucccucgugaucaucagcccguccguggcggaccuggaccccuacgaccgcagccugcacucccgggucuuccccagcggcaagugcuccgggguggccgugagcuccacguacugcagcaccaaccacgacuacaccaucuggaugcccgagaacccgcgccucggcauguccugcgacaucuucaccaacagccgggggaagcgcgccuccaagggcagcgagacgugcggcuucgucgacgagcgggggcuguacaagucccugaagggcgccugcaagcucaagcugugcggggugcugggccuccgccugauggacggcaccugggugagcaugcagaccagcaacgagaccaaguggugcccgcccgacaagcuggucaaccuccacgacuuccgguccgacgagaucgagcaccuggugguggaggagcugguccgcaagcgggaggagugccucgacgcgcuggagagcaucaugacgaccaaguccgugagcuuccgccggcugucccaccuccgcaagcuggugcccggguucggcaaggccuacaccauccugaacaagacccucauggaggccgacgcccacuacaagagcguccggacguggaacgagauccugcccuccaaggggugccugcgcgugggcgggcggugccacccccacgucaacggcguguucuucaacggcaucauccucgggcccgacggcaacgugcugauccccgagaugcagagcucccugcuccagcagcacauggagcugcuggagagcuccgucaucccgcucgugcacccccuggccgaccccagcaccguguucaaggacggggacgaggcggaggacuucgucgaggugcaccuccccgacgugcacaaccaggucuccggcguggaccucgggcugccgaacuggggcaaguacgugcugcucagcgccggcgcccugaccgcccugaugcugaucaucuuccucaugaccugcugccgccgcgucaaccgguccgagcccacgcagcacaaccugcgcgggaccggccgggaggugagcgugaccccgcaguccgggaagaucaucagcuccugggagagccacaagagcggcggggagacccgccuguga

SEQ ID NO: 95991 - RNA, 1575 nt, Artificial Sequence; identical to SEQ ID NO: 95988
  derived and/or modified CDS sequence (opt1) from glycoprotein__RABV__LN713559.1

SEQ ID NO: 95992 - RNA, 1575 nt, Artificial Sequence
  derived and/or modified CDS sequence (opt1) from glycoprotein__RABV__LN713560.1
auggugccccaggcccugcuguucgucccccugcugguguucccccucugcuucggcaaguuccccaucuacaccauccccgacaagcuggggccguggagccccaucgacauccaccaccuguccugccccaacaaccucguggucgaggacgagggcugcaccaaccugagcggguucuccuacauggagcugaaggugggcaacauccucgccaucaaggugaacggguucacgugcaccggcgucgugaccgaggcggagaccuacacgaacuucgugggcuacgucaccaccaccuucaagcgcaagcacuuccggcccacgccggacgccugccgcgccgccuacaacuggaagauggccggggacccccgguacgaggagagccugcacaaccccuaccccgacuaccgcuggcugcggaccgugaagaccaccaaggagucccucgugaucaucagcccguccgucgcggaccuggaccccuacgaccgcagccugcacucccggguguuccccagcggcaagugcuccgggguggccgucagcuccacguacugcagcaccaaccacgacuacaccaucuggaugcccgaguccccgcgccucggcaugagcugcgacaucuucaccaacucccgggggaagcgcgccagcaagggcuccgagacgugcggcuucguggacgagcgggggcuguacaagagccugaagggcgccugcaagcucaagcugugcggggugcugggccuccgccugauggacggcaccugggucagcaugcagaccuccaacgagaccaaguggugcccgcccgaccagcuggugaaccuccacgacuuccggagcgacgagaucgagcaccugguggucgaggagcuggugcgcaagcgggaggagugccucgacgcgcuggaguccaucaugacgaccaagagcguguccuuccgccggcugagccaccuccgcaagcugguccccggguucggcaaggccuacaccauccugaacaagacccucauggaggccgacgcccacuacaaguccgugcggacguggaacgagauccugcccagcaaggggugccugcgcgucggcgggcggugccacccccacgugaacggcguguucuucaacggcaucauccucgggcccgacggcaacguccugauccccgagaugcaguccagccugcuccagcagcacauggagcugcuggaguccagcgugaucccgcucgugcacccccuggccgaccccuccaccgucuucaaggacggggacgaggcggaggacuucguggaggugcaccuccccgacguccacaaccaggugagcggcguggaccucgggcugccgaacuggggcaaguacguccugcucuccgccggcgcccugaccgcccugaugcugaucaucuuccucaugaccugcugccgccgcgugaaccggagcgagcccacgcagcacaaccugcgcgggaccggccgggagguguccgucaccccgcagagcgggaagaucaucuccagcugggagagccacaaguccggcggggagacccgccuguga

SEQ ID NO: 95993 - RNA, 1575 nt, Artificial Sequence
  derived and/or modified CDS sequence (opt1) from glycoprotein__RABV__LN713572.1
auggugccccaggcccugcuguucgucccccugcugguguucccccucugcuucggcaaguuccccaucuacaccauccccgacaagcuggggccguggagccccaucgacauccaccaccuguccugccccaacaaccucguggucgaggacgagggcugcaccaaccugagcggguucuccuacauggagcugaaggugggcuacauccucgccaucaaggugaacggguucacgugcaccggcgucgugaccgaggcggagaccuacacgaacuucgugggcuacgucaccaccaccuucaagcgcaagcacuuccggcccacgccggacgccugccgcgccgccuacaacuggaagauggccggggacccccgguacgaggagagccugcacaaccccuaccccgacuaccgcuggcugcggaccgugaagaccaccaaggagucccucgugaucaucagcccguccgucgcggaccuggaccccuacgaccgcagccugcacucccggguguuccccagcggcaagugcuccgggguggccgucagcuccacguacugcagcaccaaccacgacuacaccaucuggaugcccgagaacccgcgccucggcauguccugcgacaucuucaccaacagccgggggaagcgcgccuccaagggcagcgagacgugcggcuucguggacgagcgggggcuguacaagucccugaagggcgccugcaagcucaagcugugcggggugcugggccuccgccugauggacggcaccugggucagcaugcagaccagcaacgagaccaaguggugcccgcccgacaagcuggugaaccuccacgacuuccgguccgacgagaucgagcaccugguggucgaggagcuggugcgcaagcgggaggagugccucgacgcgcuggagagcaucaugacgaccaaguccgugagcuuccgccggcugucccaccuccgcaagcugguccccggguucggcaaggccuacaccauccugaacaagacccucauggaggccgacgcccacuacaagagcgugcggacguggaacgagauccugcccuccaaggggugccugcgcgucggcgggcggugccacccccacgugaacggcguguucuucaacggcaucauccucgggcccgacggcaacguccugauccccgagaugcagagcucccugcuccagcagcacauggagcugcuggagagcuccgugaucccgcucgugcacccccuggccgaccccagcaccgucuucaaggacggggacgaggcggaggacuucguggaggugcaccuccccgacguccacaaccagguguccggcguggaccucgggcugccgaacuggggcaaguacguccugcucagcgccggcgcccugaccgcccugaugcugaucaucuuccucaugaccugcugccgccgcgugaaccgguccgagcccacgcagcacaaccugcgcgggaccggccgggaggugagcgucaccccgcaguccgggaagaucaucagcuccugggagagccacaagagcggcggggagacccgccuguga

SEQ ID NO: 95994 - RNA, 1575 nt, Artificial Sequence
  derived and/or modified CDS sequence (opt1) from glycoprotein__RABV__LN713578.1
auggugccccaggcccugcuguucgucccccugcugguguucccccucugcuucggcaaguuccccaucuacaccauccccgacaagcuggggccguggagccccaucgacauccaccaccuguccugccccaacaaccucguggucgaggacgagggcugcaccaaccugagcggguucuccuacauggagcugaaggugggcuacauccucgccaucaagaugaacggguucacgugcaccggcguggucaccgaggcggagaccuacacgaacuucgugggcuacgugaccaccaccuucaagcgcaagcacuuccggcccacgccggacgccugccgcgccgccuacaacuggaagauggccggggacccccgguacgaggagagccugcacaaccccuaccccgacuaccgcuggcugcggaccgucaagaccaccaaggagucccucgugaucaucagcccguccguggcggaccuggaccccuacgaccgcagccugcacucccgggucuuccccagcggcaagugcuccgggguggccgugagcuccacguacugcagcaccaaccacgacuacaccaucuggaugcccgagaacccgcgccucggcauguccugcgacaucuucaccaacagccgggggaagcgcgccuccaagggcagcgagacgugcggcuucgucgacgagcgggggcuguacaagucccugaagggcgccugcaagcucaagcugugcggggugcugggccuccgccugauggacggcaccugggugagcaugcagaccagcaacgagaccaaguggugcccgcccgacaagcuggucaaccuccacgacuuccgguccgacgagaucgagcaccuggugguggaggagcugguccgcaagcgggaggagugccucgacgcgcuggagagcaucaugacgaccaaguccgugagcuuccgccggcugucccaccuccgcaagcuggugcccggguucggcaaggccuacaccaucuucaacaagacccugauggaggccgacgcccacuacaagagcguccggacguggaacgagauccuccccuccaaggggugccugcgcgugggcgggcggugccacccccacgucaacggcguguucuucaacggcaucauccuggggcccgacggcaacgugcucauccccgagaugcagagcucccugcugcagcagcacauggagcuccuggagagcuccgucaucccgcuggugcacccccucgccgaccccagcaccguguucaaggacggggacgaggcggaggacuucgucgaggugcaccuccccgacgugcacaaccaggucuccggcguggaccuggggcucccgaacuggggcaaguacgugcugcugagcgccggcgcccucaccgcccugaugcugaucaucuuccugaugaccugcugccgccgcgucaaccgguccgagcccacgcagcacaaccuccgcgggaccggccgggaggugagcgugaccccgcaguccgggaagaucaucagcuccugggagagccacaagagcggcggggagacccgccuguga

SEQ ID NO: 95995 - RNA, 1575 nt, Artificial Sequence; identical to SEQ ID NO: 95992
  derived and/or modified CDS sequence (opt1) from glycoprotein__RABV__LN713589.1

SEQ ID NO: 95996 - RNA, 1575 nt, Artificial Sequence; identical to SEQ ID NO: 95988
  derived and/or modified CDS sequence (opt1) from glycoprotein__RABV__LN713600.1

SEQ ID NO: 95997 - RNA, 1575 nt, Artificial Sequence
  derived and/or modified CDS sequence (opt1) from glycoprotein__RABV__LN713602.1
auggugccccaggcccugcuguucgucccccugcugguguucccccucugcuucggcaaguuccccaucuacaccauccccgacaagcuggggccguggagccccaucgacauccaccaccuguccugccccaacaaccucguggucgaggacgagggcugcaccaaccugagcggguucuccuacauggagcugaaggugggcaacauccucgccaucaagaugaacggguucacgugcaccggcguggucaccgaggcggagaccuacacgaacuucgugggcuacgugaccaccaccuucaagcgcaagcacuuccggcccacgccggacgccugccgcgccgccuacaacuggaagauggccggggacccccgguacgaggagagccugcacaaccccuaccccgacuaccgcuggcugcggaccgucaagaccaccaaggagucccucgugaucaucagcccguccguggcggaccuggaccccuacgaccgcagccugcacucccgggucuuccccagcggcaagugcuccgggguggccgugagcuccacguacugcagcaccaaccacgacuacaccaucuggaugcccgagaacccgcgccucggcauguccugcgacaucuucaccaacagccgggggaagcgcgccuccaagggcagcgagacgugcggcuucgucgacgagcgggggcuguacaagucccugaagggcgccugcaagcucaagcugugcggggugcugggccuccgccugauggacggcaccugggugagcaugcagaccagcaacgagaccaaguggugcccgcccgaccagcuggucaaccuccacgacuuccgguccgacgagaucgagcaccuggugguggaggagcugguccgcaagcgggaggagugccucgacgcgcuggagagcaucaugacgaccaaguccgugagcuuccgccggcugucccaccuccgcaagcuggugcccggguucggcaaggccuacaccauccugaacaagacccucauggaggccgacgcccacuacaagagcguccggacguggaacgagauccugcccuccaaggggugccugcgcgugggcgggcggugccacccccacgucaacggcguguucuucaacggcaucauccucgggcccgacggcaacgugcugauccccgagaugcagagcucccugcuccagcagcacauggagcugcuggagagcuccgucaucccgcucgugcacccccuggccgaccccagcaccguguucaaggacggggacgaggcggaggacuucgucgaggugcaccuccccgacgugcacaaccaggucuccggcguggaccucgggcugccgaacuggggcaaguacgugcugcucagcgccggcgcccugaccgcccugaugcugaucaucuuccucaugaccugcugccgccgcgucaaccgguccgagcccacgcagcacaaccugcgcgggaccggccgggaggugagcgugaccccgcaguccgggaagaucaucagcuccugggagagccacaagagcggcggggagacccgccuguga

SEQ ID NO: 95998 - RNA, 1575 nt, Artificial Sequence
  derived and/or modified CDS sequence (opt1) from glycoprotein__RABV__LN713608.1
auggugccccaggcccugcuguucgucccccugcugguguucccccucugcuucggcaaguuccccaucuacaccauccccgacaagcuggggccguggagccccaucgacauccaccaccuguccugccccaacaaccucguggucgaggacgagggcugcaccaaccugagcggguucuccuacauggagcugaaggugggcuacauccucgccaucaaggugaacggguucacgugcaccggcgucgugaccgaggcggagaccuacacgaacuucgugggcuacgucaccaccaccuucaagcgcaagcacuuccggcccacgccggacgccugccgcgccgccuacaacuggaagauggccggggacccccgguacgaggagagccugcacaaccccuaccccgacuaccgcuggcugcggaccgugaagaccaccaaggagucccucgugaucaucagcccguccgucgcggaccuggaccccuacgaccgcagccugcacucccggguguuccccagcggcaagugcuccgggguggccgucagcuccacguacugcagcaccaaccacgacuacaccaucuggaugcccgagaacccgcgccucggcauguccugcgacaucuucaccaacagccgggggaagcgcgccuccaagggcagcgagacgugcggcuucguggacgagcgggggcuguacaagucccugaagggcgccugcaagcucaagcugugcggggugcugggccuccgccugauggacggcaccugggucagcaugcagaccagcaacgagaccaaguggugcccgcccgaccagcuggugaaccuccacgacuuccgguccgacgagaucgagcaccugguggucgaggagcuggugcgcaagcgggaggagugccucgacgcgcuggagagcaucaugacgaccaaguccgugagcuuccgccggcugucccaccuccgcaagcugguccccggguucggcaaggccuacaccaucuucaacaagacccugauggaggccgacgcccacuacaagagcgugcggacguggaacgagauccuccccuccaaggggugccugcgcgucggcgggcggugccacccccacgugaacggcguguucuucaacggcaucauccuggggcccgacggcaacguccucauccccgagaugcagagcucccugcugcagcagcacauggagcuccuggagagcuccgugaucccgcuggugcacccccucgccgaccccagcaccgucuucaaggacggggacgaggcggaggacuucguggaggugcaccuccccgacguccacaaccagguguccggcguggaccuggggcucccgaacuggggcaaguacguccugcugagcgccggcgcccucaccgcccugaugcugaucaucuuccugaugaccugcugccgccgcgugaaccgguccgagcccacgcagcacaaccuccgcgggaccggccgggaggugagcgucaccccgcaguccgggaagaucaucagcuccugggagagccacaagagcggcggggagacccgccuguga

SEQ ID NO: 95999 - RNA, 1575 nt, Artificial Sequence
  derived and/or modified CDS sequence (opt1) from glycoprotein__RABV__LN713628.1
auggugccccaggcccugcuguucgucccccugcugguguucccccucugcuucggcaaguuccccaucuacaccauccccgacaagcuggggccguggagccccaucgacauccaccaccuguccugccccaacaaccucguggucgaggacgagggcugcaccaaccugagcggguucuccuacauggagcugaaggugggcuacauccucgccaucaagaugaacggguucacgugcaccggcguggucaccgaggcggagaccuacacgaacuucgugggcuacgugaccaccaccuucaagcgcaagcacuuccggcccacgccggacgccugccgcgccgccuacaacuggaagauggccggggacccccgguacgaggagagccugcacaaccccuaccccgacuaccgcuggcugcggaccgucaagaccaccaaggagucccucgugaucaucagcccguccguggcggaccuggaccccuacgaccgcagccugcacucccgggucuuccccagcggcaagugcuccgggguggccgugagcuccacguacugcagcaccaaccacgacuacaccaucuggaugcccgagaacccgcgccucggcauguccugcgacaucuucaccaacagccgggggaagcgcgccuccaagggcagcgagacgugcggcuucgucgacgagcgggggcuguacaagucccugaagggcgccugcaagcucaagcugugcggggugcugggccuccgccugauggacggcaccugggugagcaugcagaccagcaacgagaccaaguggugcccgcccgaccagcuggucaaccuccacgacuuccgguccgacgagaucgagcaccuggugguggaggagcugguccgcaagcgggaggagugccucgacgcgcuggagagcaucaugacgaccaaguccgugagcuuccgccggcugucccaccuccgcaagcuggugcccggguucggcaaggccuacaccaucuucaacaagacccugauggaggccgacgcccacuacaagagcguccggacguggaacgagauccuccccuccaaggggugccugcgcgugggcgggcggugccacccccacgucaacggcguguucuucaacggcaucauccuggggcccgacggcaacgugcucauccccgagaugcagagcucccugcugcagcagcacauggagcuccuggagagcuccgucaucccgcuggugcacccccucgccgaccccagcaccguguucaaggacggggacgaggcggaggacuucgucgaggugcaccuccccgacgugcacaaccaggucuccggcguggaccuggggcucccgaacuggggcaaguacgugcugcugagcgccggcgcccucaccgcccugaugcugaucaucuuccugaugaccugcugccgccgcgucaaccgguccgagcccacgcagcacaaccuccgcgggaccggccgggaggugagcgugaccccgcaguccgggaagaucaucagcuccugggagagccacaagagcggcggggagacccgccuguga

SEQ ID NO: 96000 - RNA, 1575 nt, Artificial Sequence
  derived and/or modified CDS sequence (opt1) from glycoprotein__RABV__LN713639.1
auggugccccaggcccugcuguucgucccccugcugguguucccccucugcuucggcaaguuccccaucuacaccauccccgacaagcuggggccguggagccccaucgacauccaccaccuguccugccccaacaaccucguggucgaggacgagggcugcaccaaccugagcggguucuccuacauggagcugaaggugggcuacauccucgccaucaaggugaacggguucacgugcaccggcgucgugaccgaggcggagaccuacacgaacuucgugggcuacgucaccaccaccuucaagcgcaagcacuuccggcccacgccggacgccugccgcgccgccuacaacuggaagauggccggggacccccgguacgaggagagccugcacaaccccuaccccgacuaccgcuggcugcggaccgugaagaccaccaaggagucccucgugaucaucagcccguccgucgcggaccuggaccccuacgaccgcagccugcacucccggguguuccccagcggcaagugcuccgggguggccgucagcuccacguacugcagcaccaaccacgacuacaccaucuggaugcccgagaacccgcgccucggcauguccugcgacaucuucaccaacagccgggggaagcgcgccuccaagggcagcgagacgugcggcuucguggacgagcgggggcuguacaagucccugaagggcgccugcaagcucaagcugugcggggugcugggccuccgccugauggacggcaccugggucagcaugcagaccagcaacgagaccaaguggugcccgcccgaccagcuggugaaccuccacgacuuccgguccgacgagauggagcaccugguggucgaggagcuggugcgcaagcgggaggagugccucgacgcgcuggagagcaucaugacgaccaaguccgugagcuuccgccggcugucccaccuccgcaagcugguccccggguucggcaaggccuacaccauccugaacaagacccucauggaggccgacgcccacuacaagagcgugcggacguggaacgagauccugcccuccaaggggugccugcgcgucggcgggcggugccacccccacgugaacggcguguucuucaacggcaucauccucgggcccgacggcaacguccugauccccgagaugcagagcucccugcuccagcagcacauggagcugcuggagagcuccgugaucccgcucgugcacccccuggccgaccccagcaccgucuucaaggacggggacgaggcggaggacuucguggaggugcaccuccccgacguccacaaccagguguccggcguggaccucgggcugccgaacuggggcaaguacguccugcucagcgccggcgcccugaccgcccugaugcugaucaucuuccucaugaccugcugccgccgcgugaaccgguccgagcccacgcagcacaaccugcgcgggaccggccgggaggugagcgucaccccgcaguccgggaagaucaucagcuccugggagagccacaagagcggcggggagacccgccuguga

SEQ ID NO: 96001 - RNA, 1575 nt, Artificial Sequence
  derived and/or modified CDS sequence (opt1) from glycoprotein__RABV__LN713660.1
auggugccccaggcccugcuguucgucccccugcugguguucccccucugcuucggcaaguuccccaucuacaccauccccgacaagcuggggccguggagccccaucgacauccaccaccuguccugccccaacaaccucguggucgaggacgagggcugcaccaaccugagcggguucuccuacauggagcugaaggugggcuacaucagcgccaucaagaugaacggguucacgugcaccggcguggucaccgaggcggagaccuacacgaacuucgugggcuacgugaccaccaccuucaagcgcaagcacuuccggcccacgccggacgccugccgcgccgccuacaacuggaagauggccggggacccccgguacgaggagucccuccacaaccccuaccccgacuaccgcuggcugcggaccgucaagaccaccaaggagagccuggugaucaucuccccgagcguggcggaccucgaccccuacgaccgcucccugcacagccgggucuuccccuccggcaagugcagcgggguggccguguccagcacguacugcuccaccaaccacgacuacaccaucuggaugcccgagaacccgcgccugggcaugagcugcgacaucuucaccaacucccgggggaagcgcgccagcaagggcuccgagacgugcggcuucgucgacgagcgggggcucuacaagagccugaagggcgccugcaagcugaagcucugcggggugcugggccugcgccucauggacggcaccuggguggcgaugcagaccagcaacgagaccaaguggugcccgcccgaccagcuggucaaccugcacgacuuccgguccgacgagaucgagcaccucgugguggaggagcugguccgcaagcgggaggagugccuggacgcccucgagagcaucaugacgaccaaguccgugagcuuccgccggcugucccaccuccgcaagcucgugcccggguucggcaaggccuacaccaucuucaacaagacccugauggaggccgacgcccacuacaagagcguccggacguggaacgagauccugcccuccaaggggugccuccgcgugggcgggcggugccacccccacgucaacggcguguucuucaacggcaucauccuggggcccgacggcaacgugcugauccccgagaugcagagcucccuccugcagcagcacauggagcugcucgagagcuccgucaucccgcugaugcacccccuggcggaccccagcaccguguucaaggacggggacgaggccgaggacuucguggagguccaccuccccgacgugcacgagcaggucuccggcguggaccuggggcugccgaacuggggcaaguacgugcuccugagcgccggcgcccugaccgcccucaugcugaucaucuuccugaugaccugcugccgccgcgugaaccgguccgagcccacgcagcacaaccugcgcgggaccggccgggaggucagcgugaccccgcaguccgggaagaucaucagcuccugggagagcuacaagagcggcggggagacccgccucuga

SEQ ID NO: 96002 - RNA, 1575 nt, Artificial Sequence
  derived and/or modified CDS sequence (opt1) from glycoprotein__RABV__LN713663.1
auggugccccaggcccugcuguucgucccgcugcugguguucccccucugcuucggcaaguuccccaucuacaccauccccgacaagcuggggccguggagccccaucgacauccaccaccuguccugccccaacaaccucguggucgaggacgagggcugcaccaaccugagcggguucuccuacauggagcugaaggugggcuacauccucgccaucaaggugaacggguucacgugcaccggcgucgugaccgaggcggagaccuacacgaacuucgugggcuacgucaccaccaccuucaagcgcaagcacuuccggcccacgccggacgccugccgcgccgccuacaacuggaagauggccggggacccccgguacgaggagagccugcacaaccccuaccccgacuaccgcuggcugcggaccgugaagaccaccaaggagucccucgugaucaucagcccguccgucgcggaccuggaccccuacgaccgcagccugcacucccggguguuccccagcggcaagugcuccgggguggccgucagcuccacguacugcagcaccaaccacgacuacaccaucuggaugcccgagaacccgcgccucggcauguccugcgacaucuucaccaacagccgggggaagcgcgccuccaagggcagcgagacgugcggcuucguggacgagcgggggcuguacaagucccugaagggcgccugcaagcucacccugugcggggugcugggccuccgccugauggacggcaccugggucagcaugcagaccagcaacgagacgaaguggugcccgcccgacaagcuggugaaccuccacgacuuccgguccgacgagaucgagcaccugguggucgaggagcuggugcgcaagcgggaggagugccucgacgcgcuggagagcaucaugaccaccaaguccgugagcuuccgccggcugucccaccuccgcaagcugguccccggguucggcaaggccuacaccaucuucaacaagacgcugauggaggccgacgcccacuacaagagcguggagaccuggaacgagauccuccccuccaaggggugccugcgggucggcgggcgcugccacccccacgugaacggcguguucuucaacggcaucauccuggggcccgacggcaacguccucauccccgagaugcagagcucccugcugcagcagcacauggagcuccuggagagcuccgugaucccgcuggugcacccccucgccgaccccagcaccgucuucaaggacggggacgaggcggaggacuucguggaggugcaccuccccgacguccacaaccagguguccggcguggaccuggggcucccgaacuggggcaaguacguccugcugagcgccggcgcccucaccgcccugaugcugaucaucuuccugaugacgugcugccggcgcgugaaccgcuccgagcccacccagcacaaccuccgggggaccggccgcgaggugagcgucacgccccaguccgggaagaucaucagcuccugggagagccacaagagcggcggggagaccauccuguga

SEQ ID NO: 96003 - RNA, 1575 nt, Artificial Sequence
  derived and/or modified CDS sequence (opt1) from glycoprotein__RABV__LN713666.1
auggugccccaggcccugcuguucgucccccugcugguguucccccucugcuucggcaaguuccccaucuacaccauccccgacaagcuggggccguggagccccaucgacauccaccaccuguccugccccaacaaccucguggucgaggacgagggcugcaccaaccugagcggguucuccuacauggagcugaaggugggcuacauccucgccaucaaggugaacggguucacgugcaccggcgucgugaccgaggcggagaccuacacgaacuucgugggcuacgucaccaccaccuucaagcgcaagcacuuccggcccacgccggacgccugccgcgccgccuacaacuggaagauggccggggacccccgguacgaggagagccugcacaaccccuaccccgacuaccgcuggcugcggaccgugaagaccaccaaggagucccucgugaucaucagcccguccgucgcggaccuggaccccuacgaccgcagccugcacucccggguguuccccagcggcaagugcuccgggguggccgucagcuccacguacugcagcaccaaccacgacuacaccaucuggaugcccgagaacccgcgccucggcauguccugcgacaucuucaccaacagccgggggaagcgcgccuccaagggcagcgagacgugcggcuucguggacgagcgggggcuguacaagucccugaagggcgccugcaagcucaugcugugcggggugcugggccuccgccugauggacggcaccugggucagcaugcagaccagcaacgagaccaaguggugcccgcccgacaagcuggugaaccuccacgacuuccgguccgacgagaucgagcaccugguggucgaggagcuggugcgcaagcgggaggagugccucgacgcgcuggagagcaucaugacgaccaaguccgugagcuuccgccggcugucccaccuccgcaagcugguccccggguucggcaaggccuacaccaucuucaacaagacccugauggaggccgacgcccacuacaagagcguggagacguggaacgagauccuccccuccaaggggugccugcgggucggcgggcgcugccacccccacgugaacggcguguucuucaacggcaucauccuggggcccgacggcaacguccucauccccgagaugcagagcucccugcugcagcagcacauggagcuccuggagagcuccgugaucccgcuggugcacccccucgccgaccccagcaccgucuucaaggacggggacgaggcggaggacuucguggaggugcaccuccccgacguccacaaccagguguccggcguggaccuggggcucccgaacuggggcaaguacguccugcugagcgccggcgcccucaccgcccugaugcugaucaucuuccugaugaccugcugccggcgcgugaaccgcuccgagcccacgcagcacaaccuccgggggaccggccgcgaggugagcgucaccccgcaguccgggaagaucaucagcuccugggagagccacaagagcggcggggagaccauccuguga

SEQ ID NO: 96004 - RNA, 1575 nt, Artificial Sequence
  derived and/or modified CDS sequence (opt1) from glycoprotein__RABV__LN879481.2
auggugccccaggcccuccuguucgucccgcugcugggcuucagccucugcguggggaaguuccccaucuacaccauccccgacaagcugggccccugguccccgaucgacauccaccaccugagcugccccaacaaccucguggucgaggacgaggggugcaccaaccuguccggcuucagcuacauggagcugaaggugggguacaucuccgccaucaaggugaacggcuucacgugcaccggcgucgugaccgaggcggagaccuacacgaacuucgugggguacgucaccaccaccuucaagcgcaagcacuuccggcccacgcccgacgccugccgcgccgccuacaacuggaagauggccggcgacccgcgguacgaggagagccuccacaaccccuaccccgacuaccacuggcugcgcaccgugaagaccaccaaggagucccuggugaucaucagccccuccgucgcggaccucgacccguacgacaagagccugcacucccggguguuccccgggggcaagugcagcgggaucacgguguccagcaccuacugcuccaccaaccacgacuacaccaucuggcugcccgagaacccccgccucggcacgagcugcgacaucuucaccaacucccggggcaagcgcgccagcaagggguccaagaccugcggcuucgucgacgagcgggggcuguacaagagccugaagggcgccugcaagcucaagcugugcggcgugcuggggcuccgccugaucgacggcaccuggguggccaugcagacgagcaacgagaccaaguggugcccgcccgaccagcuggucaaccuccacgacuuccgguccgacgagaucgagcaccuggugguggaggagcuggucaagaagcgcgaggagugccucgacgcgcuggagagcaucaugaccaccaaguccgugagcuuccggcgccugucccaccuccggaagcuggugcccggguucggcaaggccuacacgaucuucaacaagacccugauggaggccgacgcccacuacaagagcguccgcaccuggaacgagaucauccccuccaaggggugccuccgggugggcggccgcugccaccaccacgucaacgggguguucuucaacggcaucauccuggggccggacggccacgugcugauccccgagaugcagagcucccuccugcagcagcacauggagcugcucgagagcuccgucaucccccugaugcacccccuggccgacccgagcaccguguucaaggacggggacgaggcggaggacuucguggagguccaccuccccgacgugcacaagcaggucuccggcguggaccugggccugcccaacugggggaaguacgugcuccugagcgccggcgcccugaucgcccucaugcugaucaucuuccugaugacgugcugccggcgcgugaaccggcccgaguccacccagccgagcuuccgcgggaccgagcgcaaggucuccaucacgccccagagcggcaaggugaucuccagcugggagagcuacaaguccgggggcgagacccggcuguga

SEQ ID NO: 96005 - RNA, 1575 nt, Artificial Sequence; identical to SEQ ID NO: 95498
  derived and/or modified CDS sequence (opt1) from glycoprotein__RABV__LT598537.1

SEQ ID NO: 96006 - RNA, 1575 nt, Artificial Sequence; identical to SEQ ID NO: 95805
  derived and/or modified CDS sequence (opt1) from glycoprotein__RABV__LT598538.1

SEQ ID NO: 96007 - RNA, 1575 nt, Artificial Sequence
  derived and/or modified CDS sequence (opt1) from glycoprotein__RABV__LT598540.1
auggugccccaggcccugcuguucgucccgcugcuggccuuccccaugugcuucggcaaguuccccaucuacaccauccccgacaagcuggggccguggagccccaucgacauccaccaccuguccugccccaacaaccuggugguggaggacgagggcugcaccaaccucagcggguucuccuacauggagcugaaggucggcuacaucagcgcgaucaaggugaacggguucacgugcaccggcguggucaccgaggccgagaccuacacgaacuucgugggcuacgugaccaccaccuucaagcgcaagcacuuccggcccacgccggacgccugccgcgccgccuacaacuggaagauggcgggggacccccgguacgaggagucccugcacaaccccuaccccgacuaccacuggcuccgcaccgucaagaccaccaaggagagccugaucaucaucuccccgagcguggccgaccuggaccccuacgacaagucccuccacagccggguguuccccuccggcaagugccuggggaucacgaucagcuccaccuacugcagcaccaaccacgacuacaccaucuggaugcccgagaacguccgccugggcacguccugcgacaucuucaccaacagccgggggaagcgcgccuccaagggcagcaagaccugcggcuucguggacgagcgggggcucuacaagucccugaagggcgccugcaagcugaagcucugcggggugcugggccugcgccucauggacggcaccugggucgcgaugccgacgagcgacgagaccaaguggugcccgcccgaccagcuggugaaccugcacgacuuccggagcgacgagaucgagcaccucguggucgaggagcuggugcgcaagcgggaggagugccuggacgcccucgaguccaucaugaccaccaagagcguguccuuccgccggcugagccaccuccgcaagcucguccccggguucggcaaggccuacacgaucuucaacaagacccugauggaggccgacgcccacuacaaguccgugcggaccuggaacgagaucauccccagcaaggggugccugcgcgugggcgggcggugccacccccacgucaacggcguguucuucaacggcaucauccucgggcccgacggccacguccugauccccgagaugcaguccagccugcuccagcagcacauggagcugcuggaguccagcgugaucccgcucaugcacccccuggcggaccccuccaccguguucaaggacggggacgaggccgaggacuucgucgaggugcaccuccccgacgugcacaagcagaucagcggcgucgaccuggggcugccgaacuggggcaaguacgugcugaugaucgccggcgugcucaucgccaugauccugacgaucuuccugaugaccugcugcgggcgcggcaaccggcucaaguccacccagcacagccucgggggcaucgggcgcaaggucuccagcaccucccagagcggcaaggugaucuccagcugggagagcuacaaguccggcggggagacgcgccuguga

SEQ ID NO: 96008 - RNA, 1575 nt, Artificial Sequence
  derived and/or modified CDS sequence (opt1) from glycoprotein__RABV__LT598541.1
auggugccccaggcccugcuguucgucccgcugcuggccuuccccaugugcuucggcaaguuccccaucuacaccauccccgacaagcucgggccguggagccccaucgacauccaccaccuguccugccccaacaaccuggugguggaggacgagggcugcaccaaccucagcggguucuccuacauggagcugaaggucggcuacaucagcgcgaucaaggugaacggguucacgugcaccggcguggucaccgaggccgagaccuacacgaacuucgugggcuacgugaccaccaccuucaagcgcaagcacuuccggcccacgccggacgccugccgcgccgccuacaacuggaagauggcgggggacccccgguacgaggagucccugcacaaccccuaccccgacuaccacuggcuccgcaccgucaagaccaccaaggagagccugaucaucaucuccccgagcguggccgaccuggaccccuacgacaagucccuccacagccggguguuccccuccggcaagugccuggggaucacgaucagcuccaccuacugcagcaccaaccacgacuacaccaucuggaugcccgagaacguccgccugggcacguccugcgacaucuucaccaacagccgggggaagcgcgccuccaagggcagcaagaccugcggcuucguggacgagcgggggcucuacaagucccugaagggcgccugcaagcugaagcucugcggggugcugggccugcgccucauggacggcaccugggucagcaugccgacgagcgacgagaccaaguggugcccgcccgaccagcuggugaaccugcacgacuuccgguccgacgagaucgagcaccucguggucgaggagcuggugcgcaagcgggaggagugccuggacgcgcucgagagcaucaugaccaccaaguccgugagcuuccgccggcugucccaccuccgcaagcucguccccggguucggcaaggccuacacgaucuucaacaagacccugauggaggccgacgcccacuacaagagcgugcggaccuggaacgagaucauccccuccaaggggugccugcgcgugggcgggcggugccacccccacgucaacggcguguucuucaacggcaucauccucgggcccgacggccacguccugauccccgagaugcagagcucccugcuccagcagcacauggagcugcuggagagcuccgugaucccgcucaugcacccccuggccgaccccagcaccguguucaaggacggggacgaggcggaggacuucgucgaggugcaccuccccgacgugcacaagcagaucuccggcgucgaccuggggcugccgaacuggggcaaguacgugcugaucaucgccggcgugcucaucgccaugauccugacgaucuuccugacgaccugcugcgggcgcggcaaccggcccaagagcacccagcacucccucgggggcaucgggcgcaaggucagcuccaccagccaguccggcaaggugaucagcagcugggaguccuacaagagcggcggggagacccgccuguga

SEQ ID NO: 96009 - RNA, 1575 nt, Artificial Sequence; identical to SEQ ID NO: 95833
  derived and/or modified CDS sequence (opt1) from glycoprotein__RABV__LT598543.1

SEQ ID NO: 96010 - RNA, 1575 nt, Artificial Sequence; identical to SEQ ID NO: 95455
  derived and/or modified CDS sequence (opt1) from glycoprotein__RABV__M13215.1

SEQ ID NO: 96011 - RNA, 1575 nt, Artificial Sequence
  derived and/or modified CDS sequence (opt1) from glycoprotein__RABV__M32751.1
auggugccccagguccugcuguucgccccgcugcugguguucccccucugcuucggcaaguuccccaucuacaccauccccgacaagcuggggccguggagccccaucgaccugcaccaccucuccugccccaacaaccugguggucgaggacgagggcugcaccaaccugagcggguucuccuacauggagcucaaggugggcuacaucagcgccaucaaggugaacggguucacgugcaccggcgucgugaccgaggcggagaccuacacgaacuucgugggcuacgucaccaccaccuucaagcgcaagcacuuccggcccacgccggacgccugccgcgccgccuacaacuggaagauggccggggacccccgguacgaggagucccugcacaaccccuaccccgacuaccacuggcugcgcaccgugaagaccaccaaggagagccucgugaucaucuccccgagcgucacggaccuggaccccuacgacaagucccugcacagccggguguuccccggcgggaacugcuccggcaucaccgugagcuccaccuacugcagcaccaaccacgacuacacgaucuggaugcccgagaaccuccgccuggggaccuccugcgacaucuucacccacagccggggcaagcgcgcguccaagggcgacaagaccugcggguucgucgacgagcggggccuguacaagagccucaagggggccugcaagcugaagcugugcggcgugcucggccugcgccugauggacgggacguggguggccaugcagaccuccgacgagaccaaguggugcccgcccggccagcucgucaaccugcacgacuuccggagcgacgagaucgagcaccugguggaggaggagcucgugaagaagcgcgaggagugccuggacgcccuggagagcaucaugaccacgaaguccgucagcuuccggcgccucucccaccuccggaagcuggugcccggguucggcaaggcguacaccaucuucaacaagacccucauggaggccgacgcccacuacaagagcgugcagaccuggaacgagaucauccccuccaaggggugccugcgcgucggcgagcggugccacccgcacgugaacggcgucuucuucaacgggaucauccugggcagcgacgggcacgugcucauccccgagaugcaguccagccugcugcagcagcacauggagcuccuggaguccagcgugaucccccugaugcacccccucgccgacccguccacggucuucaaggacggcgacgagguggaggacuucguggagguccaccuccccgacgugcacaagcaggucagcgggguggaccugggccugcccaaguggggcaaguacgugcugaugaucgccggggcgcugaucgcccucaugcugaucaucuuccugaugaccugcugccgccgggugaaccgccccgaguccacccagagcaaccugggcgggaccggccggaacgucuccgugccgagccaguccgggaaggugaucagcuccugggagagcuacaagagcggcggcgagacgcgccucuga

SEQ ID NO: 96012 - RNA, 1575 nt, Artificial Sequence
  derived and/or modified CDS sequence (opt1) from glycoprotein__RABV__M81058.1
auggugccccaggcccugcuguucgucccgcugcugguguucccccucugcuucggcaaguuccccaucuacaccauccccgacaagcuggggccguggagccccaucgacauccaccaccuccgcugccccaacaaccucguggucgaggacgagggcugcaccaaccuguccggguucagcuacauggagcugaaggugggcuacaucuccgccaucaaggugaacggguucacgugcaccggcgucgugaccgaggcggagaccuacacgaacuucgugggcuacgucaccaccaccuucaagcggaagcacuuccgccccacgccggacgccugccgggccgccuacaacuggaagauggccggggacccccgcuacgaggagagccuccacaaccccuaccccgacuaccacuggcugcggaccgugaagaccaccaaggagucccuggugaucaucagcccguccgucgcggaccucgaccccuacgacaagagccugcacucccgcguguuccccagcggcaacugcuccgggaucacggugagcuccaccuacugcagcaccaaccacgacuacaccaucuggaugcccgagaacccgcggcuggagacguccugcgacaucuucaccaacagccgcggcaagcgggccuccaaggggagcaagaccugcggcuucgucgacgagcgcggccucuacaagucccugaagggggccugcaagcugaagcucugcggcgugcuggggcugcggcucauggacggcaccuggguggccaugcagacgagcgacgagaccaaguggugcccgcccgaccagcuggucaaccugcacgacuuccgcagcgacgagaucgagcaccucgugguggaggagcuggucaagaagcgggaggagugccuggacgcgcucgaguccaucaugaccaccaagagcguguccuuccgccggcugagccaccuccgcaagcuggugcccggcuucgggaaggccuacacgaucuucaacaagacccugauggaggccgacgcccacuacaaguccguccggaccuggaacgagaucauccccagcaagggcugccugcgcgucgggggccggugccacccccacgugaacgggguguucuucaacggcaucauccucggccccgacgggcacgugcugauccccgagaugcaguccagccugcuccagcagcacauggagcugcuggaguccagcgucaucccgcucaugcacccccuggccgaccccuccaccguguucaaggacggcgacgaggcggaggacuucguggagguccaccuccccgacgugcacaagcaggucagcgggguggaccugggccugccgaacugggggaaguacgugcugcucuccgccggcacgcugaucgcccugaugcucaucaucuuccugaugaccugcugccgccgggugaaccgccccaagagcaccgagcgcucccugggcgagaccgggcggaaggucagcgugacgucccagagcggcaaggugaucuccagcugggagagcuacaaguccgggggcgagacccgccgguga

SEQ ID NO: 96013 - RNA, 1575 nt, Artificial Sequence
  derived and/or modified CDS sequence (opt1) from glycoprotein__RABV__M81059.1
auggugccccaggcccugcuguucgucccgcugcugguguucccccucugcuucggcaaguuccccaucuacaccauccccgacaagcuggggccguggagccccaucgacauccaccaccuccgcugccccaacaaccucguggucgaggacgagggcugcaccaaccuguccggguucagcuacauggagcugaaggugggcuacaucuccgccaucaaggugaacggguucacgugcaccggcgucgugaccgaggcggagaccuacacgaacuucgugggcuacgucaccaccaccuucaagcggaagcacuuccgccccacgccggacgccugccgggccgccuacaacuggaagauggccggggacccccgcuacgaggagagccuccacaaccccuaccccgacuaccacuggcugcggaccgugaagaccaccaaggagucccuggugaucaucagcccguccgucgcggaccucgaccccuacgacaagagccugcacucccgcguguuccccagcggcaacugcuccgggaucacggugagcuccaccuacugcagcaccaaccacgacuacaccaucuggaugcccgagaacccgcggcuggagacguccugcgacaucuucaccaacagccgcggcaagcgggccuccaaggggagcaagaccugcggcuucgucgacgagcgcggccucuacaagucccugaagggggccugcaagcugaagcucugcggcgugcuggggcugcggcucauggacggcaccuggguggccaugcagacgagcgacgagaccaaguggugcccgcccgaccagcuggucaaccugcacgacuuccgcagcgacgagaucgagcaccucgugguggaggagcuggucaagaagcgggaggagugccuggacgcgcucgaguccaucaugaccaccaagagcgugucccugcgccggcugagccaccuccgcaagcuggugcccggcuucgggaaggccuacacgaucuucaacaagacccugauggaggccgaggcccacuacaaguccguccagaccuggaacgagaucauccccagcaagggcugccuccgggucgggggccgcugccacccccacgugaacgggguguucuucaacggcaucauccugggccccgacgggcacgugcugauccccgagaugcaguccagccuccugcagcagcacauggagcugcucgaguccagcgucaucccgcugaugcacccccuggccgaccccuccaccguguucaaggacggcgacgaggcggaggacuucguggagguccaccuccccgacgugcacaagcaggucagcgggguggaccugggccugccgaacugggggaaguacgugcuccuguccgccggcacgcugaucgcccucaugcugaucaucuuccugaugaccugcugccggcgcgugaaccggcccaagagcaccgagcgcucccugggcgagaccgggcgcaaggucagcgugacgucccagagcggcaaggugaucuccagcugggagagcuacaaguccgggggcgagacccggcgcuga

SEQ ID NO: 96014 - RNA, 1575 nt, Artificial Sequence
  derived and/or modified CDS sequence (opt1) from glycoprotein__RABV__M81060.1
auggugccgcaggcccugcuguucgucccgcugcugguguucagccucugcuucggcaaguuccccaucuacaccauccccgacaagcuggggcccugguccccgaucgacauccaccaccugagcugccccaacaaccucguggucgaggacgagggcugcaccaaccuguccggguucagcuacauggagcugaaggugggcuacaucuccgccaucaaggugaacggguucacgugcaccggcgucgugaccgaggcggagaccuacacgaacuucgugggcuacgucaccaccaccuucaagcgcaagcacuuccggcccacgcccgacgccugccgcgccgccuacaacuggaagauggccggggacccgcgguacgaggagagccuccacaaccccuaccccgacuaccacuggcugcgcaccgugaagaccaccaaggagucccuggugaucaucagccccuccgucgcggaccucgacccguacgacaagagccugcacucccggguguuccccagcggcaacugcuccgggaucacggugagcuccaccuacugcagcaccaaccacgacuacaccaucuggaugcccgagaacccccgccuggagacguccugcgacaucuucaccaacagccggggcaagcgcgccuccaaggggagcaagaccugcggcuucgucgacgagcggggccucuacaagagccugaagggggccugcaagcugaagcucugcggcgugcuggggcugcgccucauggacggcaccuggguggccaugcagacguccgacgagaccaaguggugcccgcccgaccagcuggucaaccugcacgacuuccggagcgacgagaucgagcaccucgugguggaggagcuggucaagaagcgcgaggagugccuggacgcgcucgaguccaucaugaccaccaagagcguguccuuccggcgccugagccaccuccggaagcucgugcccggcuucgggaaggccuacacgaucuucaacaagacccugauggaggccgacgcccacuacaaguccguccgcaccuggaacgagaucauccccagcaagggcugccugcgggucgggggccgcugccacccgcacgugaacgggguguucuucaacggcaucauccucggccccgacgggcacgugcugauccccgagaugcaguccagccugcuccagcagcacauggagcugcuggaguccagcgucaucccccucaugcacccgcuggccgaccccuccaccguguucaaggacggcgacgagggggaggacuucguggagguccaccuccccgacgugcacaagcaggucagcggcguggaccuggggcugcccaacuggggcaaguacgugcugcucuccgcgggcacgcugaucgcccugaugcucaucaucuuccugaugaccugcugccggcgcgugaaccggcccaagagcaccgagcgcucccugggggagaccggccgcgaggucagcgugacgucccagagcgggaagaucaucagcuccugggagagcuacaaguccggcggggagacccggcgcuga

SEQ ID NO: 96015 - RNA, 1575 nt, Artificial Sequence
  derived and/or modified CDS sequence (opt1) from glycoprotein__RABV__S72465.1
auggugccccaggcccugcuccuggucccgauccugggcuucagcuccugcuucgggaaguuccccaucuacaccauccccgacacccucggccccuggagcccgaucgacauccaccaccuguccugccccaacaaccuggugguggaggacgaggggugcacgaaccucagcggcuucuccuacauggagcugaaggucgggcacaucagcgccaucaaggugaacggcuucacgugcaccggcguggucaccgaggcggagaccuacaccaacuucgugggguacgugaccaccacguucaagcgcaagcacuuccggcccacccccgacgccugccgcgccgccuacaacuggaagauggccggcgacccgcgguacgaggagucccugcacagccccuaccccgacuaccacuggcuccgcaccgucaagaccacgaaggagucccuggugaucaucagccccuccguggcggaccuggacccguacgacaacagccuccacucccgggucuuccccagcgggaagugcuccggcaucaccgugagcuccguguacugcagcaccaaccacgacuacaccgucuggaugcccgagucccugcgccuggggacgagcugcgacaucuucaccaacagccggggcaagcgcguguccaagggcagcaagaccugcggguucguggacgagcggggccucuacaagucccugaagggggccugcaagcugaagcucugcggcguccgcggccugcggcugauggacgggaccuggguggccaugcagacgagcaacgagaccaaguggugcccgcccgaccagcucgugaaccugcacgaccugcgcuccgacgagaucgagcaccucgucaucgaggagcuggugaagaagcgggaggagugccuggacgcccucgagagcaucaucaccaccaaguccgugagcuuccgccggcuguccuaccugcgcaagcucguccccggcuucgggaaggcguacacgaucuucaacaagacccugauggaggccgaggcccacuacaagagcgugcggaccuggaacgagaucauccccuccaagggcugccugcgcgucgggggccggugccacccccacgugaacggcguguucuucaacgggaucauccucggcccggacgggcacguccugauccccgagaugcagagcucccugcuccagcagcacaucgagcugcuggagagcuccgugaucccccucaugcacccccuggccgacccguucaccguguucaaggacggcgacgagacggaggacuucaucgagguccaccuccccgacgugcacgagcaggucagcgggguggaccugggccugcccaacuggggcgaguacgugcugcucuccgccgggacccugaucgcgcugaugcucaucaucuuccugaugaccugcugccgcaagguggaccggcccgagagcacccagcgcucccugcgcggcacggggcggaacgucagcgugaccagccaguccggcaaguucaucccgagcugggaguccuacaagagcgggggcgagaccggccuguga

SEQ ID NO: 96016 - RNA, 1575 nt, Artificial Sequence
  derived and/or modified CDS sequence (opt1) from glycoprotein__RABV__U03764.1
auggugccccaggcccugcuguucgucccgcugcuggccuuccccaugugcuucggcaaguuccccaucuacaccauccccgacaagcucgggccguggagccccaucgacauccaccaccuguccugccccaacaaccuggugguggaggacgagggcugcaccaaccucagcggguucuccuacauggagcugaaggucggcuacaucagcgcgaucaaggugaacggguucacgugcaccggcguggucaccgaggccgagaccuacacgaacuucgugggcuacgugaccaccaccuucaagcgcaagcacuuccggcccacgccggacgccugccgcgccgccuacaacuggaagauggcgggggacccccgguacgaggagucccugcacaaccccuaccccgacuaccacuggcuccgcaccgucaagaccaccaaggagagccugaucaucaucuccccgagcguggccgaccuggaccccuacgacaagucccuccacagccggguguuccccuccggcaagugccuggggaucacgaucagcuccaccuacugcagcaccaaccacgacuacaccaucuggaugcccgagaaccugcgccucggcacguccugcgacaucuucaccaacagccgggggaagcgcgccuccaagggcagcaagaccugcggcuucgucgacgagcgggggcuguacaagucccugaagggcgccugcaagcucaagcugugcggggugcugggccuccgccugauggacggcaccuggguggcgaugcagacgagcgacgagaccaaguggugcccgcccgaccagcuggucaaccuccacgacuuccggagcgacgagaucgagcaccuggugguggaggagcuggucaagaagcgcgaggagugccucgacgcccuggaguccaucaugaccaccaagagcguguccuuccggcgccugagccaccuccggaagcuggugcccggguucggcaaggccuacacgaucuucaacaagacccugauggaggccgacgcccacuacaaguccguccgcaccuggaacgagaucauccccagcaaggggugccuccgggugggcgggcgcugccacccgcacgugaacggcgucguguucaacggcaucauccuggggcccgacggccacguccugauccccgagaugcaguccagccuccugcagcagcacauggagcugcucgaguccagcgugaucccccugaugcacccgcuggcggaccccuccaccguguucaaggacggggacgaggccgaggacuucgucgaggugcaccuccccgacgugcacaagcagaucagcggcgucgaccuggggcugcccaacuggggcaaguacgugcucaucaucgccggcgugcugaucgccaugauccugacgaucuuccucaugaccugcugcgggcggggcaaccgcccgaaguccacccagcacagccucgggggcaucgggcggaaggucuccgccaccagccaguccggcaaggugaucagcuccugggagagcuacaagagcggcggggagacgcgccuguga

SEQ ID NO: 96017 - RNA, 1575 nt, Artificial Sequence
  derived and/or modified CDS sequence (opt1) from glycoprotein__RABV__U03765.1
auggugccccaggcccugcuguucgucccgcugcuggccuuccccaugugcuucggcaaguuccccaucuacaccauccccgacaagcucgggccguggagccccaucgacauccaccaccuguccugccccaacaaccuggugguggaggacgagggcugcaccaaccucagcggguucuccuacauggagcugaaggucggcuacaucagcgcgaucaaggugaacggguucacgugcaccggcguggucaccgaggccgagaccuacacgaacuucgugggcuacgugaccaccaccuucaagcgcaagcacuuccggcccacgccggacgccugccgcgccgccuacaacuggaagauggcgggggacccccgguacgaggagucccugcacaaccccuaccccgacuaccacuggcuccgcaccgucaagaccaccaaggagagccugaucaucaucuccccgagcguggccgaccuggaccccuacgacaagucccuccacagccggguguuccccuccggcaagugccuggggaucacgaucagcuccaccuacugcagcaccaaccacgacuacaccaucuggaugcccgagaacguccgccugggcacguccugcgacaucuucaccaacagccgggggaagcgcgccuccaagggcagcaagaccugcggcuucguggacgagcgggggcucuacaagucccugaagggcgccugcaagcugaagcucugcggggugcugggccugcgccucauggacggcaccugggucgcgaugccgacgagcgacgagaccaaguggugcccgcccgaccagcuggugaaccugcacgacuuccggagcgacgagaucgagcaccucguggucgaggagcuggugcgcaagcgggaggagugccuggacgcccucgaguccaucaugaccaccaagagcguguccuuccgccggcugagccaccuccgcaagcucguccccggguucggcaaggccuacacgaucuucaacaagacccugauggaggccgacgcccacuacaaguccgugcggaccuggaacgagaucauccccagcaaggggugccugcgcgugggcgggcggugccacccccacgucaacggcguggucuucaacggcaucauccucgggcccgacggccacgugcugauccccgagaugcaguccagccugcuccagcagcacauggagcugcuggaguccagcgugaucccgcucaugcacccccuggcggaccccuccaccgucuucaaggacggggacgaggccgaggacuucguggaggugcaccuccccgacguccacaagcagaucagcggcguggaccuggggcugccgaacuggggcaaguacgugcugacgaucgccggcguccucaucgccaugauccugaccaucuuccugaugaccugcugcgggcgcggcaaccggcccaaguccacccagcacagccucgggggcaucgggcgcaagguguccagcacgucccagagcggcaaggugaucuccagcugggagagcuacaaguccggcggggagacccgccuguga

SEQ ID NO: 96018 - RNA, 1575 nt, Artificial Sequence
  derived and/or modified CDS sequence (opt1) from glycoprotein__RABV__U03766.1
auggugccccaggcccugcuguucgucccgcugcuggccuuccccaugugcuucggcaaguuccccaucuacaccauccccgacaagcucgggccguggagccccaucgacauccaccaccuguccugccccaacaaccuggugguggaggacgagggcugcaccaaccucagcggguucuccuacauggagcugaaggucggcuacaucagcgcgaucaaggugaacggguucacgugcaccggcguggucaccgaggccgagaccuacacgaacuucgugggcuacgugaccaccaccuucaagcgcaagcacuuccggcccacgccggacgccugccgcgccgccuacaacuggaagauggcgggggacccccgguacgaggagucccugcacaaccccuaccccgacuaccacuggcuccgcaccgucaagaccaccaaggagagccugaucaucaucuccccgagcguggccgaccuggaccccuacgacaagucccuccacagccggguguuccccuccggcaagugccuggggaucacgaucagcuccaccuacugcagcaccaaccacgacuacaccaucuggaugcccgagaacguccgccugggcacguccugcgacaucuucaccaacagccgggggaagcgcgccuccaagggcagcaagaccugcggcuucguggacgagcgggggcucuacaagucccugaagggcgccugcaagcugaagcucugcggggugcugggccugcgccucauggacggcaccugggucgcgaugccgacgagcgacgagaccaaguggugcccgcccgaccagcuggugaaccugcacgacuuccggagcgacgagaucgagcaccucguggucgaggagcuggugcgcaagcgggaggagugccuggacgcccucgaguccaucaugaccaccaagagcguguccuuccgccggcugagccaccuccgcaagcucguccccggguucggcaaggccuacacgaucuucaacaagacccugauggaggccgacgcccacuacaaguccgugcggaccuggaacgagaucauccccagcaaggggugccugcgcgugggcgggcggugccacccccacgucaacggcguggucuucaacggcaucauccucgggcccgacggccacgugcugauccccgagaugcaguccagccugcuccagcagcacauggagcugcuggaguccagcgugaucccgcucaugcacccccuggcggaccccuccaccgucuucaaggacggggacgaggccgaggacuucguggaggugcaccuccccgacguccacaagcagaucagcggcguggaccuggggcugccgaacuggggcaaguacgugcugaucaucgccggcguccucaucgccaugauccugacgaucuuccugaugaccugcugcgggcgcggcaaccggcccaaguccacccagcacagccucgggggcaucgggcgcaagguguccagcaccucccagagcggcaaggugaucuccagcugggagagcuacaaguccggcggggagacgcgccuguga

SEQ ID NO: 96019 - RNA, 1575 nt, Artificial Sequence
  derived and/or modified CDS sequence (opt1) from glycoprotein__RABV__U03767.1
auggugccccaggcccugcuguucgucccgcugcuggccuuccccaugugcuucggcaaguuccccaucuacaccauccccgacaagcucgggccguggagccccaucgacauccaccaccuguccugccccaacaaccuggugguggaggacgagggcugcaccaaccucagcggguucuccuacauggagcugaaggucggcuacaucagcgcgaucaaggugaacggguucacgugcaccggcguggucaccgaggccgagaccuacacgaacuucgugggcuacgugaccaccaccuucaagcgcaagcacuuccggcccacgccggacgccugccgcgccgccuacaacuggaagauggcgggggacccccgguacgaggagucccugcacaaccccuaccccgacuaccacuggcuccgcaccgucaagaccaccaaggagagccugaucaucaucuccccgagcguggccgaccuggaccccuacgacaagucccuccacagccggguguuccccuccggcaagugccuggggaucacgaucagcuccaccuacugcagcaccaaccacgacuacaccaucuggaugcccgacaacguccgccugggcacguccugcgacaucuucaccaacagccgggggaagcgcgccuccaagggcagcaagaccugcggcuucguggacgagcgggggcucuacaagucccugaagggcgccugcaagcugaagcucugcggggugcugggccugcgccucauggacggcaccugggucgcgaugccgacgagcgacgagaccaaguggugcccgcccgggcagcuggugaaccugcacgacuuccggagcgacgagaucgagcaccucguggucgaggagcuggugcgcaagcgggaggagugccuggacgcccucgaguccaucaugaccaccaagagcguguccuuccgccggcugagccaccuccgcaagcucguccccggcuucgggaaggccuacacgaucuucaacaagacccugauggaggccgacgcccacuacaaguccgugcggaccuggaacgagaucauccccagcaagggcugccugcgcgucgggggccggugccacccccacgugaacggcguggucuucaacgggaucauccucggccccgacgggcacgugcugauccccgagaugcaguccagccugcuccagcagcacauggagcugcuggaguccagcgugaucccgcucaugcacccccuggcggaccccuccaccgucuucaaggacggcgacgaggccgaggacuucguggaggugcaccuccccgacguccacaagcagaucagcgggguggaccugggccugccgaacuggggcaaguacgugcugaucaucgccgggguccucaucgccaugauccugacgaucuuccugaugaccugcugcggccgcgggaaccggcccaaguccacccagcacagccucggcgggaucggccgcaagguguccagcaccucccagagcggcaaggugaucuccagcugggagagcuacaaguccgggggcgagacgcgccuguga

SEQ ID NO: 96020 - RNA, 1575 nt, Artificial Sequence
  derived and/or modified CDS sequence (opt1) from glycoprotein__RABV__U11736.2
auggugccccaggcccugcugcuggucccgcugcucgccuuccccaugugcuucggcaaguuccccaucuacaccauccccgacaagcuggggccguggagccccaucgacauccaccaccuguccugccccaacaaccucgugguggaggacgagggcugcaccaaccugagcggguucuccuacauggagcugaaggucggcuacaucagcgcgaucaaggugaacggguucacgugcaccggcguggucaccgaggccgagaccuacacgaacuucgugggcuacgugaccaccaccuucaagcgcaagcacuuccggcccacgccggacgccugccgcgccgccuacaacuggaagauggcgggggacccccgguacgaggagucccuccacaaccccuaccccgacuaccacuggcugcgcaccgucaagaccaugaaggagagccugaucaucaucuccccgagcguggccgaccucgaccccuacgacaagucccugcacagccggguguuccccuccggcaagugccuggggaucaccaucagcuccacguacugcagcaccaaccacgacuacaccaucuggaugcccgagaaccuccgccugggcaccuccugcgacaucuucacgaacagccgggggaagcgcgccuccaagggcagcaagaccugcggcuucgucgacgagcgggggcuguacaagucccucaagggcgccugcaagcugaagcugugcggggugcucggccugcgccugauggacggcaccuggguggcgaugcagaccagcgacgagacgaaguggugcccgcccgaccagcucgucaaccugcacgacuuccggagcgacgagaucgagcaccuggugguggaggagcucgucaagaagcgcgaggagugccuggacgcccuggaguccaucaugaccaccaagagcguguccuuccggcgccucagccaccuccggaagcuggugcccggguucggcaaggccuacaccaucuucaacaagacgcugauggaggccgacgcccacuacaaguccguccgcaccuggaacgagaucauccccagcaaggggugccugcgggugggcgggcgcugccacccgcacgugaacggcgucguguucaacggcaucauccuggggcccgacggccacguccucauccccgagaugcaguccagccugcugcagcagcacauggagcuccuggaguccagcgugaucccccugaugcacccgcucgcggaccccuccaccguguucaaggacggggacgaggccgaggacuucgucgaggugcaccuccccgacgugcacaagcagaucagcggcgucgaccuggggcugcccaacuggggcaaguacgugcugaucaucgccggcgugcugaucgccaugauccucaccaucuuccugaugacgugcugcgggcggggcaaccgcuccaagagcacccagcacucccucgggggcaucgggcggaaggucagcgccaccucccagagcggcaaggugaucuccagcugggagagcuacaaguccggcagcgagacccgccuguga

SEQ ID NO: 96021 - RNA, 1575 nt, Artificial Sequence
  derived and/or modified CDS sequence (opt1) from glycoprotein__RABV__U11743.2
auggugccccaggcccugcuguucgucccgcugcuggccuuccccaugugcuucggcaaguuccccaucuacaccauccccgacaagcucgggccguggagccccaucgacauccaccaccuguccugccccaacaaccuggugguggaggacgagggcugcaccaaccucagcggguucuccuacauggagcugaaggucggcuacaucagcgcgaucaaggugaacggguucacgugcaccggcguggucaccgaggccgagaccuacacgaacuucgugggcuacgugaccaccaccuucaagcgcaagcacuuccggcccacgccggacgccugccgcgccgccuacaacuggaagauggcgggggacccccgguacgaggagucccugcacaaccccuaccccgacuaccacuggcuccgcaccgucaagaccaccaaggagagccugaucaucaucuccccgagcguggccgaccuggaccccuacgacaagucccuccacagccggguguuccccuccggcaagugccuggggaucacgaucagcuccaccuacugcagcaccaaccacgacuacaccaucuggaugcccgagaaccugcgccucggcacguccugcgacaucuucaccaacagccgggggaagcgcgccuccaagggcagcaagaccugcggcuucgucgacgagcgggggcuguacaagucccugaagggcgccugcaagcucaagcugugcggggugcugggccuccgccugauggacggcaccuggguggcgaugcagacgagcgacgagaccaaguggugcccgcccgaccagcuggucaaccuccacgacuuccggagcgacgagaucgagcaccuggugguggaggagcuggucaagaagcgcgaggagugccucgacgcccuggaguccaucaugaccaccaagagcguguccuuccggcgccugagccaccuccggaagcuggugcccggguucggcaaggccuacacgaucuucaacaagacccugauggaggccgacgcccacuacaaguccguccgcaccuggaacgagaucauccccagcaaggggugccuccgggugggcgggcgcugccacccgcacgugaacggcgucguguucaacggcaucauccuggggcccgacggccacguccugauccccgagaugcaguccagccuccugcagcagcacauggagcugcucgaguccagcgugaucccccugaugcacccgcuggcggaccccuccaccguguucaaggacggggacgaggccgaggacuucgucgaggugcaccuccccgacgugcacaagcagaucagcggcgucgaccuggggcugcccaacuggggcaaguacgugcucaucaucgccggcgugcugaucgccaugauccugacgaucuuccucaugaccugcugcgggcggggcaaccgcccgaaguccacccagcacagccucgggggcaucgggcggaaggucuccgccaccagccagucccgcaaggugaucagcuccugggagagcuacaagagcggcggcgagacgcgccuguga

SEQ ID NO: 96022 - RNA, 1575 nt, Artificial Sequence; identical to SEQ ID NO: 96021
  derived and/or modified CDS sequence (opt1) from glycoprotein__RABV__U11747.2

SEQ ID NO: 96023 - RNA, 1575 nt, Artificial Sequence; identical to SEQ ID NO: 96016
  derived and/or modified CDS sequence (opt1) from glycoprotein__RABV__U11748.2

SEQ ID NO: 96024 - RNA, 1575 nt, Artificial Sequence
  derived and/or modified CDS sequence (opt1) from glycoprotein__RABV__U11750.2
auggugccccaggcccugcuguucgucccgcugcuggccuuccccaugugcuucggcaaguuccccaucuacaccauccccgacaagcucgggccguggagccccaucgacauccaccaccuguccugccccaacaaccuggugguggaggacgagggcugcaccaaccucagcggguucuccuacauggagcugaaggucggcuacaucagcgcgaucaaggugaacggguucacgugcaccggcguggucaccgaggccgagaccuacacgaacuucgugggcuacgugaccaccaccuucaagcgcaagcacuuccggcccacgccggacgccugccgcgccgccuacaacuggaagauggcgggggacccccgguacgaggagucccugcacaaccccuaccccgacuaccacuggcuccgcaccgucaagaccaccaaggagagccugaucaucaucuccccgagcguggccgaccuggaccccuacgacaagucccuccacagccggguguuccccuccggcaagugccuggggaucacgaucagcuccaccuacugcagcaccaaccacgacuacaccaucuggaugcccgagaaccugcgccucggcacguccugcgacaucuucaccaacagccgggggaagcgcgccuccaagggcagcaagaccugcggcuucgucgacgagcgggggcuguacaagucccugaagggcgccugcaagcucaagcugugcggggugcugggccuccgccugauggacggcaccuggguggcgaugcagacgagcgaggagaccaaguggugcccgcccgaccagcuggucaaccuccacgacuuccggagcgacgagaucgagcaccuggugguggaggagcuggucaagaagcgcgaggagugccucgacgcccuggaguccaucaugaccaccaagagcguguccuuccggcgccugagccaccuccggaagcuggugcccggguucggcaaggccuacacgaucuucaacaagacccugauggaggccgacgcccacuacaaguccguccgcaccuggaacgagaucauccccagcaaggggugccuccgggugggcgggcgcugccacccgcacgugaacggcgucguguucaacggcaucauccuggggcccgacggccggguccugauccccgagaugcaguccagccuccugcagcagcacauggagcugcucgaguccagcgugaucccccugaugcacccgcuggcggaccccuccaccguguucaaggacggggacgaggccgaggacuucgucgaggugcaccuccccgacgugcacaagcagaucagcggcgucgaccuggggcugcccaacuggggcaaguacgugcucaucaucgccggcgugcugaucgccacgauccugaccaucuuccucauggccugcugcgggcgcggcaaccggccgaaguccacccagcacagccucgggggcaucgggcgcaaggucuccgcgaccagccaguccggcaaggugaucagcuccugggagagcuacaagagcggcggggagacgcgccuguga

SEQ ID NO: 96025 - RNA, 1575 nt, Artificial Sequence
  derived and/or modified CDS sequence (opt1) from glycoprotein__RABV__U11752.2
auggugccccaggcccugcuguucgucccgcugcuggccuuccccaugugcuucggcaaguuccccaucuacaccauccccgacaagcucgggccguggagccccaucgacauccaccaccuguccugccccaacaaccuggugguggaggacgagggcugcaccaaccucagcggguucuccuacauggagcugaaggucggcuacaucagcgcgaucaaggugaacggguucacgugcaccggcguggucaccgaggccgagaccuacacgaacuucgugggcuacgugaccaccaccuucaagcgcaagcacuuccggcccacgccggacgccugccgcgccgccuacaacuggaagauggcgggggacccccgguacgaggagucccugcacaaccccuaccccgacuaccacuggcuccgcaccgucaagaccaccaaggagagccugaucaucaucuccccgagcguggccgaccuggaccccuacgacaagucccuccacagccggguguuccccuccggcaagugccuggggaucacgaucagcuccaccuacugcagcaccaaccacgacuacaccaucuggaugcccgagaaccugcgccucggcacguccugcgacaucuucaccaacagccgggggaagcgcgccuccaagggcagcaagaccugcggcuucgucgacgagcgggggcuguacaagucccugaagggcgccugcaagcucaagcugugcggggugcugggccuccgccugauggacggcaccuggguggcgaugcagacgagcgacgagaccaaguggugcccgcccgaccagcuggucaaccuccacgacuuccggagcgacgagaucgagcaccuggugguggaggagcuggucaagaagcgcgaggagugccucgacgcccuggaguccaucaugaccaccaagagcguguccuuccggcgccugagccaccuccggaagcuggugcccggguucggcaaggccuacacgaucuucaacaagacccugauggaggccgacgcccacuacaaguccguccgcaccuggaacgagaucauccccagcaaggggugccuccgggugggcgggcgcugccacccgcacgugaacggcgucguguucaacggcaucauccuggggcccgacggccacguccugauccccgagaugcaguccagccuccugcagcagcacauggagcugcucgaguccagcgugaucccccugaugcacccgcuggcggaccccuccaccguguucaaggacggggacgaggccgaggacuucgucgaggugcaccuccccgacgugcacaagcagaucagcggcgucgaccuggggcugcccaacuggggcaaguacgugcucaucaucgccggcgugcugaucgucaugauccugacgaucuuccucaugaccugcugcgggcggggcaaccgcccgaaguccacccagcacagccucgggggcaucgggcggaagguguccgccaccagccaguccggcaaggugaucagcuccugggagagcuacaagagcggcggggagacgcgccuguga

SEQ ID NO: 96026 - RNA, 1575 nt, Artificial Sequence
  derived and/or modified CDS sequence (opt1) from glycoprotein__RABV__U11753.1
auggugccccaggcccugcuguucgucccgcugcuggccuuccccaugugcuucggcaaguuccccaucuacaccauccccgacaagcucgggccguggagccccaucgacauccaccaccuguccugccccaacaaccuggugguggaggacgagggcugcaccaaccucagcggguucuccuacauggagcugaaggucggcuacaucagcgcgaucaaggugaacggguucacgugcaccggcguggucaccgaggccgagaccuacacgaacuucgugggcuacgugaccaccaccuucaagcgcaagcacuuccggcccacgccggacgccugccgcgccgccuacaacuggaagauggcgggggacccccgguacgaggagucccugcacaaccccuaccccgacuaccacuggcuccgcaccgucaagaccaccaaggagagccugaucaucaucuccccgagcguggccgaccuggaccccuacgacaagucccuccacagccggguguuccccuccggcaagugccuggggaucacgaucagcuccaccuacugcagcaccaaccacgacuacaccaucuggaugcccgagaaccugcgccucggcacguccugcgacaucuucaccaacagccgggggaagcgcgccuccaagggcagcaagaccugcggcuucgucgacgagcgggggcuguacaagucccugaagggcgccugcaagcucaagcugugcggggugcugggccuccgccugauggacggcaccuggguggcgaugcagacgagcgacgagaccaaguggugcccgcccgaccagcuggucaaccuccacgacuuccggagcgacgagaucgagcaccuggugguggaggagcuggucaagaagcgcgaggagugccucgacgcccuggaguccaucaugaccaccaagagcguguccuuccggcgccugagccaccuccggaagcuggugcccggguucggcaaggccuacacgaucuucaacaagacccugauggaggccgacgcccacuacaaguccguccgcaccuggaacgagaucauccccagcaaggggugccuccgggugggcgggaagugccacccgcacgugaacggcgucuucuucaacggcaucauccuggggcccgacggccacgugcugauccccgagaugcaguccagccuccugcagcagcacauggagcugcucgaguccagcgucaucccccugaugcacccgcuggcggaccccuccaccguguucaaggacggggacgaggccgaggacuucguggagguccaccuccccgacgugcacaagcagaucagcggcguggaccuggggcugcccaacuggggcaaguacguccucaucaucgccggcgugcugaucgccaugauccugacgaucuuccucaugaccugcugcgggcgcggcaaccggccgaaguccacccagcacagccucgggggcaucgggcgcaagguguccgccaccagccaguccggcaaggucaucagcuccugggagagcuacaagagcggcggggagacgcggcuguga

SEQ ID NO: 96027 - RNA, 1575 nt, Artificial Sequence
  derived and/or modified CDS sequence (opt1) from glycoprotein__RABV__U11754.1
auggugccccaggcccugcuguucgucccgcugcuggccuuccccaugugcuucggcaaguuccccaucuacaccauccccgacaagcucgggccguggagccccaucgacauccaccaccuguccugccccaacaaccuggugguggaggacgagggcugcaccaaccucagcggguucuccuaccuggagcugaaggucggcuacaucagcgcgaucaaggugaacggguucacgugcaccggcguggucaccgaggccgagaccuacacgaacuucgugggcuacgugaccaccaccuucaagcgcaagcacuuccggcccacgccggacgccugccgcgccgccuacaacuggaagauggcgggggacccccgguacgaggagucccuccacaaccccuaccccgacuaccacuggcugcgcaccgucaagaccaccaaggagagcccgaucaucaucucccccagcguggccgaccuggaccccuacgacaagucccuccacagccggguguuccccuccggcaagugccuggggaucacgaucagcuccaccuacugcagcaccaaccacgacuacaccaucuggaugccggagaaccugcgccucggcacguccugcgacaucuucaccaacagccgggggaagcgcgccuccaagggcagcaaggccugcggcuucgucgacgagcgggggcuguacaagucccugaagggcgcgugcaagcucaagcugugcggggugcugggccuccgccugauggacggcaccuggguggccaugcagaccagcgacgagacgaaguggugcccgcccgaccagcuggucaaccuccacgacuuccggagcgacgagaucgagcaccuggugguggaggagcuggucaagaagcgcgaggagugccucgacgcccuggaguccaucaugaccaccaagagcguguccuuccggcgccugagccaccuccggaagcuggugcccggguucggcaaggccuacaccaucuucaacaagacgcugauggaggccgacgcgcacuacaaguccguccgcaccuggaacgagaucauccccagcaaggggugccuccgggugggcgggcgcugccacccccacgugaacggcgucuucuucaacggcaucauccuggggcccgacggccacgugcugauccccgagaugcaguccagccuccugcagcagcacauggagcugcucgaguccagcgucaucccgcugaugcacccccuggccgaccccuccaccguguucaaggacggggacgaggccgaggacuucguggagguccaccuccccgacgugcacaagcagaucagcggcguggaccuggggcugccgaacuggggcaaguacguccucaucaucgccggcgugcugaucgccaugcugcucaccguguuccugaugacgugcugcgggaagggcaaccggcccaaguccauccagcacagccucgggggcaucgggcgcaaggucuccgcgaccagccaguccggcaaggugaucagcuccugggagagcuacaagagcggcggggagacccggcuguga

SEQ ID NO: 96028 - RNA, 1575 nt, Artificial Sequence
  derived and/or modified CDS sequence (opt1) from glycoprotein__RABV__U11755.1
auggugccccaggcccugcugcuggucccgcugcucgccuuccccaugugcuucggcaaguuccccaucuacaccauccccgacaagcuggggccguggagccccaucgacauccaccaccuguccugccccaacaaccucgugguggaggacgagggcugcaccaaccugagcggguucuccuacauggagcugaaggucggcuacaucagcgcgaucaaggugaacggguucacgugcaccggcguggucaccgaggccgagaccuacacgaacuucgugggcuacgugaccaccaccuucaagcgcaagcacuuccggcccacgccggacgccugccgcgccgccuacaacuggaagauggcgggggacccccgguacgaggagucccuccacaaccccuaccccgacuaccacuggcugcgcaccgucaagaccaccaaggagagccugaucaucaucuccccgagcguggccgaccucgaccccuacgacaagucccugcacagccggguguuccccuccggcaagugccuggggaucacgaucagcuccaccuacugcagcaccaaccacgacuacaccaucuggaugcccgagaaccuccgccugggcacguccugcgacaucuucaccaacagccgggggaagcgcgccuccaagggcagcaagaccugcggcuucgucgacgagcgggggcuguacaagucccucaagggcgccugcaagcugaagcugugcggggugcucggccugcgccugauggacggcaccuggguggcgaugcagacgagcgacgagaccaaguggugcccgcccgaccagcucgucaaccugcacgacuuccggagcgacgagaucgagcaccuggugguggaggagcucgucaagaagcgcgaggagugccuggacgcccuggaguccaucaugaccaccaagagcguguccuuccggcgccucagccaccuccggaagcuggugcccggguucggcaaggccuacacgaucuucaacaagacccugauggaggccgacgcccacuacaaguccguccgcaccuggaacgagaucauccccagcaaggggugccugcgggugggcgggcgcugccacccgcacgugaacggcgucguguucaacggcaucauccuggggcccgacggccacguccucauccccgagaugcaguccagccugcugcagcagcacauggagcuccuggaguccagcgugaucccccugaugcacccgcucgcggaccccuccaccguguucaaggacggggacgaggccgaggacuucgucgaggugcaccuccccgacgugcacaagcagaucagcggcgucgaccuggggcugcccaacuggggcaaguacgugcugaucaucgccggcgugcugaucgccaugauccucacgaucuuccugaugaccugcugcgggcggggcaaccgcccgaaguccacccagcacagccucgggggcaucgggcggaaggucuccgccaccagccaguccggcaaggugaucagcuccugggagagcuacaagagcggcuccgagacgcgccuguga

SEQ ID NO: 96029 - RNA, 1575 nt, Artificial Sequence
  derived and/or modified CDS sequence (opt1) from glycoprotein__RABV__U11756.1
auggugccccaggcccugcuguucgucccgcugcuggccuuccccaugugcuucggcaaguuccccaucuacaccauccccgacaagcucgggccguggagccccaucgacauccaccaccuguccugccccaacaaccuggugguggaggacgagggcugcaccaaccucagcggguucuccuacauggagcugaaggucggcuacaucagcgcgaucaaggugaacggguucacgugcaccggcguggucaccgaggccgagaccuacacgaacuucgugggcuacgugaccaccaccuucaagcgcaagcacuuccggcccacgccggacgccugccgcgucgccuacaacuggaagauggccggggacccccgguacgaggagucccugcacaaccccuaccccgacuaccacuggcuccgcaccgugaagaccaccaaggagagccugaucaucaucuccccgagcguggcggaccuggaccccuacgacaagucccuccacagccgggucuuccccuccggcaagugccuggggaucacgaucagcuccaccuacugcagcaccaaccacgacuacaccaucuggaugcccgagaaccugcgccucggcacguccugcgacaucuucaccaacagccgggggaagcgcgccuccaagggcagcaagaccugcggcuucguggacgagcgggggcuguacaagucccugaagggcgccugcaagcucaagcugugcggggugcugggccuccgccugauggacggcaccugggucgccaugcagacgagcgacgagaccaaguggugcccgcccgaccagcuggugaaccuccacgacuuccggagcgacgagaucgagcaccugguggucgaggagcuggugaagaagcgcgaggagugccucgacgcgcuggaguccaucaugaccaccaagagcguguccuuccggcgccugagccaccuccggaagcugguccccggguucggcaaggccuacacgaucuucaacaagacccugauggaggccgacgcccacuacaaguccgugcgcaccuggaacgagaucauccccagcaaggggugccuccgggugggcgggaagugccacccgcacgucaacggcguggucuucaacggcaucauccuggggcccgacggccacgugcugauccccgagaugcaguccagccuccugcagcagcacauggagcugcucgaguccagcgugaucccccugaugcacccgcuggccgaccccuccaccgucuucaaggacggggacgaggcggaggacuucguggaggugcaccuccccgacguccacaagcagaucagcggcguggaccuggggcugcccaacuggggcaaguacgugcucaucaucgccggcguccugaucgccaugauccugacgaucuuccucaugaccugcugcgggcgcggcaaccggccgaaguccacccagcacagccucgggggcaucgggcgcaagguguccgccaccagccaguccggcaaggugaucagcuccugggagagcuacaagagcggcggggagacgcggcuguga

SEQ ID NO: 96030 - RNA, 1575 nt, Artificial Sequence
  derived and/or modified CDS sequence (opt1) from glycoprotein__RABV__U11757.1
auggugccccaggcccugcuguucgucccgcugcuggccuuccccaugugcuucggcaaguuccccaucuacaccauccccgacaagcucgggccguggagccccaucgacauccaccaccuguccugccccaacaaccuggugguggaggacgagggcugcaccaaccucagcggguucuccuacauggagcugaaggucggcuacaucagcgcgaucaaggugaacggguucacgugcaccggcguggucaccgaggccgagaccuacacgaacuucgugggcuacgugaccaccaccuucaagcgcaagcacuuccggcccacgccggacgccugccgcgccgccuacaacuggaagauggcgggggacccccgguacgaggagucccugcacaaccccuaccccgacuaccacuggcuccgcaccgucaagaccaccaaggagagccugaucaucaucuccccgagcguggccgaccuggaccccuacgacaagucccuccacagccggguguuccccuccggcaagugccuggggaucacgaucagcuccaccuacugcagcaccaaccacgacuacaccaucuggaugcccgagaaccugcgccucggcacguccugcgacaucuucaccaacagccgggggaagcgcgccuccaagggcagcaagaccugcggcuucgucgacgagcgggggcuguacaagucccugaagggcgccugcaagcucaagcugugcggggugcugggccuccgccugauggacggcaccuggguggcgaugcagacgagcgacgagaccaaguggugcccgcccgaccagcuggucaaccuccacgacuuccggagcgacgagaucgagcaccuggugguggaggagcuggucaagaagcgcgaggagugccucgacgcccuggaguccaucaugaccaccaagagcguguccuuccggcgccugagccaccuccggaagcuggugcccggguucggcaaggccuacacgaucuucaacaagacccugauggaggccgacgcccacuacaaguccguccgcaccuggaacgagaucauccccagcaaggggugccuccgggugggcgggcgcugccacccgcacgugaacggcgucguguucaacggcaucauccuggggcccgacggccacguccugauccccgagaugcaguccagccuccugcagcagcacauggagcugcucgaguccagcgugaucccccugaugcacccgcuggcggaccccuccaccguguucaaggacggggacgaggccgaggacuucgucgaggugcaccuccccgacgugcacaagcagaucagcggcgucgaccuggggcugcccaacuggggcaaguacgugcucaucaucgccggcgugcugaucgccaugauccugacggucuuccucaugaccugcugcgggcggggcaaccgcccgaaguccauccagcacagccucgggggcaucgggcggaagguguccgccaccagccaguccggcaaggugaucagcuccugggagagcuacaagagcggcggggagacccgccuguga

SEQ ID NO: 96031 - RNA, 1575 nt, Artificial Sequence; identical to SEQ ID NO: 96016
  derived and/or modified CDS sequence (opt1) from glycoprotein__RABV__U11758.1

SEQ ID NO: 96032 - RNA, 1575 nt, Artificial Sequence
  derived and/or modified CDS sequence (opt1) from glycoprotein__RABV__U27214.1
auggugcccugggcccuccucuucgucccguuccugaucagcucccugugcuucggcaaguuccccaucuacaccauccccgacaagcucgggcccuggagcccgaucgacauccaccaccuguccugccccaacaaccuggugguggaggacgagggcugcaacagccucuccggguucagcuacauggagcugaaggucggcuacaucuccgccaucaaggugaacggguucacgugcaccggcguggucaccgaggcggagaccuacaccaacuucgugggcuacgugaccaccaccuucaagcgcaagcacuucugccccaugcccgacgccugccggagcgccuacaacuggaagauggccggggacccgcgcuacgaggagucccugcacaaccccuaccccgacuaccacuggcuccggaccgucaagacgaccaaggagagccuggugaucaucucccccagcguggccgaccuggacccguacgacaagucccuccacagccgcaucuuccccggcgggaagugcaccggccugaccgucuccagcacguacugcuccaccaaccacgacuacaccaucuggaugcccgagaaggcggggcugggcaccagcugcgacaucuucacgaacuccaagggcaagcgggccagcaagggcgggaagaccugcggguucguggacgagcgcggccucuacaagagccugaagggcgccugcaagcugaagcucugcgggguguccggccugcggcugauggacgggaccugggucgccauccagacccucgacgagacgaaguggugcagccccgaccagcuggugaaccugcacgacuuccacuccgacgagcucgagcaccugguggucgaggagcuggugcgcaagcgggaggagugccucgacgcgcuggagagcaucaugaccaccaaguccgugagcuuccgccggcugucccaccuccgcaagcuggucccgggcuucgggaaggccuacaccaucuucaacaagacgcugauggaggccgacgcccacuacaagagcgugcggaccugguccgagaucauccccagcaagggcugccuccgcgugggcgggcggugccacccccacgucaacggcguguucuucaacgggaucauccugggccccgacgggcacguccugaucccggagaugcaguccagccuccugcagcagcacguggagcugcucgaguccagcgugaucccccugaugcacccccuggccgaccccuccgcggucuucaaggacggcgacgaggccgaggacuucguggaggugcaccucccggacguccacaagcagaucagcggcguggaccuggggcugcccuccuggggcaaguacaugcucaugaucgccggggcccugaccacccugaugcuguucaucuuccugaugacgugcugcaagcgcgugaaccggaccaagagcauccgccagggcccccgggagaucgagcgcaaggucuccuucacgccccagaacaagaagguggugagcagcugggaguccuacaagagcgggggcgagaccaagcuguga

SEQ ID NO: 96033 - RNA, 1575 nt, Artificial Sequence
  derived and/or modified CDS sequence (opt1) from glycoprotein__RABV__U27215.1
auggugcccugggcccuccucuucgucccguuccugaucagcucccugugcuucggcaaguuccccaucuacaccauccccgacaagcucgggcccuggagcccgaucgacauccaccaccuguccugccccaacaaccuggugguggaggacgagggcugcaacagccucuccggguucagcuacauggagcugaaggucggcuacaucuccgccaucaaggugaacggguucacgugcaccggcguggucaccgaggcggagaccuacaccaacuucgugggcuacgugaccaccaccuucaagcgcaagcacuucugccccaugcccgacgccugccggagcgccuacaacuggaagauggccggggacccgcgcuacgaggagucccugcacaaccccuaccccgacuaccacuggcuccggaccgucaagacgaccaaggagagccugaucaucaucucccccagcguggccgaccuggacccguacgacaagucccuccacagccgcaucuuccccggcgggaagugcaccggccugaccguguccagcacguacugcuccaccaaccacgacuacaccaucuggaugcccgagaaggcggggcugggcaccagcugcgacaucuucacgaacuccaagggcaagcgggccagcaagggcgggaagaccugcggguucgucgacgagcgcggccucuacaagagccugaagggcgccugcaagcugaagcucugcgggguguccggccugcggcugauggacgggaccuggguggccauccagacccucgacgagacgaaguggugcagccccgaccagcuggucaaccugcacgacuuccacuccgacgagcucgagcaccuggugguggaggagcugguccgcaagcgggaggagugccucgacgcgcuggagagcaucaugaccaccaaguccgugagcuuccgccggcugucccaccuccgcaagcuggugccgggcuucgggaaggccuacaccaucuucaacaagacgcugauggaggccgacgcccacuacaagagcguccggaccugguccgagaucauccccagcaagggcugccuccgcgugggcgggcggugccacccccacgugaacggcgucuucuucaacgggaucauccugggccccgacgggcacgugcugaucccggagaugcaguccagccuccugcagcagcacgucgagcugcucgaguccagcgugaucccccugaugcacccccuggccgaccccuccgcgguguucaaggacggcgacgaggccgaggacuucgucgaggugcaccucccggacgugcacaagcagaucagcggcgucgaccuggggcugcccuccuggggcaaguacaugcucaugaucgccggggcccugaccacccugaugcuguucaucuuccugaugacgugcugcaagcgcgugaaccggaccaagagcauccgccagggcccccgggagaucgagcgcaagguguccuucacgccccagaacaagaaggucgugagcagcugggaguccuacaagagcgggggcgagaccaagcuguga

SEQ ID NO: 96034 - RNA, 1575 nt, Artificial Sequence
  derived and/or modified CDS sequence (opt1) from glycoprotein__RABV__U27216.1
auggugcccugggcccuccucuucgucccguuccugaucagcucccugugcuucggcaaguuccccaucuacaccauccccgacaagcucgggcccuggagcccgaucgacauccaccaccuguccugccccaacaaccuggugguggaggacgagggcugcaacagccucuccggguucagcuacauggagcugaaggucggcuacaucuccgccaucaaggugaacggguucacgugcaccggcguggucaccgaggcggagaccuacaccaacuucgugggcuacgugaccaccaccuucaagcgcaagcacuucugccccaugcccgacgccugccggagcgccuacaacuggaagauggccggggacccgcgcuacgaggagucccugcacaaccccuaccccgacuaccacuggcuccggaccgucaagacgaccaaggagagccugaucaucaucucccccagcguggccgaccuggacccguacgaccgcucccuccacagccggaucuuccccggcgggaagugcaccggccugaccguguccagcacguacugcuccaccaaccacgacuacaccaucuggaugcccgagaaggcggggcugggcaccagcugcgacaucuucacgaacuccaagggcaagcgcgccagcaagggcgggaagaccugcggguucgucgacgagcggggccucuacaagagccugaagggcgccugcaagcugaagcucugcgggguguccggccugcgccugauggacgggaccuggguggccauccagacccucgacgagacgaaguggugcagccccgaccagcuggucaaccugcacgacuuccacuccgacgagcucgagcaccuggugguggaggagcugguccggaagcgcgaggagugccucgacgcgcuggagagcaucaugaccaccaaguccgugagcuuccggcgccugucccaccuccggaagcuggugccgggcuucgggaaggccuacaccaucuucaacaagacgcugauggaggccgacgcccacuacaagagcguccgcaccugguccgagaucauccccagcaagggcugccuccgggugggcgggcgcugccacccccacgugaacggcgucuucuucaacgggaucauccugggccccgacgggcacgugcugaucccggagaugcaguccagccuccugcagcagcacgucgagcugcucgaguccagcgugaucccccugaugcacccccuggccgaccccuccgcgguguucaaggacggcgacgaggccgaggacuucgucgaggugcaccucccggacgugcacaagcagaucagcggcgucgaccuggggcugcccuccuggggcaaguacaugcucaugaucgccggggcccugaccacccugaugcuguucaucuuccugaugacgugcugcaagcgggugaaccgcaccgagagcauccggcagggcccccgcgagcuggaguccaaggugagcgucacgccccagaacaagaaggugaucagcuccugggagagcuacaaguccgggggcgagaccaagcuguga

SEQ ID NO: 96035 - RNA, 1575 nt, Artificial Sequence
  derived and/or modified CDS sequence (opt1) from glycoprotein__RABV__U27217.1
auggugcccugggcccuccucuucgucccguuccugaucagcucccugugcuucggcaaguuccccaucuacaccauccccgacaagcucgggcccuggagcccgaucgacauccaccaccuguccugccccaacaaccuggugguggaggacgagggcugcaacagccucuccggguucagcuacauggagcugaaggucggcuacaucuccgccaucaaggugaacggguucacgugcaccggcguggucaccgaggcggagaccuacaccaacuucgugggcuacgugaccaccaccuucaagcgcaagcacuucugccccaugcccgacgccugccggagcgccuacaacuggaagauggccggggacccgcgcuacgaggagucccugcacaaccccuaccccgacuaccacuggcuccggaccgucaagacgaccaaggagagccugaucaucaucucccccagcguggccgagcuggacccguacgacaagucccuccacagccgcaucuuccccggcgggaagugcaccggccugaccguguccagcacguacugcuccaccaaccacgacuacaccaucuggaugcccgagaaggcggggcugggcaccagcugcgacaucuucacgaacuccaagggcaagcgggccagcaagggcgggaagaccugcggguucgucgacgagcgcggccucuacaagagccugaagggcgccugcaagcugaagcucugcgggguguccggccugcggcugauggacgggaccuggguggccauccagacccucgacgagacgaaguggugcagccccgaccagcuggucaaccugcacgacuuccacuccgacgagcucgagcaccuggugguggaggagcugguccgcaagcgggaggagugccucgacgcgcuggagagcaucaugaccaccaaguccgugagcuuccgccggcugucccaccuccgcaagcuggugccgggcuucgggaaggccuacaccaucuucaacaagacgcugauggaggccgacgcccacuacaagagcguccggaccugguccgagaucauccccagcaagggcugccuccgcgugggcgggcggugccacccccacgugaacggcgucuucuucaacgggaucauccugggccccgacgggcacgugcugaucccggagaugcaguccagccuccugcagcagcacgucgagcugcucgaguccagcgugaucccccugaugcacccccuggccgaccccuccgcgguguucaaggacggcgacgaggccgaggacuucgucgaggugcaccucccggacgugcacaagcagaucagcggcgucgaccuggggcugcccuccuggggcaaguacaugcucaugaucgccggggcccugaccacccugaugcuguucaucuuccugaugacgugcugcaagcgcgugaaccggaccaagagcauccgccagggcccccgggagaucgagcgcaagguguccuucacgccccagaacaagaaggucgugagcagcugggaguccuacaagagcgggggcgagaccaagcuguga

SEQ ID NO: 96036 - RNA, 1575 nt, Artificial Sequence
  derived and/or modified CDS sequence (opt1) from glycoprotein__RABV__X71879.1
auggugccccaggcccugcuguucgucccccugcugguguucccccucugcuucggcaaguuccccaucuacaccauccccgacaagcuggggccguggagccccaucgacauccaccaccuguccugccccaacaaccucguggucgaggacgagggcugcaccaaccugagcggguucuccuacauggagcugaaggugggcuacauccucgccaucaagaugaacggguucacgugcaccggcguggucaccgaggcggagaacuacaccaacuucgugggcuacgugacgaccaccuucaagcgcaagcaccuccggcccaccccggacgccugccgcgccgccuacaacuggaagauggccggggacccccgguacgaggagagccugcacaaccccuaccccgacuacuccuggcuccgcacggucaagaccaccaaggagagccuggugaucaucuccccgagcguggcggaccuggaccccuacgaccggucccuccacagccgcgucuuccccuccggcaagugcagcgggguggccguguccagcaccuacugcuccacgaaccacgacuacaccaucuggaugcccgagaacccgcggcugggcaagagcugcgacaucuucaccaacucccgcgggaagcgggccagcaagggcuccgagaccugcggcuucgucgacgagcgcgggcuguacaagagccucaagggcgccugcaagcugaagcugugcggggugcucggccugcggcugauggacggcacguggguggcgaugcagaccagcaacgagaccaaguggugcccgcccgaccagcucgucaaccugcacgacuuccgcuccgacgagaucgagcaccuggugguggaggagcucguccggaagcgcgaggagugccuggacgcccuggagagcaucaugaccacgaaguccgugagcuuccggcgccucucccaccuccggaagcuggugcccggguucggcaaggccuacaccaucuucaacaagacccugauggaggccgacgcccacuacaagagcguccgcaccuggaacgagauccugcccuccaaggggugccugcgggugggcgggcgcugccacccccacgucaacggcguguucuucaacggcaucauccucgggcccgacggcaacgugcugauccccgagaugcagagcucccugcuccagcagcacauggagcugcuggagagcuccgucaucccgcucgugcacccccuggcggaccccagcacgguguucaaggacggggacgaggccgaggacuucgucgaggugcaccuccccgacgugcacaaccaggucuccggcguggaccuggggcugccgaacuggggcaaguacgugcugcucagcgccggcgcccugaccgcccugaugcugaucaucuuccucaugaccugcugccggcgcgucaaccgcuccgagcccacccagcacaaccugcgggggacgggccgcgaggugagcgugaccccgcagaccuggaagaucaucuccagcugggagucccacaagagcgggggcgagacccggcuguga

SEQ ID NO: 96037 - RNA, 1701 nt, Artificial Sequence
  derived and/or modified CDS sequence (opt2) from hemagglutinin__InfluenzaA__AAA16879
auggaggccaagcucuucguccucuucugcaccuucaccguccucaaggccgacaccaucugcgucggcuaccacgccaacaacuccaccgacaccgucgacaccguccucgagaagaacgucaccgucacccacuccgucaaccuccucgaggacucccacaacggcaagcucugcucccucaacggcaucgccccccuccagcucggcaagugcaacgucgccggcuggcuccucggcaaccccgagugcgaccuccuccucaccgccaacuccugguccuacaucaucgagaccuccaacuccgagaacggcaccugcuaccccggcgaguucaucgacuacgaggagcuccgcgagcagcucuccuccgucuccuccuucgagaaguucgagaucuuccccaaggccuccuccuggcccaaccacgagaccaccaagggcgucaccgccgccugcuccuacuccggcgccuccuccuucuaccgcaaccuccucuggaucaccaagaagggcaccuccuaccccaagcucuccaaguccuacaccaacaacaagggcaaggagguccucguccucuggggcguccaccacccccccaccaccuccgagcagcagucccucuaccagaacgccgacgccuacgucuccgucggcuccuccaaguacaaccgccgcuucacccccgagaucgccgcccgccccaagguccgcggccaggccggccgcaugaacuacuacuggacccuccucgaccagggcgacaccaucaccuucgaggccaccggcaaccucaucgcccccugguacgccuucgcccucaacaagggcuccgacuccggcaucaucaccuccgacgcccccguccacaacugcgacacccgcugccagaccccccacggcgcccucaacuccucccuccccuuccagaacguccaccccaucaccaucggcgagugccccaaguacaucaaguccaccaagcuccgcauggccaccggccuccgcaacguccccuccauccagucccgcggccucuucggcgccaucgccggcuucaucgagggcggcuggaccggcaugaucgacggcugguacggcuaccaccaccagaacgagcagggcuccggcuacgccgccgaccagaaguccacccagaacgccaucgacggcaucaccaacaaggucaacuccgucaucgagaagaugaacacccaguucaccgccgucggcaaggaguucaacaaccucgagcgccgcaucgagaaccucaacaagaaggucgacgacggcuuccucgacgucuggaccuacaacgccgagcuccucguccuccucgagaacgagcgcacccucgacuuccacgacuccaacguccgcaaccucuacgagaaggucaagucccagcuccgcaacaacgccaaggagcucggcaacggcugcuucgaguucuaccacaagugcgacgacgagugcauggagcgcgagaagaacggcaccuacgacuaccccaaguacuccgaggaguccaagcucaaccgcgaggagaucgacggcgucaagcucgaguccaugggcgucuaccagauccucgccaucuacuccaccgucgccuccucccucguccuccucgucucccucggcgccaucuccuucuggaugugcuccaacggcucccuccagugccgcaucugcaucuga

SEQ ID NO: 96038 - RNA, 1701 nt, Artificial Sequence
  derived and/or modified CDS sequence (opt2) from hemagglutinin__InfluenzaA__AAA16880
auggaggccaagcucuucguccucuucugcaccuucaccguccucaaggccgacaccaucugcgucggcuaccacgccaacaacuccaccgacaccgucgacaccguccucgagaagaacgucaccgucacccacuccgucaaccuccucgaggacucccacaacggcaagcucugcucccucaacggcaucgccccccuccagcucggcaagugcaacgucgccggcuggcuccucggcaaccccgagugcgaccuccuccucaccgccaacuccugguccuacaucaucgagaccuccaacuccgagaacggcaccugcuaccccggcgaguucaucgacuacgaggagcuccgcgagcagcucuccuccgucuccuccuucgagaaguucgagaucuuccccaaggccuccuccuggcccaaccacgagaccaccaagggcgucaccgccgccugcuccuacuccggcgccuccuccuucuaccgcaaccuccucuggaucaccaagaagggcaccuccuaccccacccucuccaaguccuacaccaacaacaagggcaaggagguccucguccucuggggcguccaccacccccccaccgucaacgagcagcagucccucuaccagaacgccgacgccuacgucuccgucggcuccuccaaguacaaccgccgcuucacccccgagaucgccgcccgccccaagguccgcggccaggccggccgcaugaacuaccacuggacccuccucgaccagggcgacaccaucaccuucgaggccaccggcaaccucaucgcccccugguacgccuucgcccucaacaagggcuccgacuccggcaucaucaccuccgacgcccccguccacaacugcgacacccgcugccagaccccccacggcgcccucaacuccucccuccccuuccagaacguccaccccaucaccaucggcgagugccccaaguacgucaaguccaccaagcuccgcauggccaccggccuccgcaacguccccuccauccagucccgcggccucuucggcgccaucgccggcuucaucgagggcggcuggaccggcaugaucgacggcugguacggcuaccaccaccagaacgagcagggcuccggcuacgccgccgaccagaaguccacccagaacgccaucgacggcaucaccaacaaggucaacuccgucaucgagaagaugaacaccaaguucaccgccgucggcaaggaguucaacaaccucgagcgccgcaucgagaaccucaacaagaaggucgacgacggcuuccucgacgucuggaccuacaacgccgagcuccucguccuccucgagaacgagcgcacccucgacuuccacgacuccaacguccgcaaccucuacgagaaggucaagucccagcuccgcaacaacgccaaggagcucggcaacggcugcuucgaguucuaccacaagugcgacgacgagugcaucgaguccgucaagaacggcaccuacgacuaccccaaguacuccgaggaguccaagcucaaccgcgaggagaucgacggcgucaagcucgaguccaugggcgucuaccagauccucgccaucuacuccaccgucgccuccucccucguccuccucgucucccucggcgccaucuccuucuggaugugcuccaacggcucccuccagugccgcaucugcaucuga

SEQ ID NO: 96039 - RNA, 1689 nt, Artificial Sequence
  derived and/or modified CDS sequence (opt2) from hemagglutinin__InfluenzaA__AAA64362
auggccaucaucuaccucauccuccucuucaccgccguccgcggcgaccagaucugcaucggcuaccacgccaacaacuccaccgagaaggucgacaccauccucgagcgcaacgucaccgucacccacgccaaggacauccucgagaagacccacaacggcaagcucugcaagcucaacggcauccccccccucgagcucggcgacugcuccaucgccggcuggcuccucggcaaccccgagugcgaccgccuccucuccguccccgagugguccuacaucauggagaaggagaacccccgcgacggccucugcuaccccggcuccuucaacgacuacgaggagcucaaguaccuccucuccuccgucaagcacuucgagaaggucaagauccuccccaaggaccgcuggacccagcacaccaccaccggcggcucccgcgccugcgccgucuccggcaaccccuccuucuuccgcaacauggucuggcucaccaagaagggcuccgacuaccccgucgccaagggcuccuacaacaacaccuccggcgagcagaugcucaucaucuggggcguccaccaccccaacgacgagaccgagcagcgcacccucuaccagaacgucggcaccuacgucuccgucggcaccuccacccucaacaagcgcuccacccccgagaucgccacccgccccaaggucaacggccucggcucccgcauggaguucuccuggacccuccucgacaugugggacaccaucaacuucgaguccaccggcaaccucaucgcccccgaguacggcuucaagaucuccaagcgcggcuccuccggcaucaugaagaccgagggcacccucgagaacugcgagaccaagugccagaccccccucggcgccaucaacaccacccuccccuuccacaacguccacccccucaccaucggcgagugcccccgcuacgucaaguccgagaagcucguccucgccaccggccuccgcaacgucccccagaucgagucccgcggccucuucggcgccaucgccggcuucaucgagggcggcuggcagggcauggucgacggcugguacggcuaccaccacuccaacgaccagggcuccggcuacgccgccgacaaggaguccacccagaaggccuucgacggcaucaccaacaaggucaacuccgucaucgagaagaugaacacccaguucgaggccgucggcaaggaguucuccaaccucgagcgccgccucgagaaccucaacaagaagauggaggacggcuuccucgacgucuggaccuacaacgccgagcuccucguccucauggagaacgagcgcacccucgacuuccacgacuccaacgucaagaaccucuacgacaagguccgcaugcagcuccgcgacaacgucaaggagcucggcaacggcugcuucgaguucuaccacaagugcgacgacgagugcaugaacuccgucaagaacggcaccuacgacuaccccaaguacgaggaggaguccaagcucaaccgcaacgagaucaagggcgucaagcucuccuccaugggcgucuaccagauccucgccaucuacgccaccgucgccggcucccucucccucgccaucaugauggccggcaucuccuucuggaugugcuccaacggcucccuccagugccgcaucugcaucuga

SEQ ID NO: 96040 - RNA, 1689 nt, Artificial Sequence
  derived and/or modified CDS sequence (opt2) from hemagglutinin__InfluenzaA__AAA64363
auggccaucaucuaccucauccuccucuucaccgccguccgcggcgaccagaucugcaucggcuaccacgccaacaacuccaccgagaaggucgacaccauccucgagcgcaacgucaccgucacccacgccaaggacauccucgagaagacccacaacggcaagcucugcaagcucaacggcauccccccccucgagcucggcgacugcuccaucgccggcuggcuccucggcaaccccgagugcgaccgccuccucuccguccccgagugguccuacaucauggagaaggagaacccccgcgacggccucugcuaccccggcuccuucaacgacuacgaggagcucaagcaccuccucuccuccgucaagcacuucgagaaggucaagauccuccccaaggaccgcuggacccagcacaccaccaccggcggcucccgcgccugcgccgucuccggcaaccccuccuucuuccgcaacauggucuggcucaccaagaagggcuccaacuaccccgucgccaagggcuccuacaacaacaccuccggcgagcagaugcucaucaucuggggcguccaccaccccaacgacgagaccgagcagcgcacccucuaccagaacgucggcaccuacgucuccgucggcaccuccacccucaacaagcgcuccacccccgacaucgccacccgccccaaggucaacggccagggcggccgcauggaguucuccuggacccuccucgacaugugggacaccaucaacuucgaguccaccggcaaccucaucgcccccgaguacggcuucaagaucuccaagcgcggcuccuccggcaucaugaagaccgagggcacccucggcaacugcgagaccaagugccagaccccccucggcgccaucaacaccacccuccccuuccacaacguccacccccucaccaucggcgagugccccaaguacgucaaguccgagaagcucguccucgccaccggccuccgcaacgucccccagaucgagucccgcggccucuucggcgccaucgccggcuucaucgagggcggcuggcagggcauggucgacggcugguacggcuaccaccacuccaacgaccagggcuccggcuacgccgccgacaaggaguccacccagaaggccuucgacggcaucaccaacaaggucaacuccgucaucgagaagaucaacacccaguucgaggccgucgagaaggaguucuccaaccucgagcgccgccucgagaaccucaacaagaagauggaggacggcuuccucgacgucuggaccuacaacgccgagcuccucguccucauggagaacgagcgcacccucgacuuccacgacuccuccgucaagaaccucuacgacaagguccgcaugcagcuccgcgacaacgucaaggagcucggcaacggcugcuucgaguucuaccacaagugcgacgacgagugcaugaacuccgucaagaacggcaccuacgacuaccccaaguacgaggaggaguccaagcucaaccgcaacgagaucaagggcgucaagcucuccuccaugggcaucuaccagauccucgccaucuacgccaccgucgccggcucccucucccucgccaucaugauggccggcaucuccuucuggaugugcuccaacggcucccuccagugccgcaucugcaucuga

SEQ ID NO: 96041 - RNA, 1689 nt, Artificial Sequence
  derived and/or modified CDS sequence (opt2) from hemagglutinin__InfluenzaA__AAA64365
auggccaucaucuaccucauccuccucuucaccgccguccgcggcgaccagaucugcaucggcuaccacgccaacaacuccaccgagaaggucgacaccauccucgagcgcaacgucaccgucacccacgccaaggacauccucgagaagacccacaacggcaagcucugcaagcucaacggcauccccccccucgagcucggcgacugcuccaucgccggcuggcuccucggcaaccccgagugcgaccgccuccucuccguccccgagugguccuacaucauggagaaggagaacccccgcgacggccucugcuaccccggcuccuucaacgacuacgaggagcucaagcaccuccucuccuccgucaagcacuucgagaaggucaagauccuccccaaggaccgcuggacccagcacaccaccaccggcggcucccgcgccugcgccgucuccggcaaccccuccuucuuccgcaacauggucuggcucaccaagaagggcuccaacuaccccgucgccaagggcuccuacaacaacaccuccggcgagcagaugcucaucaucuggggcguccaccaccccaacgacgagaccgagcagcgcacccucuaccagaacgucggcaccuacgucuccgucggcaccuccacccucaacaagcgcuccacccccgacaucgccacccgccccaaggucgacggccucggcucccgcauggaguucuccuggacccuccucgacaugugggacaccaucaacuucgaguccaccggcaaccucaucgcccccgaguacggcuucaagaucuccaagcgcggcuccuccggcaucaugaagaccgagggcacccucggcaacugcgagaccaagugccagaccccccucggcgccaucaacaccacccuccccuuccacaacguccacccccucaccaucggcgagugccccaaguacgucaaguccgagaagcucguccucgccaccggccuccgcaacgucccccagaucgagucccgcggccucuucggcgccaucgccggcuucaucgagggcggcuggcagggcauggucgacggcugguacggcuaccaccacuccaacgaccagggcuccggcuacgccgccgacaaggaguccacccagaaggccuucgacggcaucaccaacaaggucaacuccgucaucgagaagaugaacacccaguucgaggccgucgagaaggaguucuccaaccucgagcgccgccucgagaaccucaacaagaagauggaggacggcuuccucgacgucuggaccuacaacgccgagcuccucguccucauggagaacgagcgcacccucgacuuccacgacuccaacgucaagaaccucuacaacaagguccgcaugcagcuccgcgacaacgucaaggagcucggcaacggcugcuucgaguucuaccacaagugcgacgacgagugcaugaacuccgucaagaacggcaccuacgacuaccccaaguacgaggaggaguccaagcucaaccgcaacgagaucaagggcgucaagcucuccuccaugggcaucuaccagauccucgccaucuacgccaccgucgccggcucccucucccucgccaucaugauggccggcaucuccuucuggaugugcuccaacggcucccuccagugccgcaucugcaucuga

SEQ ID NO: 96042 - RNA, 1689 nt, Artificial Sequence
  derived and/or modified CDS sequence (opt2) from hemagglutinin__InfluenzaA__AAA64366
auggccaucaucuaccucauccuccucuucaccgccguccgcggcgaccagaucugcaucggcuaccacgccaacaacuccaccgagaaggucgacaccauccucgagcgcaacgucaccgucacccacgccaaggacauccucgagaagacccacaacggcaagcucugcaagcucaacggcauccccccccucgagcucggcgacugcuccaucgccggcuggcuccucggcaaccccgagugcgaccgccuccucuccguccccgagugguccuacaucauggagaaggagaacccccgcgacggccucugcuaccccggcuccuucaacgacuacgaggagcucaagcaccuccucuccuccgucaagcacuucgagaaggucaagauccuccccaaggaccgcuggacccagcacaccaccaccggcggcucccgcgccugcgccgucuccggcaaccccuccuucuuccgcaacauggucuggcucaccaagaaggaguccaacuaccccgucgccaagggcuccuacaacaacaccuccggcgagcagaugcucaucaucuggggcguccaccaccccaacgacgagaccgagcagcgcacccucuaccagaacgucggcaccuacgucuccgucggcaccuccacccucaacaagcgcuccacccccgacaucgccacccgccccaaggucaacggccucggcucccgcauggaguucuccuggacccuccucgacaugugggacaccaucaacuucgaguccaccggcaaccucaucgcccccgaguacggcuucaagaucuccaagcgcggcuccuccggcaucaugaagaccgagggcacccucgagaacugcgagaccaagugccagaccccccucggcgccaucaacaccacccuccccuuccacaacguccacccccucaccaucggcgagugccccaaguacgucaaguccgagaagcucguccucgccaccggccuccgcaacgucccccagaucgagucccgcggccucuucggcgccaucgccggcuucaucgagggcggcuggcagggcauggucgacggcugguacggcuaccaccacuccaacgaccagggcuccggcuacgccgccgacaaggaguccacccagaaggccuucgacggcaucaccaacaaggucaacuccgucaucgagaagaugaacacccaguucgaggccgucggcaaggaguucuccaaccucgagcgccgccucgagaaccucaacaagaagauggaggacggcuuccucgacgucuggaccuacaacgccgagcuccucguccucauggagaacgagcgcacccucgacuuccacgacuccaacgucaagaaccucuacgacaagguccgcaugcagcuccgcgacaacgucaaggagcucggcaacggcugcuucgaguucuaccacaagugcgacgacgagugcaugaacuccgucaagaacggcaccuacgacuaccccaaguacgaggaggaguccaagcucaaccgcaacgagaucaagggcgucaagcucuccuccaugggcgucuaccagauccucgccaucuacgccaccgucgccggcucccucucccucgccaucaugauggccggcaucuccuucuggaugugcuccaacggcucccuccagugccgcaucugcaucuga

SEQ ID NO: 96043 - RNA, 1701 nt, Artificial Sequence
  derived and/or modified CDS sequence (opt2) from hemagglutinin__InfluenzaA__AAA85781
augaagaccaucaucgcccucuccuacaucuucugccucgucuucgcccaggaccuccccggcaacgacaacuccaccgccacccucugccucggccaccacgccguccccaacggcacccucgucaagaccaucaccaacgaccagaucgaggucaccaacgccaccgagcucguccaguccuccuccaccggcaagaucugcgacaacccccaccgcauccucgacggcaucaacugcacccucaucgacgcccuccucggcgacccccacugcgacggcuuccagaacgagaagugggaccucuucgucgagcgcuccaaggccuucuccaacugcuaccccuacgacguccccgacuacgccucccuccgcucccucgucgccuccuccggcacccucgaguucaucaacgagggcuucaacuggaccggcgucacccagaacggcggcuccuccgccugcaagcgcggccccgacaacggcuucuucucccgccucaacuggcucuacaaguccggcuccaccuaccccguccagaacgucaccaugcccaacaacgacaacuccgacaagcucuacaucuggggcguccaccaccccuccaccgacaaggagcagaccaaccucuacguccaggccuccggcaaggucaccgucuccaccaagcgcucccagcagaccgucauccccaacgucggcucccgccccuggguccgcggccucuccucccgcgucuccaucuacuggaccaucgucaagcccggcgacauccucgucaucaacuccaacggcaaccucaucgccccccgcggcuacuacaagaugcgcaccggcaaguccuccaucaugcgcuccgacgcccccaucggcaccugcuccuccgagugcaucacccccaacggcuccauccccaacgacaagcccuuccagaacgucaacaagaucaccuacggcgccugccccaaguacgucaagcagaacacccucaagcucgccaccggcaugcgcaacguccccgagaagcagauccgcggcaucuucggcgccaucgccggcuucaucgagaacggcugggagggcaugaucgacggcugguacggcuuccgccaccagaacuccgagggcaccggccaggccgccgaccucaaguccacccaggccgccaucgaccagaucaacggcaagcucaaccgcgucaucgagaagaccaacgagaaguuccaccagaucgagaaggaguucuccgaggucgagggccgcauccaggaccucgagaaguacgucgaggacaccaagaucgaccucugguccuacaacgccgagcuccucgucgcccucgagaaccagcacaccaucgaccucaccgacuccgagaugaacaagcucuucgagaagacccgccgccagcuccgcgagaacgccgaggacaugggcaacggcugcuucaagaucuaccacaagugcgacaaccccugcaucggcuccauccgcaacggcaccuacgaccacgacgucuaccgcgacgaggcccucaacaaccgcuuccagaucaagggcgucgagcucaaguccggcuacaaggacuggauccucuggaucuccuucgccaucuccugcuuccuccucugcgucguccuccucggcuucaucaugugggccugccagaagggcaacauccgcugcaacaucugcaucuga

SEQ ID NO: 96044 - RNA, 1707 nt, Artificial Sequence
  derived and/or modified CDS sequence (opt2) from hemagglutinin__InfluenzaA__AAC14418
auggagcgcaucguccuccuccucgccaccgucucccucgucaaguccgaccagaucugcaucggcuaccacgccaacaacuccaccgagcaggucgacaccaucauggagaagaacgucaccgucacccacgcccaggacauccucgagcgcacccacaacggcaagcucugcgaccucaacggcgucaagccccucauccuccgcgacugcuccgucgccggcuggcuccucggcaaccccaugugcgacgaguucaucaacguccccgagugguccuacaucgucgagaaggccucccccgccaacgaccucugcuaccccggcaacuucaacgacuacgaggagcucaagcaccuccucucccgcaucaaccacuucgagaagauccagaucauccccaaguccuccugguccaaccacgacgccuccuccggcgucuccuccgccugccccuaccucggccgcuccuccuucuuccgcaacgucgucuggcucaucaagaagaacuccaccuaccccaccaucaagcgcuccuacaacaacaccaaccaggaggaccuccucguccucuggggcauccaccaccccaacgacgccgccgagcagaccaagcucuaccagaaccccaccaccuacaucuccgucggcaccuccacccucaaccagcgccucguccccgagaucgccacccgccccaaggucaacggccaguccggccgcauggaguucuucuggaccauccucaagcccaacgacgccaucaacuucgaguccaacggcaacuucaucgcccccgaguacgccuacaagaucgucaagaagggcgacuccaccaucaugaaguccgagcucgaguacggcaacugcaacaccaagugccagacccccaugggcgccaucaacuccuccaugcccuuccacaacauccacccccucaccaucggcgagugccccaaguacgucaaguccaaccgccucguccucgccaccggccuccgcaacgccccccagcgcgagcgccgccgcaagaagcgcggccucuucggcgccaucgccggcuucaucgagggcggcuggcagggcauggucgacggcugguacggcuaccaccacuccaacgagcagggcuccggcuacgccgccgaccaggaguccacccagaaggccaucgacggcgucaccaacaaggucaacuccaucaucaacaagaugaacacccaguucgaggccgucggccgcgaguucaacaaccucgagcgccgcaucgagaaccucaacaagaagauggaggacggcuuccucgacgucuggaccuacaacgccgagcuccucguccucauggagaacgagcgcacccucgacuuccacgacuccaacgucaagaaccucuacgacaagguccgccuccagcuccgcgacaacgccaaggagcucggcaacggcugcuucgaguucuaccacaagugcgacaacgagugcauggaguccgucaagaacggcaccuacgacuacccccaguacuccgaggaggcccgccucaaccgcgaggagaucuccggcgucaagcucgaguccaugggcaccuaccagauccucuccaucuacuccaccgucgccuccucccucgcccucgccaucauggucgccggccucucccucuggaugugcuccaacggcucccuccagugccgcaucugcaucuga

SEQ ID NO: 96045 - RNA, 1707 nt, Artificial Sequence
  derived and/or modified CDS sequence (opt2) from hemagglutinin__InfluenzaA__AAC40508
auggagcgcaccguccuccuccucgccaccgucucccucgucaaguccgaccagaucugcaucggcuaccacgccaacaacuccaccgagcaggucgacaccaucauggagaagaacgucaccgucacccacgcccaggacauccucgagcgcacccacaacggcaagcucugcgaccucaacggcgucaagccccucauccuccgcgacugcuccgucgccggcuggcuccucggcaaccccaugugcgacgaguucaucaacguccccgagugguccuacaucgucgagaaggccucccccgccaacgaccucugcuaccccggcaacuucaacgacuacgaggagcucaagcaccuccucucccgcaucaaccacuucgagaagauccagaucauccccaaguccuccugguccaaccacgacgccuccuccggcgucuccuccgccugccccuaccucggccgcuccuccuucuuccgcaacgucgucuggcucaucaagaagaacuccgccuaccccaccaucaagcgcuccuacaacaacaccaaccaggaggaccuccucguccucuggggcguccaccaccccaacgacgccgccgagcagaccaagcucuaccagaaccccaccaccuacaucuccgucggcaccuccacccucaaccagcgccucguccccgagaucgccacccgccccaaggucaacggccaguccggccgcauggaguucuucuggaccauccucaagcccaacgacgccaucaacuucgaguccaacggcaacuucaucgcccccgaguacgccuacaagaucgucaagaagggcgacuccaccaucaugaaguccgagcucgaguacggcaacugcaacaccaagugccagacccccaugggcgccaucaacuccuccaugcccuuccacaacauccacccccucaccaucggcgagugccccaaguacgucaaguccaaccgccucguccucgccaccggccuccgcaacaccccccagcgcgagcgccgccgcaagaagcgcggccucuucggcgccaucgccggcuucaucgagggcggcuggcagggcauggucgacggcugguacggcuaccaccacuccaacgagcagggcuccugcuacuccgccgacaaggaguccacccagaaggccaucgacggcgucaccaacaaggucaacuccaucaucaacaagaugaacacccaguucgaggccgucggccgcgaguucaacaaccucgagcgccgcaucgagaaccucaacaagaagauggaggacggcuuccucgacgucuggaccuacaacgccgagcuccucguccucauggagaacgagcgcacccucgacuuccacgacuccaacgucaagaaccucuacgacaagguccgccuccagcuccgcgacaacgccaaggagcucggcaacggcugcuucgaguucuaccacaagugcgacaacgagugcauggaguccgucaagaacggcaccuacgacuacccccaguacuccgaggaggcccgccucaaccgcgaggagaucuccggcgucaagcucgaguccaugggcaccuaccagauccucuccaucuacuccaccgucgccuccucccucgcccucgccaucauggucgccggccucucccucuggaugugcuccaacggcucccuccagugccgcaucugcaucuga

SEQ ID NO: 96046 - RNA, 1701 nt, Artificial Sequence
  derived and/or modified CDS sequence (opt2) from hemagglutinin__InfluenzaA__AAF87274
augaaggccauccucgucguccuccucuacaccuucaccaccgccaacgccgacacccucugcaucggcuaccacgccaacaacuccaccgacaccgucgacaccguccucgagaagaacgucaccgucacccacuccgucaaccuccucgagaaccgccacaacggcaagcucugcaagcucaagggcgucgccccccuccaccucggcaagugcaacaucgccggcuggcuccucggcaaccccgagugcgagcuccucuucaccgccuccuccugguccuacaucgucgagaccuccaacuccgacaacggcaccugcuaccccggcgacuucaucaacuacgaggagcuccgcgagcagcucuccuccgucuccuccuucgagcgcuucgagaucuuccccaaggccaacuccuggcccaaccacgagaccaaccgcggcgucaccuccgccugccccuacgccggcgccaacuccuucuaccgcaaccucaucuggcucgucaagaagggcaacuccuaccccaagcucuccaaguccuacaucaacaacaagggcaaggagguccucguccucuggggcauccaccacccccccaccuccaacgaccagcagucccucuaccagaacgccgacgccuacgucuucgucggcuccuccaaguacaacaagaaguucaugcccgagaucgccacccgccccaagguccgcggccaggccggccgcaugaacuacuacuggacccucaucgagcccggcgacaccaucaccuucgaggccaccggcaaccucgucgccccccgcuacgccuucgccauggagcgcggcuccggcuccggcaucaucaucuccgacacccccguccacgacugcaacgccaccugccagacccccaagggcgccaucaacaccaaccuccccuuccagaacauccaccccgucaccaucggcgagugccccaaguacgucaaguccacccgccuccgcauggccaccggccuccgcaacauccccuccauccagucccgcggccucuucggcgccaucgccggcuucaucgagggcggcuggaccggcaugaucgacggcugguacggcuaccaccaccagaacgagcagggcuccggcuacgccgccgaccgcaaguccacccagaacgccaucgacggcaucaccaacaaggucaacuccgucaucgagaagaugaacacccaguucaccgccgucggcaaggaguucaaccaccucgagaagcgcaucaagaaccucaacaagaaggucgacgacggcuuccucgacgucuggaccuacaacgccgagcuccucguccuccucgagaacgagcgcacccucgacuaccacgacuccaacgucaagaaccucuacgagaagguccgcucccagcuccgcaacaacgccaaggagaucggcaacggcugcuucgaguucuaccacaagugcgacgacaccugcauggaguccaucaagaacggcaccuacgacuaccccaaguacuccgaggaggccaagcucacccgcgaggagaucgacggcgucaagcucgaguccacccgcaucuaccagauccucgccaucuacuccaccaucgccuccucccucguccuccucgucucccucggcgccaucuccuucuggaugugcuccaacggcucccuccagugccgcaucugcaucuga

SEQ ID NO: 96047 - RNA, 1701 nt, Artificial Sequence
  derived and/or modified CDS sequence (opt2) from hemagglutinin__InfluenzaA__AAF87275
augaaggccauccucgucguccuccucuacaccuucaccaccgccaacgccgacacccucugcaucggcuaccacgccaacaacuccaccgacaccgucgacaccguccucgagaagaacgucaccgucacccacuccgucaaccuccucgagaaccgccacaacggcaagcucugcaagcucaagggcgucgccccccuccaccucggcaagugcaacaucgccggcuggcuccucggcaaccccgagugcgagcuccucuucaccgccuccuccugguccuacaucgucgagaccuccaacuccgacaacggcaccugcuaccccggcgacuucaucaacuacgaggagcuccgcgagcagcucuccuccgucuccuccuucgagcgcuucgagaucuuccccaaggccaacuccuggcccaaccacgagaccaaccgcggcgucaccuccgccugccccuacgccggcgccaacuccuucuaccgcaaccucaucuggcucgucaagaagggcaacuccuaccccaagcucuccaaguccuacaucaacaacaagggcaaggagguccucguccucuggggcauccaccacccccccaccuccaacgaccagcagucccucuaccagaacgccgacgccuacgucuucgucggcuccuccaaguacaacaagaaguucaugcccgagaucgccacccgccccaagguccgcggccaggccggccgcaugaacuacuacuggacccucaucgagcccggcgacaccaucaccuucgaggccaccggcaaccucgucgccccccgcuacgccuucgccauggagcgcggcuccggcuccggcaucaucaucuccgacacccccguccacgacugcaacgccaccugccagacccccaagggcgccaucaacaccaaccuccccuuccagaacauccaccccgucaccaucggcgagugccccaaguacgucaaguccacccgccuccgcauggccaccggccuccgcaacauccccuccauccagucccgcggccucuucggcgccaucgccggcuucaucgagggcggcuggaccggcaugaucgacggcugguacggcuaccaccaccagaacgagcagggcuccggcuacgccgccgaccgcaaguccacccagaacgccaucgacggcaucaccaacaaggucaacuccgucaucgagaagaugaacacccaguucaccgccgucggcaaggaguucaaccaccucgagaagcgcaucgagaaccucaacaagaaggucgacgacggcuuccucgacgucuggaccuacaacgccgagcuccucguccuccucgagaacgagcgcacccucgacuaccacgacuccaacgucaagaaccucuacgagaagguccgcucccagcuccgcaacaacgccaaggagaucggcaacggcugcuucgaguucuaccacaagugcgacgacaccugcauggaguccaucaagaacggcaccuacgacuaccccaaguacuccgaggaggccaagcucacccgcgaggagaucgacggcgucaagcucgaguccacccgcaucuaccagauccucgccaucuacuccaccaucgccuccucccucguccuccucgucucccucggcgccaucuccuucuggaugugcuccaacggcucccuccagugccgcaucugcaucuga

SEQ ID NO: 96048 - RNA, 1701 nt, Artificial Sequence
  derived and/or modified CDS sequence (opt2) from hemagglutinin__InfluenzaA__AAF87277
augaaggccauccuccucguccuccucuacaccuucaccgccgccaacgccgacacccucugcaucggcuaccacgccaacaacuccaccgacaccgucgacaccguccucgagaagaacgucaccgucacccacuccgucaaccuccucgaggaccgccacaacggcaagcucugcaagcuccgcggcaucgccccccuccaccucggcaagugcaacaucgccggcuggcuccucggcaaccccgagugcgagcuccucuucaccgccuccuccugguccuacaucgucgagaccuccaacuccgacaacggcaccugcuaccccggcgacuucaucaacuacgaggagcuccgcgagcagcucuccuccgucuccuccuucgagcgcuucgagaucuuccccaaggccuccuccuggcccgaccacgagaccaaccgcggcgucaccgccgccugccccuacgccggcgccaacuccuucuaccgcaaccucaucuggcucgucaagaagggcaacuccuaccccaagcucuccaaguccuacaucaacaacaaggagaaggagguccucguccucuggggcauccaccacccccccaccuccaccgaccagcagucccucuaccagaacgccgacgccuacgucuucgucggcuccuccaaguacaacaagaaguucaagcccgagaucgccucccgccccaagguccgcggccaggccggccgcauggacuacuacuggacccucgucgagcccggcgacaccaucaccuucgaggccaccggcaaccucgucgucccccgcuacgccuucgccaugaagcgcggcuccggcuccggcaucaucaucuccgacacccccguccacgacugcaacaccaccugccagacccccaagggcgccaucaacaccucccuccccuuccagaacauccaccccgucaccaucggcgagugccccaaguacgucaaguccaccaagcuccgcauggccaccggccuccgcaacauccccuccauccagucccgcggccucuucggcgccaucgccggcuucaucgagggcggcuggaccggcaugaucgacggcugguacggcuaccaccaccagaacgagcagggcuccggcuacgccgccgaccgcaaguccacccagaacgccaucgacggcgucaccaacaaggucaacuccgucaucgagaagaugaacacccaguucaccgccgucggcaaggaguucaaccaccucgagaagcgcaucgagaaccucaacaagaaggucgacgacggcuuccucgacgucuggaccuacaacgccgagcuccucguccuccucgagaacgagcgcacccucgacuaccacgacuccaacgucaagaaccucuacgagaagguccgcucccagcucaagaacaacgccaaggagaucggcaacggcugcuucgaguucuaccacaagugcgacgacaccugcauggaguccgucaagaacggcaccuacgacuaccccaaguacuccgaggaguccaagcucaaccgcgaggagaucgacggcgucaagcucgaguccacccgcaucuaccagauccucgccaucuacuccaccgucgccuccucccucauccuccucgucucccucggcgccaucuccuucuggaugugcuccaacggcucccuccagugccgcaucugcaucuga

SEQ ID NO: 96049 - RNA, 1701 nt, Artificial Sequence
  derived and/or modified CDS sequence (opt2) from hemagglutinin__InfluenzaA__AAF87278
augaaggccauccuccucguccuccucuacaccuucaccgccgccaacgccgacacccucugcaucggcuaccacgccaacaacuccaccgacaccgucgacaccguccucgagaagaacgucaccgucacccacuccgucaaccuccucgaggaccgccacaacggcaagcucugcaagcuccgcggcaucgccccccuccaccucggcaagugcaacaucgccggcuggcuccucggcaaccccgagugcgagcuccucuucaccgccuccuccugguccuacaucgucgagaccuccaacuccgacaacggcaccugcuaccccggcgacuucaucaacuacgaggagcuccgcgagcagcucuccuccgucuccuccuucgagcgcuucgagaucuuccccaaggccuccuccuggcccaaccacgagaccaaccgcggcgucaccgccgccugccccuacgccggcgccaacuccuucuaccgcaaccucaucuggcucgucaagaagggcaacuccuaccccaagcucuccaaguccuacaucaacaacaaggagaaggagguccucguccucuggggcauccaccacccccccaccuccaccgaccagcagucccucuaccagaacgccgacgccuacgucuucgucggcuccuccaaguacaacaagaaguucaagcccgagaucgccucccgccccaagguccgcggccaggccggccgcauggacuacuacuggacccucgucgagcccggcgacaccaucaccuucgaggccaccggcaaccucgucgucccccgcuacgccuucgccaugaagcgcggcuccggcuccggcaucaucaucuccgacacccccguccacgacugcaacaccaccugccagacccccaagggcgccaucaacaccucccuccccuuccagaacauccaccccgucaccaucggcgagugccccaaguacgucaaguccaccaagcuccgcauggccaccggccuccgcaacauccccuccauccagucccgcggccucuucggcgccaucgccggcuucaucgagggcggcuggaccggcaugaucgacggcugguacggcuaccaccaccagaacgagcagggcuccggcuacgccgccgaccgcaaguccacccagaacgccaucgacggcgucaccaacaaggucaacuccgucaucgagaagaugaacacccaguucaccgccgucggcaaggaguucaaccaccucgagaagcgcaucgagaaccucaacaagaaggucgacgacggcuuccucgacgucuggaccuacaacgccgagcuccucguccuccucgagaacgagcgcgcccucgacuaccacgacuccaacgucaagaaccucuacgagaagguccgcucccagcucaagaacaacgccaaggagaucggcaacggcugcuucgaguucuaccacaagugcgacgacaccugcauggaguccgucaagaacggcaccuacgacuaccccaaguacuccgaggaguccaagcucaaccgcgaggagaucgacggcgucaagcucgaguccacccgcaucuaccagauccucgccaucuacuccaccgucgccuccucccucauccuccucgucucccucggcgccaucuccuucuggaugugcuccaacggcucccuccagugccgcaucugcaucuga

SEQ ID NO: 96050 - RNA, 1701 nt, Artificial Sequence
  derived and/or modified CDS sequence (opt2) from hemagglutinin__InfluenzaA__AAF87279
augaaggccauccuccucguccuccucuacaccuucaccgccgccaacgccgacacccucugcaucggcuaccacgccaacaacuccaccgacaccgucgacaccguccucgagaagaacgucaccgucacccacuccgucaaccuccucgaggaccgccacaacggcaagcucugcaagcuccgcggcaucgccccccuccaccucggcaagugcaacaucgccggcuggcuccucggcaaccccgagugcgagcuccucuucaccgccuccuccugguccuacaucgucgagaccuccaacuccgacaacggcaccugcuaccccggcgacuucaucaacuacgaggagcuccgcgagcagcucuccuccgucuccuccuucgagcgcuucgagaucuuccccaaggccuccuccuggcccaaccacgagaccaaccgcggcgucaccgccgccugccccuacgccggcgccaacuccuucuaccgcaaccucaucuggcucgucaagaagggcaacuccuaccccaagcucuccaaguccuacaucaacaacaaggagaaggagguccucguccucuggggcauccaccacccccccaccuccaccgaccagcagucccucuaccagaacgccgacgccuacgucuucgucggcuccuccaaguacaacaagaaguucaagcccgagaucgccucccgccccaagguccgcggccaggccggccgcauggacuacuacuggacccucgucgagcccggcgacaccaucaccuucgaggccaccggcaaccucgucgucccccgcuacgccuucgccaugaagcgcggcuccggcuccggcaucaucaucuccgacacccccguccacgacugcaacaccaccugccagacccccaagggcgccaucaacaccucccuccccuuccagaacauccaccccgucaccaucggcgagugccccaaguacgucaaguccaccaagcuccgcauggccaccggccuccgcaacauccccuccauccagucccgcggccucuucggcgccaucgccggcuucaucgagggcggcuggaccggcaugaucgacggcugguacggcuaccaccaccagaacgagcagggcuccggcuacgccgccgaccgcaaguccacccagaacgccaucgacggcgucaccaacaaggucaacuccgucaucgagaagaugaacacccaguucaccgccgucggcaaggaguucaaccaccucgagaagcgcaucgagaaccucaacaagaaggucgacgacggcuuccucgacgucuggaccuacaacgccgagcuccucguccuccucgagaacgagcgcacccucgacuaccacgacuccaacgucaagaaccucuacgagaagguccgcucccagcucaagaacaacgccaaggagaucggcaacggcugcuucgaguucuaccacaagugcgacgacaccugcauggaguccgucaagaacggcaccuacgacuaccccaaguacuccgaggaguccaagcucaaccgcgaggagaucgacggcgucaagcucgaguccacccgcaucuaccagauccucgccaucuacuccaccgucgccuccucccucauccuccucgucucccucggcgccaucuccuucuggaugugcuccaacggcucccuccagugccgcaucugcaucuga

SEQ ID NO: 96051 - RNA, 1701 nt, Artificial Sequence
  derived and/or modified CDS sequence (opt2) from hemagglutinin__InfluenzaA__AAF87281
augaaggccauccucgucguccuccucuacaccuucaccaccgccaacgccgacacccucugcaucggcuaccacgccaacaacuccaccgacaccgucgacaccguccucgagaagaacgucaccgucacccacuccgucaaccuccucgaggaccgccacaacggcaagcucugcaagcucaagggcaucgccccccuccaccucggcaagugcaacaucgccggcuggcuccucggcaaccccgagugcgagcuccucuucaccgccuccuccugguccuacaucgucgagaccuccaacuccgacaacggcaccugcuaccccggcgacuucaucaacuacgaggagcuccgcgagcagcucuccuccgucuccuccuucgagcgcuucgagaucuuccccaaggccuccuccuggcccaaccacgagaccaaccgcggcgucaccuccgccugccccuacgccggcgccaacuccuucuaccgcaaccucaucuggcucgucaagaagggcaacuccuaccccaagcucuccaaguccuacaucaacaacaagggcaagaagguccucguccucuggggcauccaccacccccccaccuccaccgaccagcagucccucuaccagaacgccgacgccuacgucuucgucggcuccuccaaguacaacaagaaguucaugcccgagaucgccacccgccccaagguccgcggccaggccggccgcaugaacuacuacuggacccucaucgagcccggcgacaccaucaccuucgaggccaccggcaaccucgucgucccccgcuacgccuucgccauggagcgcggcuacggcuccggcaucaucaucuccgacacccccguccacgacugcaacaccaccugccagacccccaagggcgccaucaacaccucccuccccuuccagaacauccaccccgucaccaucggcgagugccccaaguacgucaaguccaccaagcuccgcauggccaccggccuccgcaacauccccuccauccagucccgcggccucuucggcgccaucgccggcuucaucgagggcggcuggaccggcaugaucgacggcugguacggcuaccaccaccagaacgagcagggcuccggcuacgccgccgaccgcaaguccacccagaacgccaucgacggcaucaccaacaaggucaacuccgucaucgagaagaugaacacccaguucaccgccgucggcaaggaguucaaccaccucgagaagcgcaucgagaaccucaacaagaaggucgacgacggcuuccucgacgucuggaccuacaacgccgagcuccucguccuccucgagaacgagcgcacccucgacuaccacgacuccaacgucaagaaccucuacgagaaggucaagucccagcucaagaacaacgccaaggagaucggcaacggcugcuucgaguucuaccacaagugcgacgacaccugcauggaguccgucaagaacggcaccuacgacuaccccaaguacuccgaggaggccaagcucaaccgcgaggagaucgacggcgucaagcucgaguccacccgcaucuaccagauccucgccaucuacuccaccaucgccuccucccucguccuccucgucucccucggcgccaucuccuucuggaugugcuccaacggcucccuccagugccgcaucugcaucuga

SEQ ID NO: 96052 - RNA, 1701 nt, Artificial Sequence; identical to SEQ ID NO: 96050
  derived and/or modified CDS sequence (opt2) from hemagglutinin__InfluenzaA__AAF87282

SEQ ID NO: 96053 - RNA, 1701 nt, Artificial Sequence
  derived and/or modified CDS sequence (opt2) from hemagglutinin__InfluenzaA__AAF87283
augaaggccauccucgucguccuccucuacgccuucaccaccgccaacgccgacacccucugcaucggcuaccacgccaacaacuccaccgacaccgucgacaccguccucgagaagaacgucaccgucacccacuccgucaaccuccucgaggaccgccacaacggcaagcucugcaagcucaagggcgucgccccccuccaccucggcaagugcaacaucgccggcuggcuccucggcaaccccgagugcgagcuccucuucaccgccuccuccugguccuacaucgucgagaccuccaacuccgacaacggcaccugcuaccccggcgacuucaucaacuacgaggagcuccgcgagcagcucuccuccgucuccuccuucgagcgcuucgagaucuuccccaaggccuccuccuggcccaaccacgagaccaaccgcggcgucaccuccgccugccccuacuccggcgccaacuccuucuaccgcaaccucaucuggcucgucaagaagggcaacuccuaccccaagcucuccaaguccuacaucaacaacaagggcaaggagguccucguccucuggggcauccaccacccccccaccuccaccgaccagcagucccucuaccagaacgccgacgccuacgucuucgucggcuccuccaaguacaacaagaaguucaugcccgagaucgccacccgccccaagguccgcggccaggccggccgcaugaacuacuacuggacccucaucgagcccggcgacaccaucaccuucgaggccaccggcaaccucgucgccccccgcuacgccuucgccauggagcgcggcuccggcuccggcaucaucaucuccgacacccccgucuacgacugcaacaccgccugccagacccccaagggcgccaucaacaccucccuccccuuccagaacauccaccccgucaccaucggcgagugccccaaguacgucaaguccaccaagcuccgcauggccaccggccuccgcaacauccccuccauccagucccgcggccucuucggcgccaucgccggcuucaucgagggcggcuggaccggcaugaucgacggcugguacggcuaccaccaccagaacgagcagggcuccggcuacgcccccgaccgcaaguccacccagaacgccaucgacggcaucaccaacaaggucaacuccgucaucgagaagaugaacacccaguucaccgccgucggcaaggaguucaaccaccucgagaagcgcaucgagaaccucaacaagaaggucgacgacggcuuccucaacgucuggaccuacaacgccgagcuccucguccuccucgagaacgagcgcacccucgacuaccacgacuccaacgucaagaaccucuacgagaagguccgcucccagcucaagaacaacgccaaggagaucggcaacggcugcuucgaguucuaccacaagugcgacgacaccugcauggaguccgucaagaacggcaccuacgacuaccccaaguacuccgaggaggcccgccucaaccgcgaggagaucgacggcgucaagcucgaguccacccgcaucuaccagauccucgccaucuacuccaccaucgccuccucccucguccuccucgucucccucggcgccaucuccuucuggaugugcuccaacggcucccuccagugccgcaucugcaucuga

SEQ ID NO: 96054 - RNA, 1701 nt, Artificial Sequence
  derived and/or modified CDS sequence (opt2) from hemagglutinin__InfluenzaA__AAF87284
augaaggccauccucgucguccuccucuacgccuucaccaccgccaacgccgacacccucugcaucggcuaccacgccaacaacuccaccgacaccgucgacaccguccucgagaagaacgucaccgucacccacuccgucaaccuccucgaggaccgccacaacggcaagcucugcaagcucaagggcgucgccccccuccaccucggcaagugcaacaucgccggcuggcuccucggcaaccccgagugcgagcuccucuucaccgccuccuccugguccuacaucgucgagaccuccaacuccgacaacggcaccugcuaccccggcgacuucaucaacuacgaggagcuccgcgagcagcucuccuccgucuccuccuucgagcgcuucgagaucuuccccaaggccuccuccuggcccaaccacgagaccaaccgcggcgucaccuccgccugccuccucuucugguccaagcagcuccuccagaagcucaacauggccggcaagaagggcaacuccuaccccaagcucuccaaguccuacaucaacaacaagggcaaggagguccucguccucuggggcauccaccacccccccaccuccaccgaccagcagucccucuaccagaacgccgacgccuacgucuucgucggcuccuccaaguacaacaagaaguucaugcccgagaucgccacccgccccaagguccgcggccaggccggccgcaugaacuacuacuggacccucaucgagcccggcgacaccaucaccuucgaggccaccggcaaccucgucgccccccgcuacgccuucgccauggagcgcggcuccggcuccggcaucaucaucuccgacacccccgucuacgacugcaacaccgccugccagacccccaagggcgccaucaacaccucccuccccuuccagaacauccaccccgucaccaucggcgagugccccaaguacgucaaguccaccaagcuccgcauggccaccggccuccgcaacauccccuccauccagucccgcggccucuucggcgccaucgccggcuucaucgagggcggcuggaccggcaugaucgacggcugguacggcuaccaccaccagaacgagcagggcuccggcuacgccgccgaccgcaaguccacccagaacgccaucgacggcaucaccaacaaggucaacuccgucaucgagaagaugaacacccaguucaccgccgucggcaaggaguucaaccaccucgagaagcgcaucgagaaccucaacaagaaggucgacgacggcuuccucaacgucuggaccuacaacgccgagcuccucguccuccucgagaacgagcgcacccucgacuaccacgacuccaacgucaagaaccucuacgagaagguccgcucccagcucaagaacaacgccaaggagaucggcaacggcugcuucgaguucuaccacaagugcgacgacaccugcauggaguccgucaagaacggcaccuacgacuaccccaaguacuccgaggaggcccgccucaaccgcgaggagaucgacggcgucaagcucgaguccacccgcaucuaccagauccucgccaucuacuccaccaucgccuccucccucguccuccucgucucccucggcgccaucuccuucuggaugugcuccaacggcucccuccagugccgcaucugcaucuga

SEQ ID NO: 96055 - RNA, 1701 nt, Artificial Sequence
  derived and/or modified CDS sequence (opt2) from hemagglutinin__InfluenzaA__AAG01749
auguccaccaucaucgcccucuccuacauccucugccucgucuucgcccagaagcuccccggcaacgacaacuccaccgccacccucugccucggccaccacgccguccccaacggcacccucgucaagaccaucaccaacgaccagaucgaggucaccaacgccaccgagcucguccaguccuccuccaccggccgcaucugcgacuccccccaccgcauccucgacggcaagaacugcacccucaucgacgcccuccucggcgacccccacugcgacggcuuccagaacaaggagugggaccucuucgucgagcgcuccaaggccuacuccaacugcuaccccuacgacguccccgacuacgccucccuccgcucccucgucgccuccuccggcacccucgaguucaccaacgagggcuucaacuggaccggcgucgcccaggacggcaccuccuacgccugcaagcgcggcuccgucaaguccuucuucucccgccucaacuggcuccacaagcucgaguacaaguaccccgcccucaacgucaccaugcccaacaacgacaaguucgacaagcucuacaucuggggcguccaccaccccuccaccgacuccgaccagaccucccucuacguccaggccuccggccgcgucaccgucuccaccaagcgcucccagcagaccgucauccccaacaucggcucccgccccuggguccgcggcaucuccucccgcaucuccaucuacuggaccaucgucaagcccggcgacauccuccucaucaacuccaccggcaaccucaucgccccccgcggcuacuucaagauccgcuccggcaaguccuccaucaugcgcuccgacgcccccaucgacaacugcaacuccgagugcaucacccccaacggcuccauccccaacgagaagcccuuccagaacgucaaccgcaucaccuacggcgccugcccccgcuacgucaagcagaacacccucaagcucgccaccggcaugcgcaacguccccgagaagcagacccgcggcaucuucggcgccaucgccggcuucaucgagaacggcugggagggcauggucgacggcugguacggcuuccgccaccagaacuccgagggcaccggccaggccgccgaccucaaguccacccaggccgccaucaaccagaucaacggcaagcucaaccgccucaucgagaagaccaacgagaaguuccaccagaucgagaaggaguucuccgaggucgagggccgcauccaggaccucgagaaguacgucgaggacaccaagaucgaccucugguccuacaacgccgagcuccucgucgcccucgagaaccagcacaccaucgaccucaccgacuccgagaugaacaagcucuucgagcgcacccgcaagcagcuccgcgagaacgccgaggacaugggcaacggcugcuucaagaucuaccacaagugcgacaacgccugcaucggcuccauccgcaacggcaccuacgaccacgacgucuaccgcgacgaggcccucaacaaccgcuuccagaucaagggcgucgagcucaaguccggcuacaaggacuggauccucuggaucuccuucgccaucuccugcuuccuccucugcgucguccuccucggcuucaucaugugggccugccagaagggcaacauccgcugcaacaucugcaucuga

SEQ ID NO: 96056 - RNA, 1701 nt, Artificial Sequence
  derived and/or modified CDS sequence (opt2) from hemagglutinin__InfluenzaA__AAG01767
augaacaccaucaucgcccucuccuacauccucugccucgucuucgcccagaagcuccccggcaacgacaacuccaccgccacccucugccucggccaccacgccguccccaacggcacccucgucaagaccaucaccaacgaccagaucgaggucaccaacgccaccgagcucguccaguccuccuccaccggccgcaucugcgacuccccccaccgcauccucgacggcaagaacugcacccucaucgacgcccuccucggcgacccccacugcgacggcuuccagaacaaggagugggaccucuucaucgagcgcuccaaggccuacuccaacugcuaccccuacgacguccccgacuacuccucccuccgcucccucgucgccuccuccggcacccucgaguucaccaacgaggacuucaacuggaccggcgucgcccaggacggcggcuccuacuccugcaagcgcgaguccgucaaguccuucuucucccgccucaacuggcuccacaagcucgaguacaaguaccccgcccucaacgucaccaugcccaacaacgacaaguucgacaagcucuacaucuggggcguccaccaccccuccaccgacuccgagcagaccucccucuacguccaggccaucggccgcgucaccgucuccaccaaguccucccagcagaccgucauccccaacaucggcucccgccccuggguccgcggcaucuccucccgcaucuccaucuacuggaccaucgucaagcccggcgacauccuccucaucuccuccaccggcaaccucaucgccccccgcggcuacuucaagauccgcaacggcaaguccuccaucaugcgcuccgacgcccccaucgacaacugcuacuccgagugcaucacccccaacggcuccauccccaacgacaagcccuuccagaacgucaaccgcaucaccuacggcgccugccccaaguacgucaagcagaagacccucaagcucgccaccggcaugcgcaacguccccgagaagcagacccgcggcaucuucggcgccaucgccggcuucaucgagaacggcugggagggcauggucgacggcugguacggcuuccgccaccagaacuccgagggcaccggccaggccgccgaccucaaguccacccaggccgccaucgaccaggucaacggcaagcucaaccgccucaucgagaagaccaacgagaaguuccaccagaucgagaaggaguucuccgaggucgagggccgcauccaggaccucgagaaguacgucgaggacaccaagaucgaccucugguccuacaacgccgagcuccucgucgcccucgagaaccagcacaccaucgaccucaccgacuccgagaugaacaagcucuucgagaagacccgcaagcagcuccgcgagaacgccgaggacaugggcaacggcugcuucaagaucuaccacaagugcgacaacgccugcaucggcuccauccgcaacggcaccuacgaccacgacgucuaccgcgacgaggcccucaacaaccgcuuccagaucaagggcgucgagcucaaguccggcuacaaggacuggauccucuggaucuccuucgccaucuccugcuuccuccucugcgucguccuccucggcuucaucaugugggccugccagaagggcaacauccgcugcaacaucugcaucuga

SEQ ID NO: 96057 - RNA, 1701 nt, Artificial Sequence
  derived and/or modified CDS sequence (opt2) from hemagglutinin__InfluenzaA__AAG01776
augaacaccaucaucgcccucuccuacauccucugccucgucuucgcccagaagcuccccggcaacgacaacuccaccgccacccucugccucggccaccacgccguccccaacggcacccucgucaagaccaucaccaacgaccagaucgaggucaccaacgccaccgagcucguccaguccuccuccaccggccgcaucugcgacuccccccaccgcauccucgacggcaagaacugcacccucaucgacgcccuccucggcgacccccacugcgacggcuuccagaacaaggagugggaccucuucaucgagcgcuccaaggccuacuccaacugcuaccccuacgacguccccgacuacuccucccuccgcucccucgucgccuccuccggcacccucgaguucaccaacgaggacuucaacuggaccggcgucgcccaggacggcggcuccuacuccugcaagcgcgaguccgucaaguccuucuucucccgccucaacuggcuccacaagcucgaguacaaguaccccgcccucaacgucaccaugcccaacaacgacaaguucgacaagcucuacaucuggggcguccaccaccccuccaccgacuccgagcagaccucccucuacguccaggccaucggccgcgucaccgucuccaccaaguccucccagcagaccgucauccccaacaucggcucccgccccuggguccgcggcaucuccucccgcaucuccaucuacuggaccaucgucaagcccggcgacauccuccucaucuccuccaccggcaaccucaucgccccccgcggcuacuucaagauccgcaacggcaaguccuccaucaugcgcuccgacgcccccaucgacaacugcuacuccgagugcaucacccccaacggcuccauccccaacgacaagcccuuccagaacgucaaccgcaucaccuacggcgccugccccaaguacgucaagcagaagacccucaagcucgccaccggcaugcgcaacguccccgagaagcagacccgcggcaucuucggcgccaucgccggcuucaucgagaacggcugggagggcauggucgacggcugguacggcuuccgccaccagaacuccgagggcaccggccaggccgccgaccucaaguccacccaggccgccaucgaccaggucaacggcaagcucaacuggcucaucgagaagaccaacgagaaguuccaccagaucgagaaggaguucuccgaggucgagggccgcauccaggaccucgagaaguacgucgaggacaccaagaucgaccucugguccuacaacgccgagcuccucgucgcccucgagaaccagcacaccaucgaccucaccgacuccgagaugaacaagcucuucgagaagacccgcaagcagcuccgcgagaacgccgaggacaugggcaacggcugcuucaagaucuaccacaagugcgacaacgccugcaucggcuccauccgcaacggcaccuacgaccacgacgucuaccgcgacgaggcccucaacaaccgcuuccagaucaagggcgucgagcucaaguccggcuacaaggacuggauccucuggaucuccuucgccaucuccugcuuccuccucugcgucguccuccucggcuucaucaugugggccugccagaagggcaacauccgcugcaacaucugcaucuga

SEQ ID NO: 96058 - RNA, 1701 nt, Artificial Sequence
  derived and/or modified CDS sequence (opt2) from hemagglutinin__InfluenzaA__AAG01785
augaagaccaucaucgcccucuccuacauccucugccucgucuucgcccagaagcuccccggcaacgacaacuccaccgccacccucugccucggccaccacgccguccccaacggcacccucgucaagaccaucaccaacgaccagaucgaggucaccaacgccaccgagcucguccaguccuccuccaccggccgcaucugcgacuccccccaccgcauccucgacggcaagaacugcacccucaucgacgcccuccucggcgacccccacugcgacggcuuccagaacaaggagugggaccucuucaucgagcgcuccaaggccuacuccaacugcuaccccuacgacguccccgacuacuccucccuccgcucccucgucgccuccuccggcacccucgaguucaccaacgaggacuucaacuggaccggcgucgcccaggacggcggcuccuacuccugcaagcgcgaguccgucaaguccuucuucucccgccucaacuggcuccacaagcucgaguacaaguaccccgcccucaacgucaccaugcccaacaacgacaaguucgacaagcucuacaucuggggcguccaccaccccuccaccgacuccgagcagaccucccucuacguccaggccaucggccgcgucaccgucuccaccaaguccucccagcagaccgucauccccaacaucggcucccgccccuggguccgcggcaucuccucccgcaucuccaucuacuggaccaucgucaagcccggcgacauccuccucaucuccuccaccggcaaccucaucgccccccgcggcuacuucaagauccgcaacggcaaguccuccaucaugcgcuccgacgcccccaucgacaacugcuacuccgagugcaucacccccaacggcuccauccccaacgacaagcccuuccagaacgucaaccgcaucaccuacggcgccugccccaaguacgucaagcagaagacccucaagcucgccaccggcaugcgcaacguccccgagaagcagacccgcggcaucuucggcgccaucgccggcuucaucgagaacggcugggagggcauggucgacggcugguacggcuuccgccaccagaacuccgagggcaccggccaggccgccgaccucaaguccacccaggccgccaucgaccaggucaacggcaagcucaaccgccucaucgagaagaccaacgagaaguuccaccagaucgagaaggaguucuccgaggucgagggccgcauccaggaccucgagaaguacgucgaggacaccaagaucgaccucugguccuacaacgccgagcuccucgucgcccucgagaaccagcacaccaucgaccucaccgacuccgagaugaacaagcucuucgagaagacccgcaagcagcuccgcgagaacgccgaggacaugggcaacggcugcuucaagaucuaccacaagugcgacaacgccugcaucggcuccauccgcaacggcaccuacgaccacgacgucuaccgcgacgaggcccucaacaaccgcuuccagaucaagggcgucgagcucaaguccggcuacaaggacuggauccucuggaucuccuucgccaucuccugcuuccuccucugcgucguccuccucggcuucaucaugugggccugccagaagggcaacauccgcugcaacaucugcaucuga

SEQ ID NO: 96059 - RNA, 1701 nt, Artificial Sequence
  derived and/or modified CDS sequence (opt2) from hemagglutinin__InfluenzaA__AAK52911
augaagaccaucaucgcccucuccuacauccucugccucgucuucgcccagaagcuccccggcaacgacaacuccaccgccacccucugccucggccaccacgccguccccaacggcacccucgucaagaccaucaccaacgaccagaucgaggucaccaacgccaccgagcucguccaguccuccuccaccggccgcaucugcgacuccccccaccagauccucgacggcaagaacugcacccucaucgacgcccuccucggcgacccccacugcgacggcuuccagaacaaggagugggaccucuucgucgagcgcuccaccgccuacuccaacugcuaccccuacgacguccccgacuacgccucccuccgcucccucgucgccuccuccggcacccucgaguucaccaaggagggcuucaacuggaccggcgucgcccaggacggcaccuccuacgccugcaagcgcggcuccgucaaguccuucuucucccgccucaacuggcuccacaagcucgaguacaaguaccccgcccucaacgucaccaugcccaacaacgacaaguucgacaagcucuacaucuggggcguccaccaccccuccaccgacuccgaccagaccucccucuacguccaggccuccggccgcgucaccgucuccaccaagcgcucccagcagaccgucauccccaacaucggcucccgccccuggguccgcggcgucuccucccgcaucuccaucuacuggaccaucgucaagcccggcgacauccuccucaucaacuccaccggcaaccucaucgccccccgcggcuacuucaagauccgcuccggcaaguccuccaucaugcgcuccgacgcccccaucgacaacugcaacuccgagugcaucacccccaacggcuccauccccaacgacaagcccuuccagaacgucaaccgcaucaccuacggcgccugcccccgcuacgucaagcagaacacccucaagcucgccaccggcaugcgcaacguccccgagaagcagacccgcggcaucuucggcgccaucgccggcuucaucgagaacggcugggagggcauggucgacggcugguacggcuuccgccaccagaacuccgagggcaccggccaggccgccgaccucaaguccacccaggccgccaucaaccagaucaacggcaagcucaaccgccucaucgagaagaccaacgagaaguuccaccagaucgagaaggaguucuccgaggucgagggccgcauccaggaccucgagaaguacgucgaggacaccaagaucgaccucugguccuacaacgccgagcuccucgucgcccucgagaaccagcacaccaucgaccucaccgacuccgagaugaacaagcucuucgagcgcacccgcaagcagcuccgcgagaacgccgaggacaugggcaacggcugcuucaagaucuaccacaagugcgacaacgccugcaucggcuccauccgcaacggcaccuacgaccacgacgucuaccgcgacgaggcccucaacaaccgcuuccagaucaagggcgucgagcucaaguccggcuacaaggacuggauccucuggaucuccuucgccaucuccugcuuccuccucugcgucguccuccucggcuucaucaugugggccugccagaagggcaacauccgcugcaacaucugcaucuga

SEQ ID NO: 96060 - RNA, 1701 nt, Artificial Sequence
  derived and/or modified CDS sequence (opt2) from hemagglutinin__InfluenzaA__AAK52912
augaagaccaucaucgcccucuccuacauccucugccucgucuucgcccagaagcuccccggcaacgacaacuccaccgccacccucugccucggccaccacgccguccccaacggcacccucgucaagaccaucaccaacgaccagaucgaggucaccaacgccaccgagcucguccaguccuccuccaccggccgcaucugcgacuccccccaccgcauccucgacggcaagaacugcacccucaucgacgcccuccucggcgacccccacugcgacggcuuccagaacaaggagugggaccucuucgucgagcgcaccaaggccuacuccaacugcuaccccuacgacguccccgacuacgccucccuccgcucccucgucgccuccuccggcacccucgaguucaccaacgagggcuucaacuggaccggcgucgcccagaacggcaccuccuacgccugcaagcgcggcuccgucaaguccuucuucucccgccucaacuggcuccacaagcucgaguacaaguaccccgcccucaacgucaccaugcccaacaacgacaaguucgacaagcucuacaucuggggcguccaccaccccuccaccgacuccgaccagaccucccucuacguccaggccuccggccgcgucaccgucuccaccaagcgcucccagcagaccgucauccccaacaucggcucccgccccuggguccgcggcgucuccucccgcaucuccaucuacuggaccaucgucaagcccggcgacauccuccucaucaacuccaccggcaaccucaucgccccccgcggcuacuucaagauccgcuccggcaaguccuccaucaugcgcuccgacgcccccaucggcaacugcaacuccgagugcaucacccccaacggcuccauccccaacgacaagcccuuccagaacgucaaccgcaucaccuacggcgccugcccccgcuacgucaagcagaacacccucaagcucgccaccggcaugcgcaacguccccgagaagcagacccgcggcaucuucggcgccaucgccggcuucaucgagaacggcugggagggcauggucgacggcugguacggcuuccgccaccagaacuccgagggcaccggccaggccgccgaccucaaguccacccaggccgccaucaaccagaucaacggcaagcucaaccgccucaucgagaagaccaacgagaaguuccaccagaucgagaaggaguucuccgaggucgagggccgcauccaggaccucgagaaguacgucgaggacaccaagaucgaccucugguccuacaacgccgagcuccucgucgcccucgagaaccagcacaccaucgaccucaccgacuccgagaugaacaagcucuucgagcgcacccgcaagcagcuccgcgagaacgccgaggacaugggcaacggcugcuucaagaucuaccacaagugcgacaacgccugcaucggcuccauccgcaacggcaccuacgaccacgacgucuaccgcgacgaggcccucaacaaccgcuuccagaucaagggcgucgagcucaaguccggcuacaaggacuggauccucuggaucuccuucgccaucuccugcuuccuccucugcgucguccuccucggcuucaucaugugggccugccagaagggcaacauccgcugcaacaucugcaucuga

SEQ ID NO: 96061 - RNA, 1701 nt, Artificial Sequence
  derived and/or modified CDS sequence (opt2) from hemagglutinin__InfluenzaA__AAK71687
augaaggccauccucgucguccuccucuacaccuucaccaccgccaacgccgacacccucugcaucggcuaccacgccaacaacuccaccgacaccgucgacaccguccucgagaagaacgucaccgucacccacuccgucaaccuccucgaggaccgccacaacggcaagcucugcaagcuccgcggcgucgccccccuccaccucggcaagugcaacaucgccggcuggcuccucggcaaccccgagugcgagucccucuucaccgccuccuccugguccuacaucgucgagaccuccaacuccgacaacggcaccugcuaccccggcgacuucaucaacuacgaggagcuccgcgagcagcucuccuccgucuccuccuucgagcgcuucgagaucuuccccgagaccuccuccuggcccaaccacgacaccaaccgcggcgucaccgccgccugcccccacgccggcgccaacuccuucuaccgcaaccucaucuggcucgccaagaagggcgacuccuaccccaagcucuccaaguccuacaucaacaacaagggcaaggagguccucguccucuggggcauccaccacccccccaccuccgccgaccagcagucccucuaccagaacgccgacgccuacgucuucgucggcuccucccgcuacuccaagaaguucaagcccgagaucgccacccgccccaagguccgcggccaggccggccgcaugaacuacuacuggacccucgucgagcccggcgacaagaucaccuucgaggccaccggcaaccucgucgucccccgcuacgccuucgccaugaagcgcaacuccgaguccggcaucaucaucuccgacaucuccguccacgacugcaacaccaccugccagacccccaagggcgccaucaacaccucccuccccuuccagaacauccaccccgucaccaucggcgagugccccaaguacgucaaguccaccaagcuccgcauggccaccggccuccgcaacguccccuccauccagucccgcggccucuucggcgccaucgccggcuucaucgagggcggcuggaccggcaugaucgacggcugguacggcuaccaccaccagaacgagcagggcuccggcuacgccgccgaccucaaguccacccagaacgccaucgacggcaucaccaacaaggucaacuccgucaucgagaagaugaacacccaguucaccgucgucggcaaggaguucaaccaccucgagaagcgcaucgagaaccucaacaagaaggucgacgacggcuuccucgacaucuggaccuacaacgccgagcuccucguccuccucgagaacgagcgcacccucgacuaccacgacuccaacgucaagaaccucuacgagaagguccgcucccagcucaagaacaacgccaaggagaucggcaacggcugcuucgaguucuaccacaagugcgacgacaccugcauggaguccgucaagaacggcaccuacgacuaccccaaguacuccgaggaggccaagcucaaccgcgaggagaucgacggcgucaagcucgaguccacccgcaucuaccagauccucgccaucuacuccaccgucgccuccucccucguccucgucgucucccucggcaccaucuccuucuggaugugcuccaacggcucccuccagugccgcaucugcaucuga

SEQ ID NO: 96062 - RNA, 1707 nt, Artificial Sequence
  derived and/or modified CDS sequence (opt2) from hemagglutinin__InfluenzaA__AAS65618
auggagaagaucguccuccucuucgccaucgucucccucgucaaguccgaccagaucugcaucggcuaccacgccaacaacuccaccgagcaggucgacaccaucauggagaagaacgucaccgucacccacgcccaggacauccucgagaagacccacaacggcaagcucugcgaccucgacggcgucaagccccucauccuccgcgacugcuccgucgccggcuggcuccucggcaaccccaugugcgacgaguucaucaacguccccgagugguccuacaucgucgagaaggccaaccccgucaacgaccucugcuaccccggcgacuucaacgacuacgaggagcucaagcaccuccucucccgcaucaaccacuucgagaagauccagaucauccccaaguccuccugguccucccacgaggucucccucggcgucuccuccgccugccccuaccagggcaaguccuccuucuuccgcaacgucgucuggcucaucaagaagaacuccaccuaccccaccaucaagcgcuccuacaacaacaccaaccaggaggaccuccucguccucuggggcauccaccaccccaacgacgccgccgagcagaccaagcucuaccagaaccccaccaccuacaucuccgucggcaccuccacccucaaccagcgccucgucccccgcaucgccacccgcuccaaggucaacggccaguccggccgcauggaguucuucuggaccauccucaagcccaacgacgccaucaacuucgaguccaacggcaacuucaucgcccccgaguacgccuacaagaucgucaagaagggcgacuccaccaucaugaaguccgagcucgaguacggcaacugcaacaccaagugccagacccccaugggcgccaucaacuccuccaugcccuuccacaacauccacccccucaccaucggcgagugccccaaguacgucaaguccaaccgccucguccucgccaccggccuccgcaacuccccccagcgcgagcgccgccgcaagaagcgcggccucuucggcgccaucgccggcuucaucgagggcggcuggcagggcauggucgacggcugguacggcuaccaccacuccaacgagcagggcuccggcuacgccgccgccaaggaguccacccagaaggccaucgacggcgucaccaacaaggucaacuccaucaucgacaagaugaacacccaguucgaggccgucggccgcgaguucaacaaccucgagcgccgcaucgagaaccucaacaagaagauggaggacggcuuccucgacgucuggaccuacaacgccgagcuccucguccucauggagaacgagcgcacccucgacuuccacgacuccaacgucaagaaccucuacgacaagguccgccuccagcucaaggacaacgccaaggagcucggcaacggcugcuucgaguucuaccacaagugcgacaacgagugcauggaguccguccgcaacggcaccuacgacuacccccaguacuccgaggaggcccgccucaagcgcgaggagaucuccggcgucaagcucgaguccaucggcaucuaccagauccucuccaucuacuccaccgucgccuccucccucgcccucgccaucauggucgccggccucucccucuggaugugcuccaacggcucccuccagugccgcaucugcaucuga

SEQ ID NO: 96063 - RNA, 1704 nt, Artificial Sequence
  derived and/or modified CDS sequence (opt2) from hemagglutinin__InfluenzaA__AAT38819
augaacacccagauccucgccuucaucgccugcaugcucaucggcaccaagggcgacaagaucugccucggccaccacgccgucgccaacggcaccaaggucaacacccucaccgagcgcggcaucgaggucgucaacgccaccgagaccgucgagaccgucaacaucaagaagaucugcacccagggcaagcgccccaccgaccucggccagugcggccuccucggcacccucaucggccccccccagugcgaccaguuccucgaguucgacgccaaccucaucaucgagcgccgcgagggcaccgacgucugcuaccccggcaaguucaccaacgaggagucccuccgccagauccuccgcggcuccggcggcaucgacaaggaguccaugggcuucaccuacuccggcauccgcaccaacggcgccaccuccgccugccgccgcuccggcuccuccuucuacgccgagaugaaguggcuccucuccaacuccgacaacgccgccuucccccagaugaccaaguccuaccgcaacccccgcaacaagcccgcccucaucaucuggggcguccaccacuccggcuccgccaccgagcagaccaagcucuacggcuccggcaacaagcucaucaccgucggcuccuccaaguaccagcaguccuucacccccucccccggcgcccgcccccaggucaacggccaguccggccgcaucgacuuccacuggcuccuccucgaccccaacgacaccgucaccuucaccuucaacggcgccuucaucgcccccgaccgcgccuccuucuuccgcggcgagucccucggcguccaguccgacgucccccucgacuccggcugcgagggcgacugcuuccacuccggcggcaccaucgucuccucccuccccuuccagaacaucaacccccgcaccgucggcaagugcccccgcuacgucaagcagaccucccuccuccucgccaccggcaugcgcaacguccccgagaaccccaagcaggccuaccagaagcagaugacccgcggccucuucggcgccaucgccggcuucaucgagaacggcugggagggccucaucgacggcugguacggcuuccgccaccagaacgcccagggcgagggcaccgccgccgacuacaaguccacccaguccgccaucgaccagaucaccggcaagcucaaccgccucaucgacaagaccaaccagcaguucgagcucaucgacaacgaguucuccgagaucgagcagcagaucggcaacgucaucaacuggacccgcgacuccaugaccgaggucugguccuacaacgccgagcuccucgucgccauggagaaccagcacaccaucgaccucgccgacuccgagaugaacaagcucuacgagcgcguccgcaagcagcuccgcgagaacgccgaggaggacggcaccggcugcuucgagaucuuccacaagugcgacgaccagugcauggaguccauccgcaacaacaccuacgaccacacccaguaccgcaccgagucccuccagaaccgcauccagaucgaccccgucaagcucuccuccggcuacaaggacaucauccucugguucuccuucggcgccuccugcuuccuccuccucgccaucgccaugggccucgucuucaucugcaucaagaacggcaacaugcgcugcaccaucugcaucuga

SEQ ID NO: 96064 - RNA, 1707 nt, Artificial Sequence
  derived and/or modified CDS sequence (opt2) from hemagglutinin__InfluenzaA__AAV32636
auggagaagaucguccuccucuucgccaucgucucccucgucaaguccgaccagaucugcaucggcuaccacgccaacaacuccaccgagcaggucgacaccaucauggagaagaacgucaccgucacccacgcccaggacauccucgagaagacccacaacggcaagcucugcgaccucgacggcgucaagccccucauccuccgcgacugcuccgucgccggcuggcuccucggcaaccccaugugcgacgaguucaucaacguccccgagugguccuacaucgucgagaaggccaaccccgucaacgaccucugcuaccccggcgacuucaacgacuacgaggagcucaagcaccuccucucccgcaucaaccacuucgagaagauccagaucauccccaaguccuccugguccucccacgaggccucccucggcgucuccuccgccugccccuaccagggcaaguccuccuucuuccgcaacgucgucuggcucaucaagaagaacuccaccuaccccaccaucaagcgcuccuacaacaacaccaaccaggaggaccuccucguccucuggggcauccaccaccccaacgacgccgccgagcagaccaagcucuaccagaaccccaccaccuacaucuccgucggcaccuccacccucaaccagcgccucgucccccgcaucgccacccgcuccaaggucaacggccaguccggccgcauggaguucuucuggaccauccucaagcccaacgacgccaucaacuucgaguccaacggcaacuucaucgcccccgaguacgccuacaagaucgucaagaagggcgacuccaccaucaugaaguccgagcucgaguacggcaacugcaacaccaagugccagacccccaugggcgccaucaacuccuccaugcccuuccacaacauccacccccucaccaucggcgagugccccaaguacgucaaguccaaccgccucguccucgccaccggccuccgcaacuccccccagcgcgagcgccgccgcaagaagcgcggccucuucggcgccaucgccggcuucaucgagggcggcuggcagggcauggucgacggcugguacggcuaccaccacuccaacgagcagggcuccggcuacgccgccgacaaggaguccacccagaaggccaucgacggcgucaccaacaaggucaacuccaucaucgacaagaugaacacccaguucgaggccgucggccgcgaguucaacaaccucgagcgccgcaucgagaaccucaacaagaagauggaggacggcuuccucgacgucuggaccuacaacgccgagcuccucguccucauggagaacgagcgcacccucgacuuccacgacuccaacgucaagaaccucuacgacaagguccgccuccagcuccgcgacaacgccaaggagcucggcaacggcugcuucgaguucuaccacaagugcgacaacgagugcauggaguccguccgcaacggcaccuacgacuacccccaguacuccgaggaggcccgccucaagcgcgaggagaucuccggcgucaagcucgaguccaucggcaucuaccagauccucuccaucuacuccaccgucgccuccucccucgcccucgccaucauggucgccggccucucccucuggaugugcuccaacggcucccuccagugccgcaucugcaucuga

SEQ ID NO: 96065 - RNA, 1707 nt, Artificial Sequence; identical to SEQ ID NO: 96064
  derived and/or modified CDS sequence (opt2) from hemagglutinin__InfluenzaA__AAV34704

SEQ ID NO: 96066 - RNA, 1707 nt, Artificial Sequence
  derived and/or modified CDS sequence (opt2) from hemagglutinin__InfluenzaA__AAV65826
auggagaagaucguccuccucuucgccaucgucucccucgucaaguccgaccagaucugcaucggcuaccacgccaacaacuccaccgagcaggucgacaccaucauggagaagaacgucaccgucacccacgcccaggacauccucgagaagacccacaacggcaagcucugcgaccucgacggcgucaagccccucauccuccgcgacugcuccgucgccggcuggcuccucggcaaccccaugugcgacgaguucaucaacguccccgagugguccuacaucgucgagaaggccaaccccgucaacgaccucugcuaccccggcgacuucaacgacuacgaggagcucaagcaccuccucucccgcaucaaccacuucgagaagauccagaucauccccaaguccuccugguccucccacgaggccucccucggcgucuccuccgccugccccuaccagggcaaguccuccuucuuccgcaacgucgucuggcucaucaagaagaacuccaccuaccccaccaucaagcgcuccuacaacaacaccaaccaggaggaccuccucguccucggcggcauccaccaccccaacgacgccgccgagcagaccaagcucuaccagaaccccaccaccuacaucuccgucggcaccuccacccucaaccagcgccucgucccccgcaucgccacccgcuccaaggucaacggccaguccggccgcauggaguucuucuggaccauccucaagcccaacgacgccaucaacuucgaguccaacggcaacuucaucgcccccgaguacgccuacaagaucgucaagaagggcgacuccaccaucaugaaguccgagcucgaguacggcaacugcaacaccaagugccagacccccaugggcgccaucaacuccuccaugcccuuccacaacauccacccccucaccaucggcgagugccccaaguacgucaaguccaaccgccucguccucgccaccggccuccgcaacuccccccagcgcgagcgccgccgcaagaagcgcggccucuucggcgccaucgccggcuucaucgagggcggcuggcagggcauggucgacggcugguacggcuaccaccacuccaacgagcagggcuccggcuacgccgccgacaaggaguccacccagaaggccaucgacggcgucaccaacaaggucaacuccaucaucgacaagaugaacacccaguucgaggccgucggccgcgaguucaacaaccucgagcgccgcaucgagaaccucaacaagaagauggaggacggcuuccucgacgucuggaccuacaacgccgagcuccucguccucauggagaacgagcgcacccucgacuuccacgacuccaacgucaagaaccucuacgacaagguccgccuccagcuccgcgacaacgccaaggagcucggcaacggcugcuucgaguucuaccacaagugcgacaacgagugcauggaguccguccgcaacggcaccuacgacuacccccaguacuccgaggaggcccgccucaagcgcgaggagaucuccggcgucaagcucgaguccaucggcaucuaccagauccucuccaucuacuccaccgucgccuccucccucgcccucgccaucauggucgccggccucucccucuggaugugcuccaacggcucccuccagugccgcaucugcaucuga

SEQ ID NO: 96067 - RNA, 1701 nt, Artificial Sequence
  derived and/or modified CDS sequence (opt2) from hemagglutinin__InfluenzaA__AAX11505
augaagaccaucaucgcccucuccuacauccucugccucgucuucgcccagaagcuccccggcaacgacaacuccaccgccacccucugccucggccaccacgccguccccaacggcaccaucgucaagaccaucaccaacgaccagaucgaggucaccaacgccaccgagcucguccaguccuccuccaccggcggcaucugcgacuccccccaccagauccucgacggcgagaacugcacccucaucgacgcccuccucggcgacccccagugcgacggcuuccagaacaagaagugggaccucuucgucgagcgcuccaaggccuacuccaacugcuaccccuacgacguccccgacuacgccucccuccgcucccucgucgccuccuccggcacccucgaguucaacaacgaguccuucaacuggaccggcgucacccagaacggcaccuccuccgccugcgagcgccgcuccaacaaguccuucuucucccgccucaacuggcucacccaccucaaguacaaguaccccgcccucaacgucaccaugcccaacaacgagaaguucgacaagcucuacaucuggggcguccaccaccccggcaccgacuccgaccagaucucccucuacgcccaggccuccggccgcaucaccgucuccaccaagcgcucccagcagaccgucauccccaacaucggcucccgcccccgcguccgcgacgucuccucccgcaucuccaucuacuggaccaucgucaagcccggcgacauccuccucaucaacuccaccggcaaccucaucgccccccgcggcuacuucaagauccgcuccggcaaguccuccaucaugcgcuccgacgcccccaucggcaagugcaacuccgagugcaucacccccaacggcuccauccccaacgacaagcccuuccagaacgucaaccgcaucaccuacggcgccugcccccgcuacgucaagcagaacacccucaagcucgccaccggcaugcgcaacguccccgagaagcagacccgcggcaucuucggcgccaucgccggcuucaucgagaacggcugggagggcauggucgacggcugguacggcuuccgccaccagaacuccgagggcaccggccaggccgccgaccucaaguccacccaggccgccaucaaccagaucaacggcaagcucaaccgccucaucggcaagaccaacgagaaguuccaccagaucgagaaggaguucuccgaggucgagggccgcauccaggaccucgagaaguacgucgaggacaccaagaucgaccucugguccuacaacgccgagcuccucgucgcccucgagaaccagcacaccaucgaccucaccgacuccgagaugaacaagcucuucgagcgcaccaagaagcagcuccgcgagaacgccgaggacaugggcaacggcugcuucaagaucuaccacaagugcgacaacgccugcaucggcuccauccgcaacggcaccuacgaccacgacgucuaccgcgacgaggcccucaacaaccgcuuccagaucaagggcgucgagcucaaguccggcuacaaggacuggauccucuggaucuccuucgccaucuccugcuuccuccucugcgucgcccuccucggcuucaucaugugggccugccagaagggcaacauccgcugcgacaucugcaucuga

SEQ ID NO: 96068 - RNA, 1701 nt, Artificial Sequence
  derived and/or modified CDS sequence (opt2) from hemagglutinin__InfluenzaA__AAX11525
augaagaccaucaucgcccucuccuacauccucugccucgucuucgcccagaagcuccccggcaacgacaacuccaccgccacccucugccucggccaccacgccguccccaacggcaccaucgucaagaccaucaccaacgaccagaucgaggucaccaacgccaccgagcucguccaguccuccuccaccggcggcaucugcgacuccccccaccagauccucgacggcgagaacugcacccucaucgacgcccuccucggcgacccccagugcgacggcuuccagaacaagaagugggaccucuucgucgagcgcuccaaggccuacuccaacugcuaccccuacgacguccccgacuacgccucccuccgcucccucgucgccuccuccggcacccucgaguucaacaacgaguccuucgacuggaccggcgucacccagaacggcaccuccuccgccugcaagcgccgcuccaacaaguccuucuucucccgccucaacuggcucacccaccucaaguacaaguaccccgcccucaacgucaccaugcccaacaacgagaaguucgacaagcucuacaucuggggcguccaccaccccggcaccgacuccgaccagaucucccucuacgcccaggccuccggccgcaucaccgucuccaccaagcgcucccagcagaccgucauccccaacaucggcucccgcccccgcguccgcgacgucuccucccgcaucuccaucuacuggaccaucgucaagcccggcgacauccuccucaucaacuccaccggcaaccucaucgccccccgcggcuacuucaagauccgcuccggcaaguccuccaucaugcgcuccgacgcccccaucggcaagugcaacuccgagugcaucacccccaacggcuccauccccaacgacaagcccuuccagaacgucaaccgcaucaccuacggcgccugcccccgcuacgucaagcagaacacccucaagcucgccaccggcaugcgcaacguccccgagaagcagacccgcggcaucuucggcgccaucgccggcuucaucgagaacggcugggagggcauggucgacggcugguacggcuuccgccaccagaacuccgagggcaccggccaggccgccgaccucaaguccacccaggccgccaucaaccagaucaacggcaagcucaaccgccucaucggcaagaccaacgagaaguuccaccagaucgagaaggaguucuccgaggucgagggccgcauccaggaccucgagaaguacgucgaggacaccaagaucgaccucugguccuacaacgccgagcuccucgucgcccucgagaaccagcacaccaucgaccucaccgacuccgagaugaacaagcucuucgagcgcaccaagaagcagcuccgcgagaacgccgaggacaugggcaacggcugcuucaagaucuaccacaagugcgacaacgccugcaucggcuccauccgcaacggcaccuacgaccacgacgucuaccgcgacgaggcccucaacaaccgcuuccagaucaagggcgucgagcucaaguccggcuacaaggacuggauccucuggaucuccuucgccaucuccugcuuccuccucugcgucgcccuccucggcuucaucaugugggccugccagaagggcaacauccgcugcaacaucugcaucuga

SEQ ID NO: 96069 - RNA, 1701 nt, Artificial Sequence; identical to SEQ ID NO: 96068
  derived and/or modified CDS sequence (opt2) from hemagglutinin__InfluenzaA__AAX11535

SEQ ID NO: 96070 - RNA, 1701 nt, Artificial Sequence; identical to SEQ ID NO: 96068
  derived and/or modified CDS sequence (opt2) from hemagglutinin__InfluenzaA__AAX11545

SEQ ID NO: 96071 - RNA, 1701 nt, Artificial Sequence; identical to SEQ ID NO: 96067
  derived and/or modified CDS sequence (opt2) from hemagglutinin__InfluenzaA__AAX11555

SEQ ID NO: 96072 - RNA, 1701 nt, Artificial Sequence; identical to SEQ ID NO: 96068
  derived and/or modified CDS sequence (opt2) from hemagglutinin__InfluenzaA__AAX11565

SEQ ID NO: 96073 - RNA, 1701 nt, Artificial Sequence
  derived and/or modified CDS sequence (opt2) from hemagglutinin__InfluenzaA__AAX11585
augaagaccaucaucgcccucuccuacauccucugccucgucuucgcccagaagcuccccggcaacgacaacuccaccgccacccucugccucggccaccacgccguccccaacggcaccaucgucaagaccaucaccaacgaccagaucgaggucaccaacgccaccgagcucguccagaucuccuccaccggcggcaucugcgacuccccccaccagauccucgacggcgagaacugcacccucaucgacgcccuccucggcgacccccagugcgacggcuuccagaacaagaagugggaccucuucgucgagcgcuccaaggccuacuccaacugcuaccccuacgacguccccgacuacgccucccuccgcucccucgucgccuccuccggcacccucgaguucaacaacgaguccuucgacuggaccggcgucacccagaacggcaccuccuccgccugcaagcgccgcuccaacaaguccuucuucucccgccucaacuggcucacccaccucaaguacaaguaccccgcccucaacgucaccaugcccaacaacgagaaguucgacaagcucuacaucuggggcguccaccaccccggcaccgacaacgaccagaucucccucuacgcccaggccuccggccgcaucaccgucuccaccaagcgcucccagcagaccgucauccccaacaucggcucccgcccccgcguccgcgacgucuccucccagaucuccaucuacuggaccaucgucaagcccggcgacauccuccucaucaacuccaccggcaaccucaucgccccccgcggcuacuucaagauccgcuccggcaaguccuccaucaugcgcuccgacgcccccaucggcaagugcaacuccgagugcaucacccccaacggcuccauccccaacgacaagcccuuccagaacgucaaccgcaucaccuacggcgccugcccccgcuacgucaagcagaacacccucaagcucgccaccggcaugcgcaacguccccgagaagcagacccgcggcaucuucggcgccaucgccggcuucaucgagaacggcugggagggcauggucgacggcugguacggcuuccgccaccagaacuccgagggcaccggccaggccgccgaccucaaguccacccaggccgccaucaaccagaucaacggcaagcucaaccgccucaucggcaagaccaacgagaaguuccaccagaucgagaaggaguucuccgaggucgagggccgcauccaggaccucgagaaguacgucgaggacaccaagaucgaccucugguccuacaacgccgagcuccucgucgcccucgagaaccagcacaccaucgaccucaccgacuccgagaugaacaagcucuucgagcgcaccaagaagcagcuccgcgagaacgccgaggacaugggcaacggcugcuucaagaucuaccacaagugcgacaacgccugcaucggcuccauccgcaacggcaccuacgaccacgacgucuaccgcgacgaggcccucaacaaccgcuuccagaucaagggcgucgagcucaaguccggcuacaaggacuggauccucuggaucuccuucgccaucuccugcuuccuccucugcgucgcccuccucggcuucaucaugugggccugccagaagggcaacauccgcugcaacaucugcaucuga

SEQ ID NO: 96074 - RNA, 1701 nt, Artificial Sequence; identical to SEQ ID NO: 96068
  derived and/or modified CDS sequence (opt2) from hemagglutinin__InfluenzaA__AAX11605

SEQ ID NO: 96075 - RNA, 1701 nt, Artificial Sequence; identical to SEQ ID NO: 96068
  derived and/or modified CDS sequence (opt2) from hemagglutinin__InfluenzaA__AAX11615

SEQ ID NO: 96076 - RNA, 1701 nt, Artificial Sequence
  derived and/or modified CDS sequence (opt2) from hemagglutinin__InfluenzaA__AAX11625
augaagaccaucaucgcccucuccuacauccucugccucgucuucgcccagaagcuccccggcaacgacaacuccaccgccacccucugccucggccaccacgccguccccaacggcacccucgucaagaccaucaccaacgaccagaucgaggucaccaacgccaccgagcucguccaguccuccuccaccucccgcaucugcgacuccccccaccagauccucgacggcgagaacugcacccucaucgacgcccuccucggcgacccccacugcgacggcuuccagaacaaggagugggaccucuucgucgagcgcuccaaggccuacuccaacugcuaccccuacgacguccccgacuacgucucccuccgcucccucgucgccuccuccggcacccucgaguucaacaacgaguccuucaacuggaccggcgucgcccagaacggcaccuccuccgccugcaagcgccgcuccgacaaguccuucuucucccgccucaacuggcuccaccagcucaaguacaaguaccccgcccucaacgucaccaugcccaacaacgagaaguucgacaagcucuacaucuggggcguccaccaccccggcaccgacuccgaccagaucucccucuacgcccaggccuccggccgcgucaccgucuccaccaagcgcucccagcagaccgucauccccaacaucggcuccggccccuggguccgcggcgucuccucccgcaucuccaucuacuggaccaucgucaagcccggcgacauccuccucaucaacuccaccggcaaccucaucgccccccgcggcuacuucaagauccgcuccggcaaguccuccaucaugcgcuccgacgcccccaucggcaagugcaacuccgagugcaucacccccaacggcuccauccccaacgacaagcccuuccagaacgucaaccgcaucaccuacggcgccugcccccgcuacgucaagcagaacacccucaagcucgccaccggcaugcgcaacguccccgagaagcaggcccgcggcaucuucggcgccaucgccggcuucaucgagaacggcugggagggcaugauggacggcugguacggcuuccgccaccagaacuccgagggcaccggccaggccgccgaccucaaguccacccaggccgccaucaaccagaucaacggcaagcucaaccgccucaucgagaagaccaacgagaaguuccaccagaucgagaaggaguucuccgaggucgagggccgcauccaggaccucgagaaguacgucgaggacaccaagaucgaccucugguccuacaacgccgagcuccucgucgcccucgagaaccagcacaccaucgaccucaccgacuccgagaugaacaagcucuucgagcgcaccaagaagcagcuccgcgagaacgccgaggacaugggcaacggcugcuucaagaucuaccacaagugcgacaacgccugcaucggcuccauccgcaacggcaccuacgaccacgacgucuaccgcgacgaggcccucaacaaccgcuuccagaucaagggcgucgagcucaaguccggcuacaaggacuggauccucuggaucuccuucgccaucuccugcuuccuccucugcaucguccuccucggcuucaucaugugggccugccagaagggcaacauccgcugcaacaucugcaucuga

SEQ ID NO: 96077 - RNA, 1701 nt, Artificial Sequence; identical to SEQ ID NO: 96068
  derived and/or modified CDS sequence (opt2) from hemagglutinin__InfluenzaA__AAX12731

SEQ ID NO: 96078 - RNA, 1701 nt, Artificial Sequence
  derived and/or modified CDS sequence (opt2) from hemagglutinin__InfluenzaA__AAX12741
augaagaccaucaucgcccucuccuacauccucugccucgucuucgcccagaagcuccccggcaacgacaacuccaccgccacccucugccucggccaccacgccguccccaacggcaccaucgucaagaccaucaccaacgaccagaucgaggucaccaacgccaccgagcucguccaguccuccuccaccggcggcaucugcgacuccccccaccagauccucgacggcgagaacugcacccucaucgacgcccuccucggcgacccccagugcgacggcuuccagaacaagaagugggaccucuucgucgagcgcuccaaggccuacuccaacugcuaccccuacgacguccccgacuacgccucccuccgcucccucgucgccuccuccggcacccucgaguucaacaacgaguccuucgacuggaccggcgucacccagaacggcaccuccuccgccugcaagcgccgcuccaacaaguccuucuucucccgccucaacuggcucacccaccucaaguacaaguaccccgcccucaacgucaccaugcccaacaacgagaaguucgacaagcucuacaucuggggcguccaccaccccggcaccgacuccgaccagaucucccucuacgcccaggccuccggccgcaucaccgucuccaccaagcgcucccagcagaccgucauccccaacaucggcucccgcccccgcguccgcgacgucuccucccgcaucuccaucuacuggaccaucgucaagcccggcgacauccuccucaucaacuccaccggcaaccucaucgccccccgcggcuacuucaagauccgcuccggcaaguccuccaucaugcgcuccgacgcccccaucggcaagugcaacuccgagugcaucacccccaacggcuccauccccaacgacaagcccuuccagaacgucaaccgcaucaccuacggcgccugcccccgcuacgucaagcagaacacccucaagcucgccaccggcaugcgcaacguccccgagaagcagacccgcggcaucuucggcgccaucgccggcuucaucgagaacggcugggagggcauggucgacggcugguacggcuuccgccaccagaacuccgagggcaccggccaggccgccgaccucaaguccacccaggccgccaucaaccagaucaacggcaagcucaaccgccucaucggcaagaccaacgagaaguuccaccagaucgagaaggaguucuccgaggucgagggccgcauccaggaccucgagaaguacgucgaggacaccaagaucgaccucugguccuacaacgccgagcuccucgucgcccucgagaaccagcacaccaucgaccucaccgacuccgagaugaacaagcucuucgagcgcaccaagaagcagcuccgcgagaacgccgaggacaugggcaacggcugcuucaagaucuaccacaagugcgacaacgccugcaucggcuccauccgcaacggcaccuacgaccacgacgucuaccgcgacgaggcccucaacaaccgcuuccagaucaagggcgucgagcucaaguccggcuacaaggacuggauccucuggaucuccuucgccaccuccugcuuccuccucugcgucgcccuccucggcuucaucaugugggccugccagaagggcaacauccgcugcaacaucugcaucuga

SEQ ID NO: 96079 - RNA, 1701 nt, Artificial Sequence; identical to SEQ ID NO: 96068
  derived and/or modified CDS sequence (opt2) from hemagglutinin__InfluenzaA__AAX12751

SEQ ID NO: 96080 - RNA, 1701 nt, Artificial Sequence
  derived and/or modified CDS sequence (opt2) from hemagglutinin__InfluenzaA__AAX12761
augaagaccaucaucgcccucuccuacauccucugccucgucuucgcccagaagcuccccggcaacgacaacuccaccgccacccucugccucggccaccacgccguccccaacggcacccucgucaagaccaucaccaacgaccagaucgaggucaccaacgccaccgagcucguccaguccuccuccaccggccgcaucugcgacuccccccaccagauccucgacggcgagaacugcacccucaucgacgcccuccucggcgacccccacugcgacggcuuccagaacaaggagugggaccucuucgucgagcgcuccaaggccuacuccaacugcuaccccuacgacguccccgacuacgucucccuccgcucccucgucgccuccuccggcacccucgaguucaacaacgaguccuucaacuggaccggcgucgcccagaacggcaccuccuccgccugcaagcgccgcuccgacaaguccuucuucucccgccucaacuggcuccaccagcucaaguacaaguaccccgcccucaacgucaccaugcccaacaacgagaaguucgacaagcucuacaucuggggcguccaccaccccggcaccgacuccgaccagaucucccucuacgcccaggccuccggccgcgucaccgucuccaccaagcgcucccagcagaccgucauccccaacaucggcucccgccccuggguccgcggcgucuccucccgcaucuccaucuacuggaccaucgucaagcccggcgacauccuccucaucaacuccaccggcaaccucaucgccccccgcggcuacuucaagauccgcuccggcaaguccuccaucaugcgcuccgacgcccccaucggcaagugcaacuccgagugcaucacccccaacggcuccauccccaacgacaagcccuuccagaacgucaaccgcaucaccuacggccccugcccccgcuacgucaagcagaacacccucaagcucgccaccggcaugcgcaacguccccgagaagcagacccgcggcaucuucggcgccaucgccggcuucaucgagaacggcugggagggcaugauggacggcugguacggcuuccgccaccagaacuccgagggcaccggccaggccgccgaccucaaguccacccaggccgccaucaaccagaucaacggcaagcucaaccgccucaucgagaagaccaacgagaaguuccaccagaucgagaaggaguucuccgaggucgagggccgcauccaggaccucgagaaguacgucgaggacaccaagaucgaccucugguccuacaacgccgagcuccucgucgcccucgagaaccagcacaccaucgaccucaccgacuccgagaugaacaagcucuucgagcgcaccaagaagcagcuccgcgagaacgccgaggacaugggcaacggcugcuucaagaucuaccacaagugcgacaacgucugcaucggcuccauccgcaacggcaccuacgaccacgacgucuaccgcgacgaggcccucaacaaccgcuuccagaucaagggcgucgagcucaaguccggcuacaaggacuggauccucuggaucuccuucgccaucuccugcuuccuccucugcaucguccuccucggcuucaucaugugggccugccagaagggcaacauccgcugcaacaucugcaucuga

SEQ ID NO: 96081 - RNA, 1701 nt, Artificial Sequence
  derived and/or modified CDS sequence (opt2) from hemagglutinin__InfluenzaA__AAX12791
augaagaccaucaucgcccucuccuacauccucugccucgucuucgcccagaagcuccccggcaacgacaacuccauggccacccucugccucggccaccacgccguccccaacggcacccucgucaagaccaucaccaacgaccagaucgaggucaccaacgccaccgagcucguccaguccuccuccaccggccgcaucugcgacuccccccaccagauccucgacggcgagaacugcacccucaucgacgcccuccucggcgacccccacugcgacggcuuccagaacaaggagugggaccucuucgucgagcgcuccaaggccuacuccaacugcuaccccuacgacguccccgacuacgucucccuccgcucccucgucgccuccuccggcacccucgaguucaacaacgaguccuucaacuggaccggcgucgcccagaacggcaccuccuccgccugcaagcgccgcuccgacaaguccuucuucucccgccucaacuggcuccaccagcucaaguacaaguaccccgcccucaacgucaccaugcccaacaacgagaaguucgacaagcucuacaucuggggcguccaccaccccggcaccgacuccgaccagaucucccucuacgcccaggccuccggccgcgucaccgucuccaccaagcgcucccagcagaccgucauccccaacaucggcuccggccccuggguccgcggcgucuccucccgcaucuccaucuacuggaccaucgucaagcccggcgacauccuccucaucaacuccaccggcaaccucaucgccccccgcggcuacuucaagauccgcuccggcaaguccuccaucaugcgcuccgacgcccccaucgacaagugcaacuccgagugcaucacccccaacggcuccauccccaacgacaagcccuuccagaacgucaaccgcaucaccuacggccucugcccccgcuacgucaagcagaacacccucaagcucgccaccggcaugcgcaacguccccgagaagcagacccgcggcaucuucggcgccaucgccggcuucaucgagaacggcugggagggcaugauggacggcugguacggcuuccgccaccagaacuccgagggcaccggccaggccgccgaccucaaguccacccaggccgccaucaaccagaucaacggcaagcucaaccgccucaucgagaagaccaacgagaaguuccaccagaucgagaaggaguucuccgaggucgagggccgcauccaggaccucgagaaguacgucgaggacaccaagaucgaccucugguccuacaacgccgagcuccucgucgcccucgagaaccagcacaccaucgaccucaccgacuccgagaugaacaagcucuucgagcgcaccaagaagcagcuccgcgagaacgccgaggacaugggcaacggcugcuucaagaucuaccacaagugcgacaacgccugcaucggcuccauccgcaacggcaccuacgaccacgacgucuaccgcgacgaggcccucaacaaccgcuuccagaucaagggcgucgagcucaaguccggcuacaaggacuggauccucuggaucuccuucgccaucuccugcuuccuccucugcaucguccuccucggcuucaucaugugggccugccagaagggcaacauccgcugcaacaucugcaucuga

SEQ ID NO: 96082 - RNA, 1701 nt, Artificial Sequence
  derived and/or modified CDS sequence (opt2) from hemagglutinin__InfluenzaA__AAX12801
augaagaccaucaucgcccucuccuacauccucugccucgucuucgcccagaaguuccccggcaacgacaacuccaccgccacccucugccucggccaccacgccguccccaacggcacccucgucaagaccaucaccaacgaccagaucgaggucaccaacgccaccgagcucguccaguccuccuccaccgaccgcaucugcgacuccccccaccagauccucgacggcgagaacugcacccucaucgacgcccuccucggcgacccccacugcgacggcuuccagaacaaggagugggaccucuucgucgagcgcuccaaggccuacuccaacugcuaccccuacgacguccccgacuacgucucccuccgcucccucgucgccuccuccggcacccucgaguucaacaacgaguccuucaacuggaccggcgucgcccagaacggcaccuccuccgccugcaagcgccgcuccgacaaguccuucuucucccgccucaacuggcuccaccagcucaaguacaaguaccccgcccucaacgucaccaugcccaacaacgagaaguucgacaagcucuacaucuggggcguccaccaccccggcaccgacuccgaccagaucucccucuacgcccaggccuccggccgcgucaccgucuccaccaagcgcucccagcagaccgucauccccaacaucggcucccgccccuggguccgcggcgucuccucccgcaucuccaucuacuggaccaucgucaagcccggcgacauccuccucaucaacuccaccggcaaccucaucgccccccgcggcuacuucaagauccgcuccggcaaguccuccaucaugcgcuccgacgcccccaucggcaagugcaacuccgagugcaucacccccaacggcuccauccccaacgacaagcccuuccagaacgucaaccgcaucaccuacggcgccugcccccgcuacgucaagcagaacacccucaagcucgccaccggcaugcgcaacguccccgagaagcagacccgcggcaucuucggcgccaucgccggcuucaucgagaacggcugggagggcaugauggacggcugguacggcuuccgccaccagaacuccgagggcaccggccaggccgccgaccucaaguccacccaggccgccaucaaccagaucaacggcaagcucaaccgccucaucgagaagaccaacgagaaguuccaccagaucgagaaggaguucuccgaggucgagggccgcauccaggaccucgagaaguacgucgaggacaccaagaucgaccucugguccuacaacgccgagcuccucgucgcccucgagaaccagcacaccaucgaccucaccgacuccgagaugaacaagcucuucgagcgcaccaagaagcagcuccgcgagaacgccgaggacaugggcaacggcugcuucaagaucuaccacaagugcgacaacgccugcaucggcuccauccgcaacggcaccuacgaccacgacgucuaccgcgacgaggcccucaacaaccgcuuccagaucaagggcgucgagcucaaguccggcuacaaggacuggauccucuggaucuccuucgccaucuccugcuuccuccucugcaucguccuccucggcuucaucaugugggccugccagaagggcaacauccgcugcaacaucugcaucuga

SEQ ID NO: 96083 - RNA, 1701 nt, Artificial Sequence
  derived and/or modified CDS sequence (opt2) from hemagglutinin__InfluenzaA__AAX12811
augaagaccaucaucgcccucuccuacauccucugccucgucuucgcccagaagcuccccggcaacgacaacuccaccgccacccucugccucggccaccacgccguccccaacggcacccucgucaagaccaucaccaacgaccagaucgaggucaccaacgccaccgagcucguccaguccuccuccaccucccgcaucugcgacuccccccaccagauccucgacggcgagaacugcacccucaucgacgcccuccucggcgacccccacugcgacggcuuccagaacaaggagugggaccucuucgucgagcgcuccaaggccuacuccaacugcuaccccuacgacguccccgacuacgucucccuccgcucccucgucgccuccuccggcacccucgaguucaacaacgaguccuucaacuggaccggcgucgcccagaacggcaccuccuccgccugcaagcgccgcuccgacaaguccuucuucucccgccucaacuggcuccaccagcucaaguacaaguaccccgcccucaacgucaccaugcccaacaacgagaaguucgacaagcucuacaucuggggcguccaccaccccggcaccgacuccgaccagaucucccucuacgcccaggccuccggccgcgucaccgucuccaccaagcgcucccagcagaccgucauccccaacaucggcucccgccccuggguccgcggcgucuccucccgcaucuccaucuacuggaccaucgucaagcccggcgacauccuccucaucaacuccaccggcaaccucaucgccccccgcggcuacuucaagauccgcuccggcaaguccuccaucaugcgcuccgacgcccccaucggcaagugcaacuccgagugcaucacccccaacggcuccauccccaacgacaagcccuuccagaacgucaaccgcaucaccuacggcgccugcccccgcuacgucaagcagaacacccucaagcucgccaccggcaugcgcaacguccccgagaagcagacccgcggcaucuucggcgccaucgccggcuucaucgagaacggcugggagggcaugauggacggcugguacggcuuccgccaccagaacuccgagggcaccggccaggccgccgaccucaaguccacccaggccgccaucaaccagaucaacggcaagcucaaccgccucaucgagaagaccaacgagaaguuccaccagaucgagaaggaguucuccgaggucgagggccgcauccaggaccucgagaaguacgucgaggacaccaagaucgaccucugguccuacaacgccgagcuccucgucgcccucgagaaccagcacaccaucgaccucaccgacuccgagaugaacaagcucuucgagcgcaccaagaagcagcuccgcgagaacgccgaggacaugggcaacggcugcuucaagaucuaccacaagugcgacaacgccugcaucggcuccauccgcaacggcaccuacgaccacgacgucuaccgcgacgaggcccucaacaaccgcuuccagaucaagggcgucgagcucaaguccggcuacaaggacuggauccucuggaucuccuucgccaucuccugcuuccuccucugcaucguccuccucggcuucaucaugugggccugccagaagggcaacauccgcugcaacaucugcaucuga

SEQ ID NO: 96084 - RNA, 1701 nt, Artificial Sequence
  derived and/or modified CDS sequence (opt2) from hemagglutinin__InfluenzaA__AAX34061
augaagaccaucaucgcccucuccuacauccucugccucgucuucgcccagaagcuccccggcaacgacaacuccaccgccacccucugccucggccaccacgccguccccaacggcaccaucgucaagaccaucaccaacgaccagaucgaggucaccaacgccaccgagcucguccaguccuccuccaccggcgagaucugcgacuccccccaccagauccucgacggcgagaacugcacccucaucgacgcccuccucggcgacccccagugcgacggcuuccagaacaagaagugggaccucuucgucgagcgcuccaaggccuacuccaacugcuaccccuacgacguccccgacuacgccucccuccgcucccucgucgccuccuccggcacccucgaguucaacaacgaguccuucgacuggaccggcgucacccagaacggcaccuccuccgccugcaagcgccgcuccaacaaguccuucuucucccgccucaacuggcucacccaccucaaguacaaguaccccgcccucaacgucaccaugcccaacaacgagaaguucgacaagcucuacaucuggggcguccaccaccccggcaccgacuccgaccagaucucccucuacgcccaggccuccggccgcaucaccgucuccaccaagcgcucccagcagaccgucauccccaacaucggcucccgcccccgcguccgcgacgucuccucccgcaucuccaucuacuggaccaucgucaagcccggcgacauccuccucaucaacuccaccggcaaccucaucgccccccgcggcuacuucaagauccgcuccggcaaguccuccaucaugcgcuccgacgcccccaucggcaagugcaacuccgagugcaucacccccaacggcuccauccccaacgacaagcccuuccagaacgucaaccgcaucaccuacggcgccugcccccgcuacaucaagcagaacacccucaagcucgccaccggcaugcgcaacguccccgagaagcagacccgcggcaucuucggcgccaucgccggcuucaucgagaacggcugggagggcauggucgacggcugguacggcuuccgccaccagaacuccgagggcaccggccaggccgccgaccucaaguccacccaggccgccaucaaccagaucaacggcaagcucaaccgccucaucggcaagaccaacgagaaguuccaccagaucgagaaggaguucuccgaggucgagggccgcauccaggaccucgagaaguacgucgaggacaccaagaucgaccucugguccuacaacgccgagcuccucgucgcccucgagaaccagcacaccaucgaccucaccgacuccgagaugaacaagcucuucgagcgcaccaagaagcagcuccgcgagaacgccgaggacaugggcaacggcugcuucaagaucuaccacaagugcgacaacgccugcaucggcuccauccgcaacggcaccuacgaccacgacgucuaccgcgacgaggcccucaacaaccgcuuccagaucaagggcgucgagcucaaguccggcuacaaggacuggauccucuggaucuccuucgccaucuccugcuuccuccucugcgucgcccuccucggcuucaucaugugggccugccagaagggcaacauccgcugcaacaucugcaucuga

SEQ ID NO: 96085 - RNA, 1701 nt, Artificial Sequence
  derived and/or modified CDS sequence (opt2) from hemagglutinin__InfluenzaA__AAX35821
augaagaccaucaucgcccucuccuacauccucugccucgucuucgcccagaagcuccccggcaacgacaacuccaccgccacccucugccucggccaccacgccguccccaacggcaccaucgucaagaccaucaccaacgaccagaucgaggucaccaacgccaccgagcucguccaguccuccuccaccggcggcaucugcgacuccccccaccagauccucgacggcgagaacugcacccucaucgacgcccuccucggcgacccccagugcgacggcuuccagaacaagaagugggaccucuucgucgagcgcuccaaggccuacuccaacugcuaccccuacgacguccccgacuacgccucccuccgcucccucgucgccuccuccggcacccucgaguucaacaacgaguccuucaacuggaccggcgucacccagaacggcaccuccuccgccugcaagcgcaaguccaacaaguccuucuucucccgccucaacuggcucacccaccucaaguacaaguaccccgcccucaacgucaccaugcccaacaacgagaaguucgacaagcucuacaucuggggcguccaccaccccggcaccgacaacgaccagaucucccucuacgcccaggccuccggccgcaucaccgucuccaccaagcgcucccagcagaccgucauccccaacaucggcucccgcccccgcguccgcgacgucuccucccgcaucuccaucuacuggaccaucgucaagcccggcgacauccuccucaucaacuccaccggcaaccucaucgccccccgcggcuacuucaagauccgcuccggcaaguccuccaucaugcgcuccgacgcccccaucggcaagugcaacuccgagugcaucacccccaacggcuccauccccaacgacaagcccuuccagaacgucaaccgcaucaccuacggcgccugcccccgcuacgucaagcagaacacccucaagcucgccaccggcaugcgcaacguccccgagcgccagacccgcggcaucuucggcgccaucgccggcuucaucgagaacggcugggagggcauggucgacggcugguacggcuuccgccaccagaacuccgagggcaccggccaggccgccgaccucaaguccacccaggccgccaucaaccagaucaacggcaagcucaaccgccucaucggcaagaccaacgagaaguuccaccagaucgagaaggaguucuccgaggucgagggccgcauccaggaccucgagaaguacgucgaggacaccaagaucgaccucugguccuacaacgccgagcuccucgucgcccucgagaaccagcacaccaucgaccucaccgacuccgagaugaacaagcucuucgagcgcaccaagaagcagcuccgcgagaacgccgaggacaugggcaacggcugcuucaagaucuaccacaagugcgacaacgccugcaucggcuccauccgcaacggcaccuacgaccacgacgucuaccgcgacgaggcccucaacaaccgcuuccagaucaagggcgucgagcucaaguccggcuacaaggacuggauccucuggaucuccuucgccaucuccugcuuccuccucugcgucgcccuccucggcuucaucaugugggccugccagaagggcaacauccgcugcaacaucugcaucuga

SEQ ID NO: 96086 - RNA, 1701 nt, Artificial Sequence; identical to SEQ ID NO: 96067
  derived and/or modified CDS sequence (opt2) from hemagglutinin__InfluenzaA__AAX35831

SEQ ID NO: 96087 - RNA, 1701 nt, Artificial Sequence
  derived and/or modified CDS sequence (opt2) from hemagglutinin__InfluenzaA__AAX35851
augaagaccaucaucgcccucuccuacauccucugccucgucuucgcccagaagcuccccggcaacgacaacuccaccgccacccucugccucggccaccacgccguccccaacggcacccucgucaagaccaucaccaacgaccagaucgaggucaccaacgccaccgagcucguccaguccuccuccaccggccgcaucugcgacuccccccaccagauccucgacggcgagaacugcacccucaucgacgcccuccucggcgacccccacugcgacggcuuccagaacaaggagugggaccucuucgucgagcgcuccaaggccuacuccaacugcuaccccuacgacguccccgacuacgucucccuccgcucccucgucgccuccuccggcacccucgaguucaacaacgaguccuucaacuggaccggcgucgcccagaacggcaccuccuccgccugcaagcgccgcuccgacaaguccuucuucucccgccucaacuggcuccaccagcucaaguacaaguaccccgcccucaacgucaccaugcccaacaacgagaaguucgacaagcucuacaucuggggcguccaccaccccggcaccgacuccgaccagaucucccucuacgcccaggccuccggccgcgucaccgucuccaccaagcgcucccagcagaccgucauccccaacaucggcucccgccccuggguccgcggcgucuccucccgcaucuccaucuacuggaccaucgucaagcccggcgacauccuccucaucaacuccaccggcaaccucaucgccccccgcggcuacuucaagauccgcuccggcaaguccuccaucaugcgcuccgacgcccccaucggcaagugcaacuccgagugcaucacccccaacggcuccauccccaacgacaagcccuuccagaacgucaaccgcaucaccuacggccccugcccccgcuacgucaagcagaacacccucaagcucgccaccggcaugcgcaacguccccgagaagcagacccgcggcaucuucggcgccaucgccggcuucaucgagaacggcugggagggcaugauggacggcugguacggcuuccgccaccagaacuccgagggcaccggccaggccgccgaccucaaguccacccaggccgccaucaaccagaucaacggcaagcucaaccgccucaucgagaagaccaacgagaaguuccaccagaucgagaaggaguucuccgaggucgagggccgcauccaggaccucgagaaguacgucgaggacaccaagaucgaccucugguccuacaacgccgagcuccucgucgcccucgagaaccagcacaccaucgaccucaccgacuccgagaugaacaagcucuucgagcgcaccaagaagcagcuccgcgagaacgccgaggacaugggcaacggcugcuucaagaucuaccacaagugcgacaacgccugcaucggcuccauccgcaacggcaccuacgaccacgacgucuaccgcgacgaggcccucaacaaccgcuuccagaucaagggcgucgagcucaaguccggcuacaaggacuggauccucuggaucuccuucgccaucuccugcuuccuccucugcaucguccuccucggcuucaucaugugggccugccagaagggcaacauccgcugcaacaucugcaucuga

SEQ ID NO: 96088 - RNA, 1701 nt, Artificial Sequence
  derived and/or modified CDS sequence (opt2) from hemagglutinin__InfluenzaA__AAX35861
augaagaccaucaucgcccucuccuacauccucugccucgucuucgcccagaagcuccccggcaacgacaacuccaccgccacccucugccucggccaccacgccguccccaacggcacccucgucaagaccaucaccaacgaccagaucgaggucaccaacgccaccgagcucguccaguccuccuccaccucccgcaucugcgacuccccccaccagauccucgacggcgagaacugcacccucaucgacgcccuccucggcgacccccacugcgacggcuuccagaacaaggagugggaccucuucgucgagcgcuccaaggccuacuccaacugcuaccccuacgacguccccgacuacgucucccuccgcucccucgucgccuccuccggcacccucgaguucaacaacgaguccuucaacuggaccggcgucgcccagaacggcaccuccuccgccugcaagcgccgcuccgacaaguccuucuucucccgccucaacuggcuccaccagcucaaguacaaguaccccgcccucaacgucaccaugcccaacaacgagaaguucgacaagcucuacaucuggggcguccaccaccccggcaccgacuccgaccagaucucccucuacgcccaggccuccggccgcaucaccgucuccaccaagcgcucccagcagaccgucauccccaacaucggcuccggccccuggguccgcggcgucuccucccgcaucuccaucuacuggaccaucgucaagcccggcgacauccuccucaucaacuccaccggcaaccucaucgccccccgcggcuacuucaagauccgcuccggcaaguccuccaucaugcgcuccgacgcccccaucggcaagugcaacuccgagugcaucacccccaacggcuccauccccaacgacaagcccuuccagaacgucaaccgcaucaccuacggcgccugcccccgcuacgucaagcagaacacccucaagcucgccaccggcaugcgcaacguccccgagaagcagacccgcggcaucuucggcgccaucgccggcuucaucgagaacggcugggagggcaugauggacggcugguacggcuuccgccaccagaacuccgagggcaccggccaggccgccgaccucaaguccacccaggccgccaucaaccagaucaacggcaagcucaaccgccucaucgagaagaccaacgagaaguuccaccagaucgagaaggaguucuccgaggucgagggccgcauccaggaccucgagaaguacgucgaggacaccaagaucgaccucugguccuacaacgccgagcuccucgucgcccucgagaaccagcacaccaucgaccucaccgacuccgagaugaacaagcucuucgagcgcaccaagaagcagcuccgcgagaacgccgaggacaugggcaacggcugcuucaagaucuaccacaagugcgacaacgccugcaucggcuccauccgcaacggcaccuacgaccacgacgucuaccgcgacgaggcccucaacaaccgcuuccagaucaagggcgucgagcucaaguccggcuacaaggacuggauccucuggaucuccuucgccaucuccugcuuccuccucugcaucguccuccucggcuucaucaugugggccugccagaagggcaacauccgcugcaacaucugcaucuga

SEQ ID NO: 96089 - RNA, 1701 nt, Artificial Sequence
  derived and/or modified CDS sequence (opt2) from hemagglutinin__InfluenzaA__AAX35871
augaagaccaucaucgcccucuccuacauccucugccucgucuucgcccagaagcuccccggcaacgacaacuccaccgccacccucugccucggccaccacgccguccccaacggcacccucgucaagaccaucaccaacgaccagaucgaggucaccaacgccaccgagcucguccaguccuccuccgccucccgcaucugcgacuccccccaccagauccucgacggcgagaacugcacccucaucgacgcccuccucggcgacccccacugcgacggcuuccagaacaaggagugggaccucuucgucgagcgcuccaaggccuacuccaacugcuaccccuacgacguccccgacuacgucucccuccgcucccucgucgccuccuccggcacccucgaguucaacaacgaguccuucaacuggaccggcgucgcccagaacggcaccuccuucgccugcaagcgccgcuccgacaaguccuucuucucccgccucaacuggcuccaccagcucaaguacaaguaccccgcccucaacgucaccaugcccaacaacgagaaguucgacaagcucuacaucuggggcguccaccaccccggcaccgacuccgaccagaucucccucuacgcccaggccuccggccgcgucaccgucuccaccaagcgcucccagcagaccgucauccccaacaucggcuccggccccuggguccgcggcgucuccucccgcaucuccaucuacuggaccaucgucaagcccggcgacauccuccucaucaacuccaccggcaaccucaucgccccccgcggcuacuucaagauccgcuccggcaaguccuccaucaugcgcuccgacgcccccaucggcaagugcaacuccgagugcaucacccccaacggcuccauccccaacgacaagcccuuccagaacgucaaccgcaucaccuacggcgccugcccccgcuacgucaagcagaacacccucaagcucgccaccggcaugcgcaacguccccgagaagcagacccgcggcaucuucggcgccaucgccggcuucaucgagaacggcugggagggcaugauggacggcugguacggcuuccgccaccagaacuccgagggcaccggccaggccgccgaccucaaguccacccaggccgccaucaaccagaucaacggcaagcucaaccgccucaucgagaagaccaacgagaaguuccaccagaucgagaaggaguucuccgaggucgagggccgcauccaggaccucgagaaguacgucgaggacaccaagaucgaccucugguccuacaacgccgagcuccucgucgcccucgagaaccagcacaccaucgaccucaccgacuccgagaugaacaagcucuucgagcgcaccaagaagcagcuccgcgagaacgccgaggacaugggcaacggcugcuucaagaucuaccacaagugcgacaacgccugcaucggcuccauccgcaacggcaccuacgaccacgacgucuaccgcgacgaggcccucaacaaccgcuuccagaucaagggcgucgagcucaaguccggcuacaaggacuggauccucuggaucuccuucgccaucuccugcuuccuccucugcaucguccuccucggcuucaucaugugggccugccagaagggcaacauccgcugcaacaucugcaucuga

SEQ ID NO: 96090 - RNA, 1701 nt, Artificial Sequence; identical to SEQ ID NO: 96083
  derived and/or modified CDS sequence (opt2) from hemagglutinin__InfluenzaA__AAX38237

SEQ ID NO: 96091 - RNA, 1701 nt, Artificial Sequence
  derived and/or modified CDS sequence (opt2) from hemagglutinin__InfluenzaA__AAX47515
augaaggccaucaucgcccucuccuacauccucugccucgucuucgcccagaagcuccccggcaacgacaacuccaccgccacccucugccucggccaccacgccguccccaacggcacccucgucaagaccaucaccaacgaccagaucgaggucaccaacgccaccgagcucguccaguccuccuccaccggccgcaucugcgacuccccccaccagauccucgacggcgagaacugcacccucaucgacgcccuccucggcgacccccacugcgacggcuuccagaacaaggagugggaccucuucgucgagcgcuccaaggccuacuccaacugcuaccccuacgacguccccgacuacgucucccuccgcucccucgucgccuccuccggcacccucgaguucaacaacgaguccuucaacuggaccggcgucgcccagaacggcaccuccuccgccugcaagcgccgcuccgacaaguccuucuucucccgccucaacuggcuccaccagcucaaguacaaguaccccgcccucaacgucaccaugcccaacaacgagaaguucgacaagcucuacaucuggggcguccaccaccccggcaccgacuccgaccagaucucccucuacgcccaggccuccggccgcgucaccgucuccaccaagcgcucccagcagaccgucauccccaacaucggcucccgccccuggguccgcggcgucuccucccgcaucuccaucuacuggaccaucgucaagcccggcgacauccuccucaucaacuccaccggcaaccucaucgccccccgcggcuacuucaagauccgcuccggcaaguccuccaucaugcgcuccgacgcccccaucggcaagugcaacuccgagugcaucacccccaacggcuccauccccaacgacaagcccuuccagaacgucaaccgcaucaccuacggcgccugcccccgcuacgucaagcagaacacccucaagcucgccaccggcaugcgcaacguccccgagaagcagacccgcggcaucuucggcgccaucgccggcuucaucgagaacggcugggagggcaugauggacggcugguacggcuuccgccaccagaacuccgagggcaccggccaggccgccgaccucaaguccacccaggccgccaucaaccagaucaacggcaagcucaaccgccucaucgagaagaccaacgagaaguuccaccagaucgagaaggaguucuccgaggucgagggccgcauccaggaccucgagaaguacgucgaggacaccaagaucgaccucugguccuacaacgccgagcuccucgucgcccucgagaaccagcacaccaucgaccucaccgacuccgagaugaacaagcucuucgagcgcaccaagaagcagcuccgcgagaacgccgaggacaugggcaacggcugcuucaagaucuaccacaagugcgacaacgccugcaucggcuccauccgcaacggcaccuacgaccacgacgucuaccgcgacgaggcccucaacaaccgcuuccagaucaagggcgucgagcucaaguccggcuacaaggacuggauccucuggaucuccuucgccaucuccugcuuccuccucugcaucguccuccucggcuucaucaugugggccugccagaagggcaacauccgcugcaacaucugcaucuga

SEQ ID NO: 96092 - RNA, 1701 nt, Artificial Sequence
  derived and/or modified CDS sequence (opt2) from hemagglutinin__InfluenzaA__AAX47525
augaagaccaucaucgcccucuccuacauccucugccucgucuucgcccagaagcuccccggcaacgacaacuccaccgccacccucugcaugggccaccacgccguccccaacggcacccucgucaagaccaucaccaacgaccagaucgaggucaccaacgccaccgagcucguccaguccuccuccaccggccgcaucugcgacuccccccaccagauccucgacggcgagaacugcacccucaucgacgcccuccucggcgacccccacugcgacggcuuccagaacaaggagugggaccucuucgucgagcgcuccaaggccuacuccaacugcuaccccuacgacguccccgacuacgucucccuccgcucccucgucgccuccuccggcacccucgaguucaacaacgaguccuucaacuggaccggcgucgcccagaacggcaccuccuccgccugcaagcgccgcuccaacaaguccuucuucucccgccucaacuggcuccaccagcucaaguacaaguaccccgcccucaacgucaccaugcccaacaacgagaaguucgacaagcucuacaucuggggcguccaccaccccgacaccgacuccaaccagaucucccucuacgcccaggccuccggccgcgucaccgucuccaccaagcgcucccagcagaccgucauccccaacaucggcuccggccccuggguccgcggcgucuccucccgcaucuccaucuacuggaccaucgucaagcccggcgacauccuccucaucaacuccaccggcaaccucaucgccccccgcggcuacuucaagauccgcuccggcaaguccuccaucaugcgcuccgacgcccccaucggcaagugcaacuccgagugcaucacccccaacggcuccauccccaacgacaagcccuuccagaacgucaaccgcaucaccuacggcgccugcccccgcuacgucaagcagaacacccucaagcucgccaccggcaugcgcaacguccccgagaagcagacccgcggcaucuucggcgccaucgccggcuucaucgagaacggcugggagggcaugauggacggcugguacggcuuccgccaccagaacuccgagggcaccggccaggccgccgaccucaaguccacccaggccgccaucaaccagaucaacggcaagcucaaccgccucaucgagaagaccaacgagaaguuccaccagaucgagaaggaguucuccgaggucgagggccgcauccaggaccucgagaaguacgucgaggacaccaagaucgaccucugguccuacaacgccgagcuccucgucgcccucgagaaccagcacaccaucgaccucaccgacuccgagaugaacaagcucuucgagcgcaccaagaagcagcuccgcgagaacgccgaggacaugggcaacggcugcuucaagaucuaccacaagugcgacaacgccugcaucggcuccauccgcaacggcaccuacgaccacgacgucuaccgcgacgaggcccucaacaaccgcuuccagaucaagggcgucgagcucaaguccggcuacaaggacuggauccucuggaucuccuucgccaucuccugcuuccuccucugcaucguccuccucggcuucaucaugugggccugccagaagggcaacauccgcugcaacaucugcaucuga

SEQ ID NO: 96093 - RNA, 1701 nt, Artificial Sequence; identical to SEQ ID NO: 96083
  derived and/or modified CDS sequence (opt2) from hemagglutinin__InfluenzaA__AAX47535

SEQ ID NO: 96094 - RNA, 1701 nt, Artificial Sequence; identical to SEQ ID NO: 96067
  derived and/or modified CDS sequence (opt2) from hemagglutinin__InfluenzaA__AAX56380

SEQ ID NO: 96095 - RNA, 1701 nt, Artificial Sequence; identical to SEQ ID NO: 96067
  derived and/or modified CDS sequence (opt2) from hemagglutinin__InfluenzaA__AAX56390

SEQ ID NO: 96096 - RNA, 1701 nt, Artificial Sequence
  derived and/or modified CDS sequence (opt2) from hemagglutinin__InfluenzaA__AAX56400
augaagaccaucaucgcccucuccuacauccucugccucgucuucgcccagaagcuccccggcaacgacaacuccaccgccacccucugccucggccaccacgccguccccaacggcaccaucgucaagaccaucaccaacgaccagaucgaggucaccaacgccaccgagcucguccaguccuccuccaccggcggcaucugcgacuccccccaccagauccucgacggcgagaacugcacccucaucgacgcccuccucggcgacccccagugcgacggcuuccagaacaagaagugggaccucuucgucgagcgcuccaaggccuacuccaacugcuaccccuacgacguccccgacuacgccucccuccgcucccucgucgccuccuccggcacccucgaguucaacaacgaguccuucaacuggaccggcgucacccagaacggcaccuccuccgccugcgagcgccgcuccaacaaguccuucuucucccgccucaacuggcucacccaccucaaguacaaguaccccgcccucaacgucaccaugcccaacaacgagaaguucgacaagcucuacaucuggggcguccaccaccccggcaccgacuccgaccagaucucccucuacgcccaggccuccggccgcaucaccgucuccaccaagcgcucccagcagaccgucauccccaacaucggcucccgcccccgcguccgcgacaucuccucccgcaucuccaucuacuggaccaucgucaagcccggcgacauccuccucaucaacuccaccggcaaccucaucgccccccgcggcuacuucaagauccgcuccggcaaguccuccaucaugcgcuccgacgcccccaucggcaagugcaacuccgagugcaucacccccaacggcuccauccccaacgacaagcccuuccagaacgucaaccgcaucaccuacggcgccugcccccgcuacgucaagcagaacacccucaagcucgccaccggcaugcgcaacguccccgagaagcagacccgcggcaucuucggcgccaucgccggcuucaucgagaacggcugggagggcauggucgacggcugguacggcuuccgccaccagaacuccgagggcaccggccaggccgccgaccucaaguccacccaggccgccaucaaccagaucaacggcaagcucaaccgccucaucggcaagaccaacgagaaguuccaccagaucgagaaggaguucuccgaggucgagggccgcauccaggaccucgagaaguacgucgaggacaccaagaucgaccucugguccuacaacgccgagcuccucgucgcccucgagaaccagcacaccaucgaccucaccgacuccgagaugaacaagcucuucgagcgcaccaagaagcagcuccgcgagaacgccgaggacaugggcaacggcugcuucaagaucuaccacaagugcgacaacgccugcaucggcuccauccgcaacggcaccuacgaccacgacgucuaccgcgacgaggcccucaacaaccgcuuccagaucaagggcgucgagcucaaguccggcuacaaggacuggauccucuggaucuccuucgccaucuccugcuuccuccucugcgucgcccuccucggcuucaucaugugggccugccagaagggcaacauccgcugcgacaucugcaucuga

SEQ ID NO: 96097 - RNA, 1701 nt, Artificial Sequence; identical to SEQ ID NO: 96067
  derived and/or modified CDS sequence (opt2) from hemagglutinin__InfluenzaA__AAX56410

SEQ ID NO: 96098 - RNA, 1701 nt, Artificial Sequence
  derived and/or modified CDS sequence (opt2) from hemagglutinin__InfluenzaA__AAX56420
augaagaccaucaucgcccucuccuacuuccucugccucgucuucgcccagaagcuccccggcaacgacaacuccaccgccacccucugccucggccaccacgccguccccaacggcaccaucgucaagaccaucaccaacgaccagaucgaggucaccaacgccaccgagcucguccaguccuccuccaccggcggcaucugcgacuccccccaccagauccucgacggcgagaacugcacccucaucgacgcccuccucggcgacccccagugcgacggcuuccagaacaagaagugggaccucuucgucgagcgcuccaaggccuacuccaacugcuaccccuacgacguccccgacuacgccucccuccgcucccucgucgccuccuccggcacccucgaguucaacaacgaguccuucgacuggaccggcgucacccagaacggcaccuccuccgccugcaagcgccgcuccaacaaguccuucuucucccgccucaacuggcucacccaccucaaguacaaguaccccgcccucaacgucaccaugcccaacaacgagaaguucgacaagcucuacaucuggggcguccaccaccccggcaccgacuccgaccagaucucccucuacgcccaggccuccggccgcaucaccgucuccaccaagcgcucccagcagaccgucauccccaacaucggcucccgcccccgcguccgcgacgucuccucccgcaucuccaucuacuggaccaucgucaagcccggcgacauccuccucaucaacuccaccggcaaccucaucgccccccgcggcuacuucaagauccgcuccggcaaguccuccaucaugcgcuccgacgcccccaucggcaagugcaacuccgagugcaucacccccaacggcuccauccccaacgacaagcccuuccagaacgucaaccgcaucaccuacggcgccugcccccgcuacgucaagcagaacacccucaagcucgccaccggcaugcgcaacguccccgagaagcagacccgcggcaucuucggcgccaucgccggcuucaucgagaacggcugggagggcauggucgacggcugguacggcuuccgccaccagaacuccgagggcaccggccaggccgccgaccucaaguccacccaggccgccaucaaccagaucaacggcaagcucaaccgccucaucggcaagaccaacgagaaguuccaccagaucgagaaggaguucuccgaggucgagggccgcauccaggaccucgagaaguacgucgaggacaccaagaucgaccucugguccuacaacgccgagcuccucgucgcccucgagaaccagcacaccaucgaccucaccgacuccgagaugaacaagcucuucgagcgcaccaagaagcagcuccgcgagaacgccgaggacaugggcaacggcugcuucaagaucuaccacaagugcgacaacgccugcaucggcuccauccgcaacggcaccuacgaccacgacgucuaccgcgacgaggcccucaacaaccgcuuccagaucaagggcgucgagcucaaguccggcuacaaggacuggauccucuggaucuccuucgccaucuccugcuuccuccucugcgucgcccuccucggcuucaucaugugggccugccagaagggcaacauccgcugcaacaucugcaucuga

SEQ ID NO: 96099 - RNA, 1701 nt, Artificial Sequence
  derived and/or modified CDS sequence (opt2) from hemagglutinin__InfluenzaA__AAX56430
augaagaccaucaucgcccucuccuacauccucugccucgucuucacccagaagcuccccggcaacgacaacuccaccgccacccucugccucggccaccacgccguccccaacggcaccaucgucaagaccaucaccaacgaccagaucgaggucaccaacgccaccgagcucguccaguccuccuccaccggcggcaucugcgacuccccccaccagauccucgacggcgagaacugcacccucaucgacgcccuccucggcgacccccagugcgacggcuuccagaacaagaagugggaccucuucgucgagcgcuccaaggccuacuccaacugcuaccccuacgacguccccgacuacgccucccuccgcucccucgucgccuccuccggcacccucgaguucaacaacgaguccuucaacuggaccggcgucacccagaacggcaccuccuccgccugcgagcgccgcuccaacaaguccuucuucucccgccucaacuggcucacccaccucaaguacaaguaccccgcccucaacgucaccaugcccaacaacgagaaguucgacaagcucuacaucuggggcguccaccaccccggcaccgacuccgaccagaucucccucuacgcccaggccuccggccgcaucaccgucuccaccaagcgcucccagcagaccgucauccccaacaucggcucccgcccccgcguccgcgacgucuccucccgcaucuccaucuacuggaccaucgucaagcccggcgacauccuccucaucaacuccaccggcaaccucaucgccccccgcggcuacuucaagauccgcuccggcaaguccuccaucaugcgcuccgacgcccccaucggcaagugcaacuccgagugcaucacccccaacggcuccauccccaacgacaagcccuuccagaacgucaaccgcaucaccuacggcgccugcccccgcuacgucaagcagaacacccucaagcucgccaccggcaugcgcaacguccccgagaagcagacccgcggcaucuucggcgccaucgccggcuucaucgagaacggcugggagggcauggucgacggcugguacggcuuccgccaccagaacuccgagggcaccggccaggccgccgaccucaaguccacccaggccgccaucaaccagaucaacggcaagcucaaccgccucaucggcaagaccaacgagaaguuccaccagaucgagaaggaguucuccgaggucgagggccgcauccaggaccucgagaaguacgucgaggacaccaagaucgaccucugguccuacaacgccgagcuccucgucgcccucgagaaccagcacaccaucgaccucaccgacuccgagaugaacaagcucuucgagcgcaccaagaagcagcuccgcgagaacgccgaggacaugggcaacggcugcuucaagaucuaccacaagugcgacaacgccugcaucggcuccauccgcaacggcaccuacgaccacgacgucuaccgcgacgaggcccucaacaaccgcuuccagaucaagggcgucgagcucaaguccggcuacaaggacuggauccucuggaucuccuucgccaucuccugcuuccuccucugcgucgcccuccucggcuucaucaugugggccugccagaagggcaacauccgcugcgacaucugcaucuga

SEQ ID NO: 96100 - RNA, 1701 nt, Artificial Sequence
  derived and/or modified CDS sequence (opt2) from hemagglutinin__InfluenzaA__AAX56440
augaagaccaucaucgcccucuccuacauccucugccucgucuucgcccagaagcuccccggcaacgacaacuccaccgccacccucugccucggccaccacgccguccccaacggcacccucgucaagaccaucaccaacgaccagaucgaggucaccaacgccaccgagcucguccagaacuccuccaccggccgcaucugcgacuccccccaccagauccucgacggcgagaacugcacccucaucgacgcccuccucggcgacccccacugcgacggcuuccagaacaaggagugggaccucuucgucgagcgcuccaaggccuacuccaacugcuaccccuacgacguccccgacuacgucucccuccgcucccucgucgccuccuccggcacccucgaguucaacaacgaguccuucaacuggaccggcgucgcccagaacggcaccuccuccgccugcaagcgccgcuccgacaaguccuucuucucccgccucaacuggcuccaccagcucaaguacaaguaccccgcccucaacgucaccaugcccaacaacgagaaguucgacaagcucuacaucuggggcguccaccaccccggcaccgacaacgaccagaucucccucuacgcccaggccuccggccgcgucaccgucuccaccaagcgcucccagcagaccgucauccccaacaucggcuccggccccuggguccgcggcgucuccucccgcaucuccaucuacuggaccaucgucaagcccggcgacauccuccucaucaacuccaccggcaaccucaucgccccccgcggcuacuucaagauccgcuccggcaaguccuccaucaugcgcuccgacgcccccaucggcaagugcaacuccgagugcaucacccccaacggcuccauccccaacgacaagcccuuccagaacgucaaccgcaucaccuacggccccugcccccgcuacgucaagcagaacacccucaagcucgccaccggcaugcgcaacguccccgagaagcagacccgcggcaucuucggcgccaucgccggcuucaucgagaacggcugggagggcaugauggacggcugguacggcuuccgccaccagaacuccgagggcaccggccaggccgccgaccucaaguccacccaggccgccaucaaccagaucaacggcaagcucaaccgccucaucgagaagaccaacgagaaguuccaccagaucgagaaggaguucuccgaggucgagggccgcauccaggaccucgagaaguacgucgaggacaccaagaucgaccucugguccuacaacgccgagcuccucgucgcccucgagaaccagcacaccaucgaccucaccgacuccgagaugaacaagcucuucgagcgcaccaagaagcagcuccgcgagaacgccgaggacaugggcaacggcugcuucaagaucuaccacaagugcgacaacgccugcaucggcuccauccgcaacggcaccuacgaccacgacgucuaccgcgacgaggcccucaacaaccgcuuccagaucaagggcgucgagcucaaguccggcuacaaggacuggauccucuggaucuccuucgccaucuccugcuuccuccucugcaucguccuccucggcuucaucaugugggccugccagaagggcaacauccgcugcaacaucugcaucuga

SEQ ID NO: 96101 - RNA, 1701 nt, Artificial Sequence; identical to SEQ ID NO: 96083
  derived and/or modified CDS sequence (opt2) from hemagglutinin__InfluenzaA__AAX56450

SEQ ID NO: 96102 - RNA, 1701 nt, Artificial Sequence
  derived and/or modified CDS sequence (opt2) from hemagglutinin__InfluenzaA__AAX56460
augaagaccaucaucgcccucuccuacauccucugccucgucuucgcccagaagcuccccgagaacgacaacuccaccgccacccucugccucggccaccacgccguccccaacggcacccucgucaagaccaucaccaacgaccagaucgaggucaccaacgccaccgagcucguccaguccuccuccaccggccgcaucugcgacuccccccaccagauccucgacggcgagaacugcacccucaucgacgcccuccucggcgacccccacugcgacggcuuccagaacaaggagugggaccucuucgucgagcgcuccaaggccuacuccaacugcuaccccuacgacguccccgacuacgucucccuccgcucccucgucgccuccuccggcacccucgaguucaacaacgaguccuucaacuggaccggcgucgcccagaacggcaccuccuccgccugcaagcgccgcuccgacaaguccuucuucucccgccucaacuggcuccaccagcucaaguacaaguaccccgcccucaacgucaccaugcccaacaacgagaaguucgacaagcucuacaucuggggcguccaccaccccggcaccgacuccgaccagaucucccucuacgcccaggccuccggccgcgucaccgucuccaccaagcgcucccagcagaccgucauccccaacaucggcucccgccccuggguccgcggcgucuccucccgcaucuccaucuacuggaccaucgucaagcccggcgacauccuccucaucaacuccaccggcaaccucaucgccccccgcggcuacuucaagauccgcuccggcaaguccuccaucaugcgcuccgacgcccccaucggcaagugcaacuccgagugcaucacccccaacggcuccauccccaacgacaagcccuuccagaacgucaaccgcaucacccacggccccugcccccgcuacgucaagcagaacacccucaagcucgccaccggcaugcgcaacguccccgagaagcagacccgcggcaucuucggcgccaucgccggcuucaucgagaacggcugggagggcaugauggacggcugguacggcuuccgccaccagaacuccgagggcaccggccaggccgccgaccucaaguccacccaggccgccaucaaccagaucaacggcaagcucaaccgccucaucgagaagaccaacgagaaguuccaccagaucgagaaggaguucuccgaggucgagggccgcauccaggaccucgagaaguacgucgaggacaccaagaucgaccucugguccuacaacgccgagcuccucgucgcccucgagaaccagcacaccaucgaccucaccgacuccgagaugaacaagcucuucgagcgcaccaagaagcagcuccgcgagaacgccgaggacaugggcaacggcugcuucaagaucuaccacaagugcgacaacgccugcaucggcuccauccgcaacggcaccuacgaccacgacgucuaccgcgacgaggcccucaacaaccgcuuccagaucaagggcgucgagcucaaguccggcuacaaggacuggauccucuggaucuccuucgccaucuccugcuuccuccucugcaucguccuccucggcuucaucaugugggccugccagaagggcaacauccgcugcaacaucugcaucuga

SEQ ID NO: 96103 - RNA, 1701 nt, Artificial Sequence
  derived and/or modified CDS sequence (opt2) from hemagglutinin__InfluenzaA__AAX56470
augaagaccaucaucgcccucuccuacauccucugccucgucuucgcccagaagcuccccggcaacgacaacuccaccgccacccucugccucggccaccacgccguccccaacggcacccucgucaagaccaucaccaacgaccagaucgaggucaccaacgccaccgagcucguccaguccuccuccaccggccgcaucugcgacuccccccaccagauccucgacggcgagaacugcacccucaucgacgcccuccucggcgacccccacugcgacggcuuccagaacaaggagugggaccucuucgucgagcgcuccaaggccuacuccaacugcuaccccuacgacguccccgacuacgucucccuccgcucccucgucgccuccuccggcacccucgaguucaacaacgaguccuucaacuggaccggcgucgcccagaacggcaccuccuccgccugcaagcgccgcuccgacaaguccuucuucucccgccucaacuggcuccaccagcucaaguacaaguaccccgcccucaacgucaccaugcccaacaacgagaaguucgacaagcucuacaucuggggcguccaccaccccggcaccgacuccgaccagaucucccucuacgcccaggccuccggccgcgucaccgucuccaccaagcgcucccagcagaccgucauccccaacaucggcucccgccccuggguccgcggcgucuccucccgcaucuccaucuacuggaccaucgucaagcccggcgacauccuccucaucaacuccaccggcaaccucaucgccccccgcggcuacuucaagaugcgcuccggcaaguccuccaucaugcgcuccgacgcccccaucggcaagugcaacuccgagugcaucacccccaacggcuccauccccaacgacaagcccuuccagaacgucaaccgcaucaccuacggccccugcccccgcuacgucaagcagaacacccucaagcucgccaccggcaugcgcaacguccccgagaagcagacccgcggcaucuucggcgccaucgccggcuucaucgagaacggcugggagggcaugauggacggcugguacggcuuccgccaccagaacuccgagggcaccggccaggccgccgaccucaaguccacccaggccgccaucaaccagaucaacggcaagcucaaccgccucaucgagaagaccaacgagaaguuccaccagaucgagaaggaguucuccgaggucgagggccgcauccaggaccucgagaaguacgucgaggacaccaagaucgaccucugguccuacaacgccgagcuccucgucgcccucgagaaccagcacaccaucgaccucaccgacuccgagaugaacaagcucuucgagcgcaccaagaagcagcuccgcgagaacgccgaggacaugggcaacggcugcuucaagaucuaccacaagugcgacaacgccugcaucggcuccauccgcaacggcaccuacgaccacgacgucuaccgcgacgaggcccucaacaaccgcuuccagaucaagggcgucgagcucaaguccggcuacaaggacuggauccucuggaucuccuucgccaucuccugcuuccuccucugcaucguccuccucggcuucaucaugugggccugccagaagggcaacauccgcugcaacaucugcaucuga

SEQ ID NO: 96104 - RNA, 1701 nt, Artificial Sequence; identical to SEQ ID NO: 96087
  derived and/or modified CDS sequence (opt2) from hemagglutinin__InfluenzaA__AAX56480

SEQ ID NO: 96105 - RNA, 1701 nt, Artificial Sequence
  derived and/or modified CDS sequence (opt2) from hemagglutinin__InfluenzaA__AAX56510
augaagaccaucaucgcccucuccuacauccucugccucgucuucgcccagaagcuccccggcaacgacaacuccaccgccacccucugccucggccaccacgccguccccaacggcacccucgucaagaccaucaccaacgaccagaucgaggucaccaacgccaccgagcucguccaguccuccuccaccggccgcaucugcgacuccccccaccagauccucgacggcgagaacugcacccucaucgacgcccuccucggcgacccccacugcgacggcuuccagaacaaggagugggaccucuucgucgagcgcuccaaggccuacuccaacugcuaccccuacgacguccccgacuacgucucccuccgcucccucgucgccuccuccggcacccucgaguucaacaacgaguccuucaacuggaccggcgucgcccagaacggcaccuccuccgccugcaagcgccgcuccgacaaguccuucuucucccgccucaacuggcuccaccagcucaaguacaaguaccccgcccucaacgucaccaugcccaacaacgagaaguucgacaagcucuacaucuggggcguccaccaccccggcaccgacuccgaccagaucucccucuacgcccaggccuccggccgcgucaccgucuccaccaagcgcucccagcagaccgucauccccaacaucggcucccgccccuggguccgcggcgucuccuccaagaucuccaucuacuggaccaucgucaagcccggcgacauccuccucaucaacuccaccggcaaccucaucgccccccgcggcuacuucaagauccgcuccggcaaguccuccaucaugcgcuccgacgcccccaucggcaagugcaacuccgagugcaucacccccaacggcuccauccccaacgacaagcccuuccagaacgucaaccgcaucaccuacggcgccugcccccgcuacgucaagcagaacacccucaagcucgccaccggcaugcgcaacguccccgagaagcagacccgcggcaucuucggcgccaucgccggcuucaucgagaacggcugggagggcaugauggacggcugguacggcuuccgccaccagaacuccgagggcaccggccaggccgccgaccucaaguccacccaggccgccaucaaccagaucaacggcaagcucaaccgccucaucgagaagaccaacgagaaguuccaccagaucgagaaggaguucuccgaggucgagggccgcauccaggaccucgagaaguacgucgaggacaccaagaucgaccucugguccuacaacgccgagcuccucgucgcccucgagaaccagcacaccaucgaccucaccgacuccgagaugaacaagcucuucgagcgcaccaagaagcagcuccgcgagaacgccgaggacaugggcaacggcugcuucaagaucuaccacaagugcgacaacgccugcaucggcuccauccgcaacggcaccuacgaccacgacgucuaccgcgacgaggcccucaacaaccgcuuccagaucaagggcgucgagcucaaguccggcuacaaggacuggauccucuggaucuccuucgccaucuccugcuuccuccucugcaucguccuccucggcuucaucaugugggccugccagaagggcaacauccgcugcaacaucugcaucuga

SEQ ID NO: 96106 - RNA, 1701 nt, Artificial Sequence; identical to SEQ ID NO: 96083
  derived and/or modified CDS sequence (opt2) from hemagglutinin__InfluenzaA__AAX56520

SEQ ID NO: 96107 - RNA, 1701 nt, Artificial Sequence
  derived and/or modified CDS sequence (opt2) from hemagglutinin__InfluenzaA__AAX56530
augaaggccaagcuccucguccuccucugcgccuucaccgccaccuacgccgacaccaucugcaucggcuaccacgccaacaacuccaccgacaccgucgacaccguccucgagaagaacgucaccgucacccacuccgucaaccuccucgaggacucccacaacggcaagcucugccgccucaagggcaccgccccccuccagcucggcaacugcuccaucgccggcuggauccucggcaaccccgagugcgagucccucuucuccaaggaguccugguccuacaucgccgagacccccaaccccaagaacggcaccugcuaccccggcuacuucgccgacuacgaggagcuccgcgagcagcucuccuccgucuccuccuucgagcgcuucgagaucuuccccaaggacuccuccuggcccaaccacaccgucaccaagggcgucaccgccuccugcucccacaacggcaaguccuccuucuacaagaaccuccucuggcucaccgagaagaacggccucuaccccaaccucuccaaguccuacgucaacaagaagggcaaggagguccucguccucuggggcguccaccaccccuccaacaugggcgaccagcgcgccaucuaccacaaggagaacgccuacgucuccguccucuccucccacuacucccgccgcuucacccccgagaucgccaagcgccccaagguccgcgaccaggagggccgcaucaacuacuacuggacccuccucgagcccggcgacaccaucaucuucgaggccaacggcaaccucaucgcccccugguacgccuucgcccucucccgcggcuucggcuccggcaucaucaucuccaacgccuccaugggcgagugcgacgccaagugccagaccccccagggcgccaucaacuccucccuccccuuccagaacguccaccccgucaccaucggcgagugccccaaguacguccgcuccaccaagcuccgcauggucaccggccuccgcaacguccccuccauccagucccgcggccucuucggcgccaucgccggcuucaucgagggcggcuggaccggcaugaucgacggcugguacggcuaccaccaccagaacgagcagggcuccggcuacgccgccgaccagaaguccacccagaacgccaucaacggcaucaccaacaaggucaacuccaucaucgagaagaugaacacccaguucaccgccgucggcaaggaguucaacaagcucgagaagcgcauggagaaccucaacaagaaggucgacgacggcuuccucgacaucuggaccuacaacgccgagcuccucguccuccucgagaacgagcgcacccucgacuuccacgaccucaacgucaagaaccucuacgagaaggucaagaaccagcucaagaacaacgccaaggagaucggcaacggcugcuucgaguucuaccacaagugcaacaacgagugcauggaguccgucaagaacggcaccuacgacuaccccaaguacuccaaggaguccaagcucaaccgcgagaagaucgacggcgucaagcucgaguccaugggcgucuaccagauccucgccaucuacuccaccgucgccuccucccucguccuccucgucucccucggcgccaucuccuucuggaugugcuccaacggcucccuccagugccgcaucugcaucuga

SEQ ID NO: 96108 - RNA, 1701 nt, Artificial Sequence
  derived and/or modified CDS sequence (opt2) from hemagglutinin__InfluenzaA__AAX56550
augaagaccaucaucgcccucuccuacauccucugccucgucuucgcccagaagcuccccgucaacgacaacuccaccgccacccucugccucggccaccacgccguccccaacggcacccucgucaagaccaucaccaacgaccacaucgaggucaccaacgccaccgagcucguccaguccuccuccaccggccgcaucugcgacuccccccaccagauccucgacggcgagaacugcacccucaucgacgcccuccucggcgacccccacugcgacggcuuccagaacaaggagugggaccucuucgucgagcgcuccaccgccuacuccaacugcuaccccuacgacguccccgacuacgccucccuccgcucccucgucgccuccuccggcacccucgaguucaacaacgaguccuucaacuggaccggcgucgcccagaacggcaccuccuccgccugcaagcgccgcuccaucaaguccuucuucucccgccucaacuggcuccaccagcucaaguacaaguaccccgcccucaacgucaccaugcccaacaacgagaaguucgacaagcucuacaucuggggcguccaccaccccuccaccgacuccgaccagaucucccucuacgcccaggccuccggccgcgucaccgucuccaccaagcgcucccagcagaccgucauccccaacaucggcucccgccccuggguccgcggcgucuccucccgcaucuccaucuacuggaccaucgucaagcccggcgacauccuccucaucaacuccaccggcaaccucaucgccccccgcggcuacuucaagauccgcuccggcaaguccuccaucaugcgcuccaacgcccccaucggcaagugcaacuccgagugcaucacccccaacggcuccauccccaacgacaagcccuuccagaacgucaaccgcaucaccuacggcgccugcccccgcuacgucaagcagaacacccucaagcucgccaccggcaugcgcaacguccccgagaagcagacccgcggcaucuucggcgccaucgccggcuucaucgagaacggcugggagggcauggucgacggcugguacggcuuccgccaccagaacuccgagggcaccggccaggccgccgaccucaaguccacccaggccgccaucaaccagaucaacggcaagcucaaccgccucaucgagaagaccaacgagaaguuccaccagaucgagaaggaguucuccgaggucgagggccgcauccaggaccucgagaaguacgucgaggacaccaagaucgaccucugguccuacaacgccgagcuccucgucgcccucgagaaccagcacaccaucgaccucaccgacuccgagaugaacaagcucuucgagcgcacccgcaagcagcuccgcgagaacgccgaggacaugggcaacggcugcuucaagaucuaccacaagugcgacaacgccugcaucggcuccauccgcaacggcaccuacgaccacgacgucuaccgcgacgaggcccucaacaaccgcuuccagaucaagggcgucgagcucaaguccggcuacaaggacuggauccucuggaucuccuucgccaucuccugcuuccuccucugcgucguccuccucggcuucaucaugugggccugccagaagggcaacauccgcugcaacaucugcaucuga

SEQ ID NO: 96109 - RNA, 1701 nt, Artificial Sequence
  derived and/or modified CDS sequence (opt2) from hemagglutinin__InfluenzaA__AAX56560
augaagaccaucaucgcccucuccuacauccucugccucgucuucgcccagaagcuccccggcaacgacaacuccaccgccacccucugccucggccaccacgccguccccaacggcaccaucgucaagaccaucaccaacgaccagaucgaggucaccaacgccaccgagcucguccagaucuccuccaccggcggcaucugcgacuccccccaccagauccucgacggcgagaacugcacccucaucgacgcccuccucggcgacccccagugcgacggcuuccagaacaagaagugggaccucuucgucgagcgcuccaaggccuacuccaacugcuaccccuacgacguccccgacuacgccucccuccgcucccucgucgccuccuccggcacccucgaguucaacaacgaguccuucgacuggaccggcgucacccagaacggcaccuccuccgccugcaagcgccgcuccaacaaguccuucuucucccgccucaacuggcucacccaccucaaguacaaguaccccgcccucaacgucaccaugcccaacaacgagaaguucgacaagcucuacaucuggggcguccaccaccccggcaccgacuccgaccagaucucccucuacgcccaggccuccggccgcaucaccgucuccaccaagcgcucccagcagaccgucauccccaacaucggcucccgcccccgcguccgcgacgucuccucccgcaucuccaucuacuggaccaucgucaagcccggcgacauccuccucaucaacuccaccggcaaccucaucgccccccgcggcuacuucaagauccgcuccggcaaguccuccaucaugcgcuccgacgcccccaucggcaagugcaacuccgagugcaucacccccaacggcuccauccccaacgacaagcccuuccagaacgucaaccgcaucaccuacggcgccugcccccgcuacgucaagcagaacacccucaagcucgccaccggcaugcgcaacguccccgagaagcagacccgcggcaucuucggcgccaucgccggcuucaucgagaacggcugggagggcauggucgacggcugguacggcuuccgccaccagaacuccgagggcaccggccaggccgccgaccucaaguccacccaggccgccaucaaccagaucaacggcaagcucaaccgccucaucggcaagaccaacgagaaguuccaccagaucgagaaggaguucuccgaggucgagggccgcauccaggaccucgagaaguacgucgaggacaccaagaucgaccucugguccuacaacgccgagcuccucgucgcccucgagaaccagcacaccaucgaccucaccgacuccgagaugaacaagcucuucgagcgcaccaagaagcagcuccgcgagaacgccgaggacaugggcaacggcugcuucaagaucuaccacaagugcgacaacgccugcaucggcuccauccgcaacggcaccuacgaccacgacgucuaccgcgacgaggcccucaacaaccgcuuccagaucaagggcgucgagcucaaguccggcuacaaggacuggauccucuggaucuccuucgccaucuccugcuuccuccucugcgucgcccuccucggcuucaucaugugggccugccagaagggcaacauccgcugcaacaucugcaucuga

SEQ ID NO: 96110 - RNA, 1701 nt, Artificial Sequence
  derived and/or modified CDS sequence (opt2) from hemagglutinin__InfluenzaA__AAX56570
augaagaccaucaucgcccucuccuacauccucugccucgucuucgcccagaagcuccccggcaacgacaacuccaccgccacccucugccucggccaccacgccguccccaacggcacccucgucaagaccaucaccaacgaccagaucgaggucaccaacgccaccgagcucguccaguccuccuccaccucccgcaucugcgacuccccccaccagauccucgacggcgagaacugcacccucaucgacgcccuccucggcgacccccacugcgacggcuuccagaacaaggagugggaccucuucgucgagcgcuccaaggccuacuccaacugcuaccccuacgacguccccgacuacgucucccuccgcucccucgucgccuccuccggcacccucgaguucaacaacgaguccuucaacuggaccggcgucgcccagaacggcaccuccuccgccugcaagcgccgcuccgacaaguccuucuucucccgccucaacuggcuccaccagcucaaguacaaguaccccgcccucaacgucaccaugcccaacaacgagaaguucgacaagcucuacaucuggggcguccaccaccccggcaccgacuccgaccagaucucccucuacgcccaggccuccggccgcgucaccgucuccaccaagcgcucccagcagaccgucauccccaacaucggcucccgccccuggguccgcggcgucuccuccggcaucuccaucuacuggaccaucgucaagcccggcgacauccuccucaucaacuccaccggcaaccucaucgccccccgcggcuacuucaagauccgcuccggcaaguccuccaucaugcgcuccgacgcccccaucggcaagugcaacuccgagugcaucacccccaacggcuccauccccaacgacaagcccuuccagaacgucaaccgcaucaccuacggcgccugcccccgcuacgucaagcagaacacccucaagcucgccaccggcaugcgcaacguccccgagaagcagacccgcggcaucuucggcgccaucgccggcuucaucgagaacggcugggagggcaugauggacggcugguacggcuuccgccaccagaacuccgagggcaccggccaggccgccgaccucaaguccacccaggccgccaucaaccagaucaacggcaagcucaaccgccucaucgagaagaccaacgagaaguuccaccagaucgagaaggaguucuccgaggucgagggccgcauccaggaccucgagaaguacgucgaggacaccaagaucgaccucugguccuacaacgccgagcuccucgucgcccucgagaaccagcacaccaucgaccucaccgacuccgagaugaacaagcucuucgagcgcaccaagaagcagcuccgcgagaacgccgaggacaugggcaacggcugcuucaagaucuaccacaagugcgacaacgccugcaucggcuccauccgcaacggcaccuacgaccacgacgucuaccgcgacgaggcccucaacaaccgcuuccagaucaagggcgucgagcucaaguccggcuacaaggacuggauccucuggaucuccuucgccaucuccugcuuccuccucugcaucguccuccucggcuucaucaugugggccugccagaagggcaacauccgcugcaacaucugcaucuga

SEQ ID NO: 96111 - RNA, 1701 nt, Artificial Sequence
  derived and/or modified CDS sequence (opt2) from hemagglutinin__InfluenzaA__AAX56590
augaagaccaucaucgcccucuccuacauccucugccucgucuucgcccagaagcuccccggcaacgacaacuccaccgccacccucugccucggccaccacgccguccccaacggcacccucgucaagaccaucaccaacgaccagaucgaggucaccaacgccaccgagcucguccaguccuccuccaccucccgcaucugcgacuccccccaccagauccucgacggcgagaacugcacccucaucgacgcccuccucggcgacccccacugcgacggcuuccagaacaaggagugggaccucuucgucgagcgcuccaaggccuacuccaacugcuaccccuacgacguccccgacuacgucucccuccgcucccucgucgccuccuccggcacccucgaguucaacaacgaguccuucaacuggaccggcgucgcccagaacggcaccuccuccgccugcaagcgccgcuccgacaaguccuucuucucccgccucaacuggcuccaccagcucaaguacaaguaccccgcccucaacgucaccaugcccaacaacgagaaguucgacaagcucuacaucuggggcguccaccaccccuccaccgacuccgaccagaucucccucuacgcccaggccuccggccgcgucaccgucuccaccaagcgcucccagcagaccgucauccccaacaucggcucccgccccuggguccgcggcgucuccucccgcaucuccaucuacuggaccaucgucaagcccggcgacauccuccucaucaacuccaccggcaaccucaucgccccccgcggcuacuucaagauccgcuccggcaaguccuccaucaugcgcuccgacgcccccaucggcaagugcaacuccgagugcaucacccccaacggcuccauccccaacgacaagcccuuccagaacgucaaccgcaucaccuacggcgccugcccccgcuacgucaagcagaacacccucaagcucgccaccggcaugcgcaacguccccgagaagcagacccgcggcaucuucggcgccaucgccggcuucaucgagaacggcugggagggcaugauggacggcugguacggcuuccgccaccagaacuccgagggcaccggccaggccgccgaccucaaguccacccaggccgccaucaaccagaucaacggcaagcucaaccgccucaucgagaagaccaacgagaaguuccaccagaucgagaaggaguucuccgaggucgagggccgcauccaggaccucgagaaguacgucgaggacaccaagaucgaccucugguccuacaacgccgagcuccucgucgcccucgagaaccagcacaccaucgaccucaccgacuccgagaugaacaagcucuucgagcgcaccaagaagcagcuccgcgagaacgccgaggacaugggcaacggcugcuucaagaucuaccacaagugcgacaacgccugcaucggcuccauccgcaacggcaccuacgaccacgacgucuaccgcgacgaggcccucaacaaccgcuuccagaucaagggcgucgagcucaaguccggcuacaaggacuggauccucuggaucuccuucgccaucuccugcuuccuccucugcaucguccuccucggcuucaucaugugggccugccagaagggcaacauccgcugcaacaucugcaucuga

SEQ ID NO: 96112 - RNA, 1701 nt, Artificial Sequence; identical to SEQ ID NO: 96109
  derived and/or modified CDS sequence (opt2) from hemagglutinin__InfluenzaA__AAX56600

SEQ ID NO: 96113 - RNA, 1701 nt, Artificial Sequence
  derived and/or modified CDS sequence (opt2) from hemagglutinin__InfluenzaA__AAX57644
augaagaccaucaucgcccucuccuacauccucugccucgucuucgcccagaagcuccccggcaacgacaacuccaccgccacccucugccucggccaccacgccguccccaacggcaccaucgucaagaccaucaccaacgaccagaucgaggucaccaacgccaccgagcucguccaguccuccuccaccggcggcaucugcgacuccccccaccagauccucgacggcgagaacugcacccucaucgacgcccuccucggcgacccccagugcgacggcuuccagaacaagaagugggaccucuucgucgagcgcuccaaggccuacuccaacugcuaccccuacgacguccccgacuacgccucccuccgcucccucgucgccuccuccggcacccucgaguucaacaacgaguccuucgacuggaccggcgucacccagaacggcaccuccuccgccugcaagcgccgcuccaacaaguccuucuucucccgccucaacuggcucacccaccucaaguacaaguaccccgcccucaacgucaccaugcccaacaacgagaaguucgacaagcucuacaucuggggcguccaccaccccggcaccgacuccgaccagaucucccucuacgcccaggccuccggccgcaucaccgucuccaccaagcgcucccagcagaccgucauccccaacaucggcucccgcccccgcguccgcgacgucuccucccgcaucuccaucuacuggaccgucgucaagcccggcgacauccuccucaucaacuccaccggcaaccucaucgccccccgcggcuacuucaagaugcgcuccggcaaguccuccaucaugcgcuccgacgcccccaucggcaagugcaacuccgagugcaucacccccaacggcuccauccccaacgacaagcccuuccagaacgucaaccgcaucaccuacggcgccugcccccgcuacgucaagcagaacacccucaagcucgccaccggcaugcgcaacguccccgagaagcagacccgcggcaucuucggcgccaucgccggcuucaucgagaacggcugggagggcauggucgacggcugguacggcuuccgccaccagaacuccgagggcaccggccaggccgccgaccucaaguccacccaggccgccaucaaccagaucaacggcaagcucaaccgccucaucggcaagaccaacgagaaguuccaccagaucgagaaggaguucuccgaggucgagggccgcauccaggaccucgagaaguacgucgaggacaccaagaucgaccucugguccuacaacgccgagcuccucgucgcccucgagaaccagcacaccaucgaccucaccgacuccgagaugaacaagcucuucgagcgcaccaagaagcagcuccgcgagaacgccgaggacaugggcaacggcugcuucaagaucuaccacaagugcgacaacgccugcaucggcuccauccgcaacggcaccuacgaccacgacgucuaccgcgacgaggcccucaacaaccgcuuccagaucaagggcgucgagcucaaguccggcuacaaggacuggauccucuggaucuccuucgccaucuccugcuuccuccucugcgucgcccuccucggcuucaucaugugggccugccagaagggcaacauccgcugcaacaucugcaucuga

SEQ ID NO: 96114 - RNA, 1701 nt, Artificial Sequence; identical to SEQ ID NO: 96067
  derived and/or modified CDS sequence (opt2) from hemagglutinin__InfluenzaA__AAX57654

SEQ ID NO: 96115 - RNA, 1701 nt, Artificial Sequence; identical to SEQ ID NO: 96083
  derived and/or modified CDS sequence (opt2) from hemagglutinin__InfluenzaA__AAX57664

SEQ ID NO: 96116 - RNA, 1701 nt, Artificial Sequence
  derived and/or modified CDS sequence (opt2) from hemagglutinin__InfluenzaA__AAX57684
augaagaccaucaucgcccucuccuacauccucugccucgucuucgcccagaagcuccccggcaacgacaacuccaccgccacccucugccucggccaccacgccguccccaacggcacccucgucaagaccaucaccaacgaccagaucgaggucaccaacgccaccgagcucguccaguccuccuccaccucccgcaucugcgacuccccccaccagauccucgacggcgagaacugcacccucaucgacgcccuccucggcgacccccacugcgacggcuuccagaacaaggagugggaccucuucgucgagcgcuccaaggccuacuccaacugcuaccccuacgacguccccgacuacgucucccuccgcucccucgucgccuccuccggcacccucgaguucaacaacgaguccuucaacuggaccggcgucgcccagaacggcaccuccuccgccugcaagcgccgcuccgacaaguccuucuucucccgccucaacuggcuccaccagcucaaguacaaguaccccgcccucaacgucaccaugcccaacaacgagaaguucgacaagcucuacaucuggggcguccaccaccccggcaccgacuccgaccagaucucccucuacgcccaggccuccggccgcgucaccgucuccaccaagcgcucccagcagaccgucauccccaacaucggcuccggccccuggguccgcggcgucuccucccgcaucuccaucuacuggaccaucgucaagcccggcgacauccuccucaucaacuccaccggcaaccucaucgccccccgcggcuacuucaagauccgcuccggcaaguccuccaucaugcgcuccgacgcccccaucggcaagugcaacuccgagugcaucacccccaacggcuccauccccaacgacaagcccuuccagaacgucaaccgcaucaccuacggcgccugcccccgcuacgucaagcagaacacccucaagcucgccaccggcaugcgcaacguccccgagaagcagacccgcggcaucuucggcgccaucgccggcuucaucgagaacggcugggagggcaugauggacggcugguacggcuuccgccaccagaacuccgagggcaccggccaggccgccgaccucaaguccacccaggccgccaucaaccagaucaacggcaagcucaaccgccucaucgagaagaccaacgagaaguuccaccagaucgagaaggaguucuccgaggucgagggccgcauccaggaccucgagaaguacgucgaggacaccaagaucgaccucugguccuacaacgccgagcuccucgucgcccucgagaaccagcacaccaucgaccucaccgacuccgagaugaacaagcucuucgagcgcaccaagaagcagcuccgcgagaacgccgaggacaugggcaacggcugcuucaagaucuaccacaagugcgacaacgccugcaucggcuccauccgcaacggcaccuacgaccacgacgucuaccgcgacgaggcccucaacaaccgcuuccagaucaagggcgucgagcucaaguccggcuacaaggacuggauccucuggaucuccuucgccaucuccugcuuccuccucugcaucguccuccucggcuucaucaugugggccugccagaagggcaacauccgcugcaacaucugcaucuga

SEQ ID NO: 96117 - RNA, 1701 nt, Artificial Sequence; identical to SEQ ID NO: 96087
  derived and/or modified CDS sequence (opt2) from hemagglutinin__InfluenzaA__AAX57694

SEQ ID NO: 96118 - RNA, 1701 nt, Artificial Sequence; identical to SEQ ID NO: 96109
  derived and/or modified CDS sequence (opt2) from hemagglutinin__InfluenzaA__AAX57704

SEQ ID NO: 96119 - RNA, 1701 nt, Artificial Sequence; identical to SEQ ID NO: 96087
  derived and/or modified CDS sequence (opt2) from hemagglutinin__InfluenzaA__AAX57714

SEQ ID NO: 96120 - RNA, 1701 nt, Artificial Sequence; identical to SEQ ID NO: 96116
  derived and/or modified CDS sequence (opt2) from hemagglutinin__InfluenzaA__AAX57733

SEQ ID NO: 96121 - RNA, 1701 nt, Artificial Sequence
  derived and/or modified CDS sequence (opt2) from hemagglutinin__InfluenzaA__AAX57734
augaagaccaucaucgcccucuccuacauccucugccucgucuucgcccagaagcuccccggcaacgacaacuccaccgccacccucugccucggccaccacgccguccccaacggcacccucgucaagaccaucaccaacgaccagaucgaggucaccaacgccaccgagcucguccaguccuccuccaccucccgcaucugcaacuccccccaccagauccucgacggcgagaacugcacccucaucgacgcccuccucggcgacccccacugcgacggcuuccagaacaaggagugggaccucuucgucgagcgcuccaaggccuacuccaacugcuaccccuacgacguccccgacuacgucucccuccgcucccucgucgccuccuccggcacccucgaguucaacaacgaguccuucaacuggaccggcgucgcccagaacggcaccuccuccgccugcaagcgccgcuccgacaaguccuucuucucccgccucaacuggcuccaccagcucaaguacaaguaccccgcccucaacgucaccaugcccaacaacgagaaguucgacaagcucuacaucuggggcguccaccaccccggcaccgacuccgaccagaucucccucuacgcccaggccuccggccgcgucaccgucuccaccaagcgcucccagcagaccgucauccccaacaucggcuccggccccuggguccgcggcgucuccucccgcaucuccaucuacuggaccaucgucaagcccggcgacauccuccucaucaacuccaccggcaaccucaucgccccccgcggcuacuucaagauccgcuccggcaaguccuccaucaugcgcuccgacgcccccaucggcaagugcaacuccgagugcaucacccccaacggcuccauccccaacgacaagcccuuccagaacgucaaccgcaucaccuacggcgccugcccccgcuacgucaagcagaacacccucaagcucgccaccggcaugcgcaacguccccgagaagcagacccgcggcaucuucggcgccaucgccggcuucaucgagaacggcugggagggcaugauggacggcugguacggcuuccgccaccagaacuccgagggcaccggccaggccgccgaccucaaguccacccaggccgccaucaaccagaucaacggcaagcucaaccgccucaucgagaagaccaacgagaaguuccaccagaucgagaaggaguucuccgaggucgagggccgcauccaggaccucgagaaguacgucgaggacaccaagaucgaccucugguccuacaacgccgagcuccucgucgcccucgagaaccagcacaccaucgaccucaccgacuccgagaugaacaagcucuucgagcgcaccaagaagcagcuccgcgagaacgccgaggacaugggcaacggcugcuucaagaucuaccacaagugcgacaacgccugcaucggcuccauccgcaacggcaccuacgaccacgacgucuaccgcgacgaggcccucaacaaccgcuuccagaucaagggcgucgagcucaaguccggcuacaaggacuggauccucuggaucuccuucgccaucuccugcuuccuccucugcaucguccuccucggcuucaucaugugggccugccagaagggcaacauccgcugcaacaucugcaucuga

SEQ ID NO: 96122 - RNA, 1701 nt, Artificial Sequence; identical to SEQ ID NO: 96108
  derived and/or modified CDS sequence (opt2) from hemagglutinin__InfluenzaA__AAX57744

SEQ ID NO: 96123 - RNA, 1701 nt, Artificial Sequence; identical to SEQ ID NO: 96108
  derived and/or modified CDS sequence (opt2) from hemagglutinin__InfluenzaA__AAX57764

SEQ ID NO: 96124 - RNA, 1701 nt, Artificial Sequence; identical to SEQ ID NO: 96108
  derived and/or modified CDS sequence (opt2) from hemagglutinin__InfluenzaA__AAX57774

SEQ ID NO: 96125 - RNA, 1701 nt, Artificial Sequence
  derived and/or modified CDS sequence (opt2) from hemagglutinin__InfluenzaA__AAX57784
augaagaccaucaucgcccucuccuacauccucugccucgucuucgcccagaagcuccccggcaacgacaacuccaccgccacccucugccucggccaccacgccguccccaacggcacccucgucaagaccaucaccaacgaccagaucgaggucaccaacgccaccgagcucguccagaacuccuccaccucccgcaucugcgacuccccccaccagauccucgacggcgagaacugcacccucaucgacgcccuccucggcgacccccacugcgacggcuuccagaacaaggagugggaccucuucgucgagcgcuccaaggccuacuccaacugcuaccccuacgacguccccgacuacgucucccuccgcucccucgucgccuccuccggcacccucgaguucaacaacgaguccuucaacuggaccggcgucgcccagaacggcaccuccuccgccugcaagcgccgcuccgacaaguccuucuucucccgccucaacuggcuccaccagcucaaguacaaguaccccgcccucaacgucaccaugcccaacaacgagaaguucgacaagcucuacaucuggggcguccaccaccccggcaccgacuccgaccagaucucccucuacgcccaggccuccggccgcgucaccgucuccaccaagcgcucccagcagaccgucauccccaacaucggcucccgccccuggguccgcggcgucuccucccgcaucuccaucuacuggaccaucgucaagcccggcgacauccuccucaucaacuccaccggcaaccucaucgccccccgcggcuacuucaagauccgcuccggcaaguccuccaucaugcgcuccgacgcccccaucggcaagugcaacuccgagugcaucacccccaacggcuccauccccaacgacaagcccuuccagaacgucaaccgcaucaccuacggcgccugcccccgcuacgucaagcagaacacccucaagcucgccaccggcaugcgcaacguccccgagaagcagacccgcggcaucuucggcgccaucgccggcuucaucgagaacggcugggagggcaugauggacggcugguacggcuuccgccaccagaacuccgagggcaccggccaggccgccgaccucaaguccacccaggccgccaucaaccagaucaacggcaagcucaaccgccucaucgagaagaccaacgagaaguuccaccagaucgagaaggaguucuccgaggucgagggccgcauccaggaccucgagaaguacgucgaggacaccaagaucgaccucugguccuacaacgccgagcuccucgucgcccucgagaaccagcacaccaucgaccucaccgacuccgagaugaacaagcucuucgagcgcaccaagaagcagcuccgcgagaacgccgaggacaugggcaacggcugcuucaagaucuaccacaagugcgacaacgccugcaucggcuccauccgcaacggcaccuacgaccacgacgucuaccgcgacgaggcccucaacaaccgcuuccagaucaagggcgucgagcucaaguccggcuacaaggacuggauccucuggaucuccuucgccaucuccugcuuccuccucugcaucguccuccucggcuucaucaugugggccugccagaagggcaacauccgcugcaacaucugcaucuga

SEQ ID NO: 96126 - RNA, 1701 nt, Artificial Sequence
  derived and/or modified CDS sequence (opt2) from hemagglutinin__InfluenzaA__AAX57794
augaagaccaucaucgcccucuccuacauccucugccucgucuucgcccagaagcuccccgucaacgacaacuccaccgccacccucugccucggccaccacgccguccccaacggcacccucgucaagaccaucaccaacgaccacaucgaggucaccaacgccaccgagcucguccaguccuccuccaccggccgcaucugcgacuccccccaccagauccucgacggcgagaacugcacccucaucgacgcccuccucggcgacccccacugcgacggcuuccagaacaaggagugggaccucuucgucgagcgcuccaccgccuacuccaacugcuaccccuacgacguccccgacuacgccucccuccgcucccucgucgccuccuccggcacccucgaguucaacaacgaguccuucaacuggaccggcgucgcccagaacggcaccuccuccgccugcaagcgccgcuccaucaaguccuucuucucccgccucaacuggcuccaccagcucaaguacaaguaccccgcccucaacgucaccaugcccaacaacgagaaguucgacaagcucuacaucuggggcguccaccaccccuccaccgacuccgaccagaucucccucuacgcccaggccuccggccgcgucaccgucuccaccaagcgcucccagcagaccgucauccccaacaucggcucccgccccuggguccgcggcgucuccucccgcaucuccauccacuggaccaucgucaagcccggcgacauccuccucaucaacuccaccggcaaccucaucgccccccgcggcuacuucaagauccgcuccggcaaguccuccaucaugcgcuccaacgcccccaucggcaagugcaacuccgagugcaucacccccaacggcuccauccccaacgacaagcccuuccagaacgucaaccgcaucaccuacggcgccugcccccgcuacgucaagcagaacacccucaagcucgccaccggcaugcgcaacguccccgagaagcagacccgcggcaucuucggcgccaucgccggcuucaucgagaacggcugggagggcauggucgacggcugguacggcuuccgccaccagaacuccgagggcaccggccaggccgccgaccucaaguccacccaggccgccaucaaccagaucaacggcaagcucaaccgccucaucgagaagaccaacgagaaguuccaccagaucgagaaggaguucuccgaggucgagggccgcauccaggaccucgagaaguacgucgaggacaccaagaucgaccucugguccuacaacgccgagcuccucgucgcccucgagaaccagcacaccaucgaccucaccgacuccgagaugaacaagcucuucgagcgcacccgcaagcagcuccgcgagaacgccgaggacaugggcaacggcugcuucaagaucuaccacaagugcgacaacgccugcaucggcuccauccgcaacggcaccuacgaccacgacgucuaccgcgacgaggcccucaacaaccgcuuccagaucaagggcgucgagcucaaguccggcuacaaggacuggauccucuggaucuccuucgccaucuccugcuuccuccucugcgucguccuccucggcuucaucaugugggccugccagaagggcaacauccgcugcaacaucugcaucuga

SEQ ID NO: 96127 - RNA, 1701 nt, Artificial Sequence; identical to SEQ ID NO: 96108
  derived and/or modified CDS sequence (opt2) from hemagglutinin__InfluenzaA__AAX57814

SEQ ID NO: 96128 - RNA, 1701 nt, Artificial Sequence
  derived and/or modified CDS sequence (opt2) from hemagglutinin__InfluenzaA__AAX57824
augaagaccaucaucgcccucuccuacauccucugcauggucuucgcccagaagcuccccgucaacgacaacuccaccgccacccucugccucggccaccacgccguccccaacggcacccucgucaagaccaucaccaacgaccacaucgaggucaccaacgccaccgagcucguccaguccuccuccaccggccgcaucugcgacuccccccaccagauccucgacggcgagaacugcacccucaucgacgcccuccucggcgacccccacugcgacggcuuccagaacaaggagugggaccucuucgucgagcgcuccaccgccuacuccaacugcuaccccuacgacguccccgacuacgccucccuccgcucccucgucgccuccuccggcacccucgaguucaacaacgaguccuucaacuggaccggcgucgcccagaacggcaccuccuccgccugcaagcgccgcuccaucaaguccuucuucucccgccucaacuggcuccaccagcucaaguacaaguaccccgcccucaacgucaccaugcccaacaacgagaaguucgacaagcucuacaucuggggcguccaccaccccuccaccgacuccgaccagaucucccucuacgcccaggccuccggccgcgucaccgucuccaccaagcgcucccagcagaccgucauccccaacaucggcucccgccccuggguccgcggcgucuccucccgcaucuccaucuacuggaccaucgucaagcccggcgacauccuccucaucaacuccaccggcaaccucaucgccccccgcggcuacuucaagauccgcuccggcaaguccuccaucaugcgcuccaacgcccccaucggcaagugcaacuccgagugcaucacccccaacggcuccauccccaacgacaagcccuuccagaacgucaaccgcaucaccuacggcgccugcccccgcuacgucaagcagaacacccucaagcucgccaccggcaugcgcaacguccccgagaagcagacccgcggcaucuucggcgccaucgccggcuucaucgagaacggcugggagggcauggucgacggcugguacggcuuccgccaccagaacuccgagggcaccggccaggccgccgaccucaaguccacccaggccgccaucaaccagaucaacggcaagcucaaccgccucaucgagaagaccaacgagaaguuccaccagaucgagaaggaguucuccgaggucgagggccgcauccaggaccucgagaaguacgucgaggacaccaagaucgaccucugguccuacaacgccgagcuccucgucgcccucgagaaccagcacaccaucgaccucaccgacuccgagaugaacaagcucuucgagcgcacccgcaagcagcuccgcgagaacgccgaggacaugggcaacggcugcuucaagaucuaccacaagugcgacaacgccugcaucggcuccauccgcaacggcaccuacgaccacgacgucuaccgcgacgaggcccucaacaaccgcuuccagaucaagggcgucgagcucaaguccggcuacaaggacuggauccucuggaucuccuucgccaucuccugcuuccuccucugcgucguccuccucggcuucaucaugugggccugccagaagggcaacauccgcugcaacaucugcaucuga

SEQ ID NO: 96129 - RNA, 1701 nt, Artificial Sequence; identical to SEQ ID NO: 96108
  derived and/or modified CDS sequence (opt2) from hemagglutinin__InfluenzaA__AAX57834

SEQ ID NO: 96130 - RNA, 1701 nt, Artificial Sequence; identical to SEQ ID NO: 96108
  derived and/or modified CDS sequence (opt2) from hemagglutinin__InfluenzaA__AAX57844

SEQ ID NO: 96131 - RNA, 1701 nt, Artificial Sequence
  derived and/or modified CDS sequence (opt2) from hemagglutinin__InfluenzaA__AAX57864
augaagaccaucaucgcccucuccuacuuccucugccucgucuucgcccagaagcuccccgucaacgacaacuccaccgccacccucugccucggccaccacgccguccccaacggcacccucgucaagaccaucaccaacgaccacaucgaggucaccaacgccaccgagcucguccaguccuccuccaccggccgcaucugcgacuccccccaccagauccucgacggcgagaacugcacccucaucgacgcccuccucggcgacccccacugcgacggcuuccagaacaaggagugggaccucuucgucgagcgcuccaccgccuacuccaacugcuaccccuacgacguccccgacuacgccucccuccgcucccucgucgccuccuccggcacccucgaguucaacaacgaguccuucaacuggaccggcgucgcccagaacggcaccuccuccgccugcaagcgccgcuccaucaaguccuucuucucccgccucaacuggcuccaccagcucaaguacaaguaccccgcccucaacgucaccaugcccaacaacgagaaguucgacaagcucuacaucuggggcguccaccaccccuccaccgacuccgaccagaucucccucuacgcccaggccuccggccgcgucaccgucuccaccaagcgcucccagcagaccgucauccccaacaucggcucccgccccuggguccgcggcgucuccucccgcaucuccaucuacuggaccaucgucaagcccggcgacauccuccucaucaacuccaccggcaaccucaucgccccccgcggcuacuucaagauccgcuccggcaaguccuccaucaugcgcuccaacgcccccaucggcaagugcaacuccgagugcaucacccccaacggcuccauccccaacgacaagcccuuccagaacgucaaccgcaucaccuacggcgccugcccccgcuacgucaagcagaacacccucaagcucgccaccggcaugcgcaacguccccgagaagcagacccgcggcaucuucggcgccaucgccggcuucaucgagaacggcugggagggcauggucgacggcugguacggcuuccgccaccagaacuccgagggcaccggccaggccgccgaccucaaguccacccaggccgccaucaaccagaucaacggcaagcucaaccgccucaucgagaagaccaacgagaaguuccaccagaucgagaaggaguucuccgaggucgagggccgcauccaggaccucgagaaguacgucgaggacaccaagaucgaccucugguccuacaacgccgagcuccucgucgcccucgagaaccagcacaccaucgaccucaccgacuccgagaugaacaagcucuucgagcgcacccgcaagcagcuccgcgagaacgccgaggacaugggcaacggcugcuucaagaucuaccacaagugcgacaacgccugcaucggcuccauccgcaacggcaccuacgaccacgacgucuaccgcgacgaggcccucaacaaccgcuuccagaucaagggcgucgagcucaaguccggcuacaaggacuggauccucuggaucuccuucgccaucuccugcuuccuccucugcgucguccuccucggcuucaucaugugggccugccagaagggcaacauccgcugcaacaucugcaucuga

SEQ ID NO: 96132 - RNA, 1701 nt, Artificial Sequence; identical to SEQ ID NO: 96108
  derived and/or modified CDS sequence (opt2) from hemagglutinin__InfluenzaA__AAX57874

SEQ ID NO: 96133 - RNA, 1701 nt, Artificial Sequence; identical to SEQ ID NO: 96108
  derived and/or modified CDS sequence (opt2) from hemagglutinin__InfluenzaA__AAX57884

SEQ ID NO: 96134 - RNA, 1701 nt, Artificial Sequence
  derived and/or modified CDS sequence (opt2) from hemagglutinin__InfluenzaA__AAX57894
augaagaccaucaucgcccucuccuacauccucugccucgucuucgcccagaagcuccccgucaacgacaacuccaccgccacccucugccucggccaccacgccguccccaacggcacccucgucaagaccaucaccaacgaccacaucgaggucaccaacgccaccgagcucguccaguccuccuccaccggccgcaucugcgacuccccccaccagguccucgacggcgagaacugcacccucaucgacgcccuccucggcgacccccacugcgacggcuuccagaacaaggagugggaccucuucgucgagcgcuccaccgccuacuccaacugcuaccccuacgacguccccgacuacgccucccuccgcucccucgucgccuccuccggcacccucgaguucaacaacgaguccuucaacuggaccggcgucgcccagaacggcaccuccuccgccugcaagcgccgcuccaucaaguccuucuucucccgccucaacuggcuccaccagcucaaguacaaguaccccgcccucaacgucaccaugcccaacaacgagaaguucgacaagcucuacaucuggggcguccaccaccccuccaccgacuccgaccagaucucccucuacgcccaggccuccggccgcgucaccgucuccaccaagcgcucccagcagaccgucauccccaacaucggcucccgccccuggguccgcggcgucuccucccgcaucuccaucuacuggaccaucgucaagcccggcgacauccuccucaucaacuccaccggcaaccucaucgccccccgcggcuacuucaagauccgcuccggcaaguccuccaucaugcgcuccaacgcccccaucggcaagugcaacuccgagugcaucacccccaacggcuccauccccaacgacaagcccuuccagaacgucaaccgcaucaccuacggcgccugcccccgcuacgucaagcagaacacccucaagcucgccaccggcaugcgcaacguccccgagaagcagacccgcggcaucuucggcgccaucgccggcuucaucgagaacggcugggagggcauggucgacggcugguacggcuuccgccaccagaacuccgagggcaccggccaggccgccgaccucaaguccacccaggccgccaucaaccagaucaacggcaagcucaaccgccucaucgagaagaccaacgagaaguuccaccagaucgagaaggaguucuccgaggucgagggccgcauccaggaccucgagaaguacgucgaggacaccaagaucgaccucugguccuacaacgccgagcuccucgucgcccucgagaaccagcacaccaucgaccucaccgacuccgagaugaacaagcucuucgagcgcacccgcaagcagcuccgcgagaacgccgaggacaugggcaacggcugcuucaagaucuaccacaagugcgacaacgccugcaucggcuccauccgcaacggcaccuacgaccacgacgucuaccgcgacgaggcccucaacaaccgcuuccagaucaagggcgucgagcucaaguccggcuacaaggacuggauccucuggaucuccuucgccaucuccugcuuccuccucugcgucguccuccucggcuucaucaugugggccugccagaagggcaacauccgcugcaacaucugcaucuga

SEQ ID NO: 96135 - RNA, 1701 nt, Artificial Sequence
  derived and/or modified CDS sequence (opt2) from hemagglutinin__InfluenzaA__AAX57924
augaagaccaucaucgcccucuccuacauccucugccucgucuucgcccagaagcuccccgucaacgacaacuccaccgccacccucugccucggccaccacgccguccccaacggcacccucgucaagaccaucaccaacgaccacaucgaggucaccaacgccaccgagcucguccaguccuccuccaccggccgcaucugcgacuccccccaccagauccucgacggcgagaacugcacccucaucgacgcccuccucggcgacccccacugcgacggcuuccagaacaaggagugggaccucuucgucgagcgcuccaccgccuacuccaacugcuaccccuacgacguccccgacuacgccucccuccgcucccucgucgccuccuccggcacccucgaguucaacaacgaguccuucaacuggaccggcgucgcccagaacggcaccuccuucgccugcaagcgccgcuccaucaaguccuucuucucccgccucaacuggcuccaccagcucaaguacaaguaccccgcccucaacgucaccaugcccaacaacgagaaguucgacaagcucuacaucuggggcguccaccaccccuccaccgacuccgaccagaucucccucuacgcccaggccuccggccgcgucaccgucuccaccaagcgcucccagcagaccgucauccccaacaucggcucccgccccuggguccgcggcgucuccucccgcaucuccaucuacuggaccaucgucaagcccggcgacauccuccucaucaacuccaccggcaaccucaucgccccccgcggcuacuucaagauccgcuccggcaaguccuccaucaugcgcuccaacgcccccaucggcaagugcaacuccgagugcaucacccccaacggcuccauccccaacgacaagcccuuccagaacgucaaccgcaucaccuacggcgccugcccccgcuacgucaagcagaacacccucaagcucgccaccggcaugcgcaacguccccgagaagcagacccgcggcaucuucggcgccaucgccggcuucaucgagaacggcugggagggcauggucgacggcugguacggcuuccgccaccagaacuccgagggcaccggccaggccgccgaccucaaguccacccaggccgccaucaaccagaucaacggcaagcucaaccgccucaucgagaagaccaacgagaaguuccaccagaucgagaaggaguucuccgaggucgagggccgcauccaggaccucgagaaguacgucgaggacaccaagaucgaccucugguccuacaacgccgagcuccucgucgcccucgagaaccagcacaccaucgaccucaccgacuccgagaugaacaagcucuucgagcgcacccgcaagcagcuccgcgagaacgccgaggacaugggcaacggcugcuucaagaucuaccacaagugcgacaacgccugcaucggcuccauccgcaacggcaccuacgaccacgacgucuaccgcgacgaggcccucaacaaccgcuuccagaucaagggcgucgagcucaaguccggcuacaaggacuggauccucuggaucuccuucgccaucuccugcuuccuccucugcgucguccuccucggcuucaucaugugggccugccagaagggcaacauccgcugcaacaucugcaucuga

SEQ ID NO: 96136 - RNA, 1701 nt, Artificial Sequence; identical to SEQ ID NO: 96108
  derived and/or modified CDS sequence (opt2) from hemagglutinin__InfluenzaA__AAX57934

SEQ ID NO: 96137 - RNA, 1701 nt, Artificial Sequence
  derived and/or modified CDS sequence (opt2) from hemagglutinin__InfluenzaA__AAX57944
augaagaccaucaucgcccucuccuacauccucugccucgucuucgcccagaagcuccccggcaacgacaacuccaccgccacccucugccucggccaccacgccguccccaacggcacccucgucaagaccaucaccaacgaccagaucgaggucaccaacgccaccgagcucguccaguccuccuccaccggccgcaucugcgacuccccccaccagauccucgacggcgagaacugcacccucaucgacgcccuccucggcgacccccacugcgacggcuuccagaacaaggagugggaccucuucgucgagcgcuccaaggccuacuccaacugcuaccccuacgacguccccgacuacgucucccuccgcucccucgucgccuccuccggcacccucgaguucaacaacgaguccuucaacuggaccggcgucgcccagaacggcaccuccuccgccugcaagcgccgcuccgacaaguccuucuucucccgccucaacuggcuccaccagcucaaguacaaguaccccgcccucaacgucaccaugcccaacaacgagaaguucgacaagcucuacaucuggggcguccaccaccccggcaccgacuccgaccagaucucccucuacgcccaggccuccggccgcgucaccgucuccaccaagcgcucccagcagaccgucauccccaacaucggcuccggccccuggguccgcggcgucuccucccgcaucuccaucuacuggaccaucgucaagcccggcgacauccuccucaucaacuccaccggcaaccucaucgccccccgcggcuacuucaagauccgcuccggcaaguccuccaucaugcgcuccgacgcccccaucggcaagugcaacuccgagugcaucacccccaacggcuccauccccaacggcaagcccuuccagaacgucaaccgcaucaccuacggcgccugcccccgcuacgucaagcagaacacccucaagcucgccaccggcaugcgcaacguccccgagaagcagacccgcggcaucuucggcgccaucgccggcuucaucgagaacggcugggagggcaugauggacggcugguacggcuuccgccaccagaacuccgagggcaccggccaggccgccgaccucaaguccacccaggccgccaucaaccagaucaacggcaagcucaaccgccucaucgagaagaccaacgagaaguuccaccagaucgagaaggaguucuccgaggucgagggccgcauccaggaccucgagaaguacgucgaggacaccaagaucgaccucugguccuacaacgccgagcuccucgucgcccucgagaaccagcacaccaucgaccucaccgacuccgagaugaacaagcucuucgagcgcaccaagaagcagcuccgcgagaacgccgaggacaugggcaacggcugcuucaagaucuaccacaagugcgacaacgccugcaucggcuccauccgcaacggcaccuacgaccacgacgucuaccgcgacgaggcccucaacaaccgcuuccagaucaaguccgucgagcucaaguccggcuacaaggacuggauccucuggaucuccuucgccaucuccugcuuccuccucugcaucguccuccucggcuucaucaugugggccugccagaagggcaacauccgcugcaacaucugcaucuga

SEQ ID NO: 96138 - RNA, 1701 nt, Artificial Sequence
  derived and/or modified CDS sequence (opt2) from hemagglutinin__InfluenzaA__AAX76623
augaagaccaucaucgcccucuccuacauccucugccucgucuucgcccagaagcuccccggcaacgacaaguccaccgccacccucugccucggccaccacgccguccccaacggcaccaucgucaagaccaucaccaacgaccagaucgaggucaccaacgccaccgagcucguccaguccuccuccaccggcggcaucugcgacuccccccaccagauccucgacggcgagaacugcacccucaucgacgcccuccucggcgacccccagugcgacggcuuccagaacaagaagugggaccucuucgucgagcgcuccaaggccuacuccaacugcuaccccuacgacguccccgacuacgccucccuccgcucccucgucgccuccuccggcacccucgaguucaacaacgaguccuucgacuggaccggcgucacccagaacggcaccuccuccgccugcaagcgccgcuccaacaaguccuucuucucccgccucaacuggcucacccaccucaaguacaaguaccccgcccucaacgucaccaugcccaacaacgagaaguucgacaagcucuacaucuggggcguccaccaccccggcaccgacuccgaccagaucucccucuacgcccaggccuccggccgcaucaccgucuccaccaagcgcucccagcagaccgucauccccaacaucggcucccgcccccgcguccgcgacaucuccucccgcaucuccaucuacuggaccaucgucaagcccggcgacauccuccucaucaacuccaccggcaaccucaucgccccccgcggcuacuucaagauccgcuccggcaaguccuccaucaugcgcuccgacgcccccaucggcaagugcaacuccgagugcaucacccccaacggcuccauccccaacgacaagcccuuccagaacgucaaccgcaucaccuacggcgccugcccccgcuacgucaagcagaacacccucaagcucgccaccggcaugcgcaacguccccgagaagcagacccgcggcaucuucggcgccaucgccggcuucaucgagaacggcugggagggcauggucgacggcugguacggcuuccgccaccagaacuccgagggcaccggccaggccgccgaccucaaguccacccaggccgccaucaaccagaucaacggcaagcucaaccgccucaucggcaagaccaacgagaaguuccaccagaucgagaaggaguucuccgaggucgagggccgcauccaggaccucgagaaguacgucgaggacaccaagaucgaccucugguccuacaacgccgagcuccucgucgcccucgagaaccagcacaccaucgaccucaccgacuccgagaugaacaagcucuucgagcgcaccaagaagcagcuccgcgagaacgccgaggacaugggcaacggcugcuucaagaucuaccacaagugcgacaacgccugcaucggcuccauccgcaacggcaccuacgaccacgacgucuaccgcgacgaggcccucaacaaccgcuuccagaucaagggcgucgagcuccgcuccggcuacaaggacuggauccucuggaucuccuucgccaucuccugcuuccuccucugcgucgccucccucggcuucaucaugugggccugccagaagggcaacauccgcugcaacaucugcaucuga

SEQ ID NO: 96139 - RNA, 1701 nt, Artificial Sequence
  derived and/or modified CDS sequence (opt2) from hemagglutinin__InfluenzaA__AAX76643
augaagaccaucaucgcccucuccuacuuccucugccucgucuucgcccagaagcuccccggcaacgacaacuccaccgccacccucugccucggccaccacgccguccccaacggcaccaucgucaagaccaucaccaacgaccagaucgaggucaccaacgccaccgagcucguccaguccuccuccaccggcggcaucugcgacuccccccaccagauccucgacggcgagaacugcacccucaucgacgcccuccucggcgacccccagugcgacggcuuccagaacaagaagugggaccucuucgucgagcgcuccaaggccuacuccaacugcuaccccuacgacguccccgacuacgccucccuccgcucccucgucgccuccuccggcacccucgaguucaacaacgaguccuucaacuggaccggcgucacccagaacggcaccuccuccgccugcgagcgccgcuccaacaaguccuucuucucccgccucaacuggcucacccaccucaaguacaaguaccccgcccucaacgucaccaugcccaacaacgagaaguucgacaagcucuacaucuggggcguccaccaccccggcaccgacuccgaccagaucucccucuacgcccaggccuccggccgcaucaccgucuccaccaagcgcucccagcagaccgucauccccaacaucggcucccgcccccgcguccgcgacgucuccucccgcaucuccaucuacuggaccaucgucaagcccggcgacauccuccucaucaacuccaccggcaaccucaucgccccccgcggcuacuucaagauccgcuccggcaaguccuccaucaugcgcuccgacgcccccaucggcaagugcaacuccgagugcaucacccccaacggcuccauccccaacgacaagcccuuccagaacgucaaccgcaucaccuacggcgccugcccccgcuacgucaagcagaacacccucaagcucgccaccggcaugcgcaacguccccgagaagcagacccgcggcaucuucggcgccaucgccggcuucaucgagaacggcugggagggcauggucgacggcugguacggcuuccgccaccagaacuccgagggcaccggccaggccgccgaccucaaguccacccaggccgccaucaaccagaucaacggcaagcucaaccgccucaucggcaagaccaacgagaaguuccaccagaucgagaaggaguucuccgaggucgagggccgcauccaggaccucgagaaguacgucgaggacaccaagaucgaccucugguccuacaacgccgagcuccucgucgcccucgagaaccagcacaccaucgaccucaccgacuccgagaugaacaagcucuucgagcgcaccaagaagcagcuccgcgagaacgccgaggacaugggcaacggcugcuucaagaucuaccacaagugcgacaacgccugcaucggcuccauccgcaacggcaccuacgaccacgacgucuaccgcgacgaggcccucaacaaccgcuuccagaucaagggcgucgagcucaaguccggcuacaaggacuggauccucuggaucuccuucgccaucuccugcuuccuccucugcgucgcccuccucggcuucaucaugugggccugccagaagggcaacauccgcugcgacaucugcaucuga

SEQ ID NO: 96140 - RNA, 1701 nt, Artificial Sequence
  derived and/or modified CDS sequence (opt2) from hemagglutinin__InfluenzaA__AAX76653
augaagaccaucaucgcccucuccuacuuccucugccucgucuucgcccagaagcuccccggcaacgacaacuccaccgccacccucugccucggccaccacgccguccccaacggcaccaucgucaagaccaucaccaacgaccagaucgaggucaccaacgccaccgagcucguccaguccuccuccaccggcggcaucugcgacuccccccaccagauccucgacggcgagaacugcacccucaucgacgcccuccucggcgacccccagugcgacggcuuccagaacaagaagugggaccucuucgucgagcgcuccaaggccuacuccaacugcuaccccuacgacguccccgacuacgccucccuccgcucccucgucgccuccuccggcacccucgaguucaacaacgaguccuucaacuggaccggcgucacccagaacggcaccuccuccgccugcgagcgccgcuccaacaaguccuucuucucccgccucaacuggcucacccaccucaaguacaaguaccccgcccucaacgucaccaugcccaacaacgagaaguucgacaagcucuacaucuggggcguccaccaccccggcaccgacuccgaccagaucucccucuucgcccaggccuccggccgcaucaccgucuccaccaagcgcucccagcagaccgucauccccaacaucggcuccggcccccgcguccgcgacgucuccucccgcaucuccaucuacuggaccaucgucaagcccggcgacauccuccucaucaacuccaccggcaaccucaucgccccccgcggcuacuucaagauccgcuccggcaaguccuccaucaugcgcuccgacgcccccaucggcaagugcaacuccgagugcaucacccccaacggcuccauccccaacgacaagcccuuccagaacgucaaccgcaucaccuacggcgccugcccccgcuacgucaagcagaacacccucaagcucgccaccggcaugcgcaacguccccgagaagcagacccgcggcaucuucggcgccaucgccggcuucaucgagaacggcugggagggcauggucgacggcugguacggcuuccgccaccagaacuccgagggcaccggccaggccgccgaccucaaguccacccaggccgccaucaaccagaucaacggcaagcucaaccgccucaucggcaagaccaacgagaaguuccaccagaucgagaaggaguucuccgaggucgagggccgcauccaggaccucgagaaguacgucgaggacaccaagaucgaccucugguccuacaacgccgagcuccucgucgcccucgagaaccagcacaccaucgaccucaccgacuccgagaugaacaagcucuucgagcgcaccaagaagcagcuccgcgagaacgccgaggacaugggcaacggcugcuucaagaucuaccacaagugcgacaacgccugcaucggcuccauccgcaacggcaccuacgaccacgacgucuaccgcgacgaggcccucaacaaccgcuuccagaucaagggcgucgagcucaaguccggcuacaaggacuggauccucuggaucuccuucgccaucuccugcuuccuccucugcgucgcccuccucggcuucaucaugugggccugccagaagggcaacauccgcugcgacaucugcaucuga

SEQ ID NO: 96141 - RNA, 1701 nt, Artificial Sequence
  derived and/or modified CDS sequence (opt2) from hemagglutinin__InfluenzaA__AAX76663
augaagaccaucaucgcccucuccuacauccucugccucgucuucgcccagaagcuccccggcaacgacaacuccaccgccacccucugccucggccaccacgccguccccaacggcacccucgucaagaccaucaccaacgaccagaucgaggucaccaacgccaccgagcucguccaguccuccuccaccggccgcaucugcgacuccccccaccagauccucgacggcgagaacugcacccucaucgacgcccuccucggcgacccccacugcgacggcuuccagaacaaggagugggaccucuucgucgagcgcuccaaggccuacuccaacugcuaccccuacgacguccccgacuacgucucccuccgcucccucgucgccuccuccggcacccucgaguucaacaacgaguccuucaacuggaccggcgucgcccagaacggcaccuccuccgccugcaagcgccgcuccgacaaguccuucuucucccgccucaacuggcuccaccagcucaaguacaaguaccccgcccucaacgucaccaugcccaacaacgagaaguucgacaagcucuacaucuggggcguccaccaccccggcaccgacuccgaccagaucucccucuacgcccaggccuccggccgcgucaccgucuccaccaagcgcucccagcagaccgucauccccaacaucggcuccggccccuggguccgcggcgucuccucccgcaucuccaucuacuggaccaucgucaagcccggcgacauccuccucaucaacuccaccggcaaccucaucgccccccgcggcuacuucaagauccgcuccggcaaguccuccaucaugcgcuccgacgcccccaucggcaagugcaacuccgagugcaucacccccaacggcuccauccccaacgacaagcccuuccagaacgucaaccgcaucaccuacggccccugcccccgcuacgucaagcagaacacccucaagcucgccaccggcaugcgcaacguccccgagaagcagacccgcggcaucuucggcgccaucgccggcuucaucgagaacggcugggagggcaugauggacggcugguacggcuuccgccaccagaacuccgagggcaccggccaggccgccgaccucaaguccacccaggccgccaucaaccagaucaacggcaagcucaaccgccucaucgagaagaccaacgagaaguuccaccagaucgagaaggaguucuccgaggucgagggccgcauccaggaccucgagaaguacgucgaggacaccaagaucgaccucugguccuacaacgccgagcuccucgucgcccucgagaaccagcacaccaucgaccucaccgacuccgagaugaacaagcucuucgagcgcaccaagaagcagcuccgcgagaacgccgaggacaugggcaacggcugcuucaagaucuaccacaagugcgacaacgccugcaucggcuccauccgcaacggcaccuacgaccacgacgucuaccgcgacgaggcccucaacaaccgcuuccagaucaagggcgucgagcucaaguccggcuacaaggacuggauccucuggaucuccuucgccaucuccugcuuccuccucugcaucguccuccucggcuucaucaugugggccugccagaagggcaacauccgcugcaacaucugcaucuga

SEQ ID NO: 96142 - RNA, 1701 nt, Artificial Sequence
  derived and/or modified CDS sequence (opt2) from hemagglutinin__InfluenzaA__AAX76673
augaagaccaucaucgcccucuccuacauccucugccucgucuucgcccagaagcuccccgucaacgacaacuccaccgccacccucugccucggccaccacgccguccccaacggcacccucgucaagaccaucaccaacgaccacaucgaggucaccaacgccaccgagcucguccaguccuccuccaccggccgcaucugcgacuccccccaccagauccucgacggcgagaacugcacccucaucgacgcccuccucggcgacccccacugcgacggcuuccagaacaaggagugggaccucuucgucgagcgcuccaccgccuacuccaacugcuaccccuacgacguccccgacuacgccucccuccgcucccucgucgccuccuccggcacccucgaguucaacaacgaguccuucaacuggaccggcgucgcccagaacggcaccuccuccgccugcaagcgccgcuccaucaaguccuucuucucccgccucaacuggcuccaccagcucaaguacaaguaccccgcccucaacgucaccaugcccaacaacgagaaguucgacaagcucuacaucuggggcguccaccaccccuccaccgacuccgaccagaucucccucuacgcccaggccuccggccgcgucaccgucuccaccaagcgcucccagcagaccgucauccccaacaucggcucccgccccuggguccgcggcgucuccucccgcaucuccaucuacuggaccaucgucaagcccggcgacauccuccucaucaacuccaccggcaaccucaucgccccccgcggcuacuucaagauccgcuccggcaaguccuccaucaugcgcuccaacgcccccaucggcaagugcaacuccgagugcaucacccccaacggcuccauccccaacgacaagcccuuccagaacgucaaccgcaucaccuacggcgccugcccccgcuacgucaagcagaacacccucaagcucgccaccggcaugcgcaacguccccgagaagcagacccgcggcaucuucggcgccaucgccggcuucaucgagaacggcugggagggcauggucgacggcugguacggcuuccgccaccagaacuccgagggcaccggccaggccgccgaccucaaguccacccaggccgccaucaaccagaucaacggcaagcucaaccgccucaucgagaagaccaacgagaaguuccaccagaucgagaaggaguucuccgaggucgagggccgcauccaggaccucgagcgcuacgucgaggacaccaagaucgaccucugguccuacaacgccgagcuccucgucgcccucgagaaccagcacaccaucgaccucaccgacuccgagaugaacaagcucuucgagcgcacccgcaagcagcuccgcgagaacgccgaggacaugggcaacggcugcuucaagaucuaccacaagugcgacaacgccugcaucggcuccauccgcaacggcaccuacgaccacgacgucuaccgcgacgaggcccucaacaaccgcuuccagaucaagggcgucgagcucaaguccggcuacaaggacuggauccucuggaucuccuucgccaucuccugcuuccuccucugcgucguccuccucggcuucaucaugugggccugccagaagggcaacauccgcugcaacaucugcaucuga

SEQ ID NO: 96143 - RNA, 1701 nt, Artificial Sequence
  derived and/or modified CDS sequence (opt2) from hemagglutinin__InfluenzaA__AAX76683
augaagaccaucaucgcccucuccuacauccucugccucgucuucgcccagaagcuccccgucaacgacaacuccaccgccacccucugccucggccaccacgccguccccaacggcacccucgucaagaccaucaccaacgaccacaucgaggucaccaacgccaccgagcucguccaguccuccuccaccggccgcaucugcgacuccccccaccagauccucgacggcgagaacugcacccucaucgacgcccuccucggcgacccccacugcgacggcuuccagaacaaggagugggaccucuucgucgagcgcuccaccgccuacuccaacugcuaccccuacgacguccccgacuacgccucccuccgcucccucgucgccuccuccggcacccucgaguucaacaacgaguccuucaacuggaccggcgucgcccagaacggcaccuccuccgccugcaagcgccgcuccaucaaguccuucuucucccgccucaacuggcuccaccagcucaaguacaaguaccccgcccucaacgucaccaugcccaacaacgagaaguucgacaagcucuacaucuggggcguccaccaccccuccaccgacuccgaccagaucucccucuacgcccaggccuccggccgcgucaccgucuccaccaagcgcucccagcagaccgucauccccaacaucggcucccgccccuggguccgcggcgucuccucccgcaucuccaucuacuggaccaucgucaagcccggcgacauccuccucaucaacuccaccggcaaccucaucgccccccgcggcuacuucaagauccgcuccggcaaguccuccgucaugcgcuccaacgcccccaucggcaagugcaacuccgagugcaucacccccaacggcuccauccccaacgacaagcccuuccagaacgucaaccgcaucaccuacggcgccugcccccgcuacgucaagcagaacacccucaagcucgccaccggcaugcgcaacguccccgagaagcagacccgcggcaucuucggcgccaucgccggcuucaucgagaacggcugggagggcauggucgacggcugguacggcuuccgccaccagaacuccgagggcaccggccaggccgccgaccucaaguccacccaggccgccaucaaccagaucaacggcaagcucaaccgccucaucgagaagaccaacgagaaguuccaccagaucgagaaggaguucuccgaggucgagggccgcauccaggaccucgagaaguacgucgaggacaccaagaucgaccucugguccuacaacgccgagcuccucgucgcccucgagaaccagcacaccaucgaccucaccgacuccgagaugaacaagcucuucgagcgcacccgcaagcagcuccgcgagaacgccgaggacaugggcaacggcugcuucaagaucuaccacaagugcgacaacgccugcaucggcuccauccgcaacggcaccuacgaccacgacgucuaccgcgacgaggcccucaacaaccgcuuccagaucaagggcgucgagcucaaguccggcuacaaggacuggauccucuggaucuccuucgccaucuccugcuuccuccucugcgucguccuccucggcuucaucaugugggccugccagaagggcaacauccgcugcaacaucugcaucuga

SEQ ID NO: 96144 - RNA, 1701 nt, Artificial Sequence; identical to SEQ ID NO: 96108
  derived and/or modified CDS sequence (opt2) from hemagglutinin__InfluenzaA__AAX76713

SEQ ID NO: 96145 - RNA, 1701 nt, Artificial Sequence
  derived and/or modified CDS sequence (opt2) from hemagglutinin__InfluenzaA__AAX76723
augaagaccaucaucgcccucuccuacauccucugccucgucuucgcccagaagcuccccgucaacgacaacuccaccgccacccucugccucggccaccacgccguccccaacggcacccucgucaagaccaucaccaacgaccacaucgaggucaccaacgccaccgagcucguccaguccuccuccaccggccgcaucugcgacuccccccaccagauccucgacggcgagaacugcacccucaucgacgcccuccucggcgacccccacugcgacggcuuccagaacaaggagugggaccucuucgucgagcgcuccaccgccuacuccaacugcuaccccuacgacguccccgacuacgccucccuccgcucccucgucgccuccuccggcacccucgaguucaacaacgaguccuucaacuggaccggcgucgcccagaacggcaccuccuccgccugcaagcgccgcuccaucaaguccuucuucucccgccucaacuggcuccaccagcucaaguacaaguaccccgcccucaacgucaccaugcccaacaacgaggaguucgacaagcucuacaucuggggcguccaccaccccuccaccgacuccgaccagaucucccucuacgcccaggccuccggccgcgucaccgucuccaccaagcgcucccagcagaccgucauccccaacaucggcucccgccccuggguccgcggcgucuccuccaucaucuccaucuacuggaccaucgucaagcccggcgacauccuccucaucaacuccaccggcaaccucaucgccccccgcggcuacuucaagauccgcuccggcaaguccuccaucaugcgcuccaacgcccccaucggcaagugcaacuccgagugcaucacccccaacggcuccauccccaacgacaagcccuuccagaacgucaaccgcaucaccuacggcgccugcccccgcuacgucaagcagaacacccucaagcucgccaccggcaugcgcaacguccccgagaagcagacccgcggcaucuucggcgccaucgccggcuucaucgagaacggcugggagggcauggucgacggcugguacggcuuccgccaccagaacuccgagggcaccggccaggccgccgaccucaaguccacccaggccgccaucaaccagaucaacggcaagcucaaccgccucaucgagaagaccaacgagaaguuccaccagaucgagaaggaguucuccgaggucgagggccgcauccaggaccucgagaaguacgucgaggacaccaagaucgaccucugguccuacaacgccgagcuccucgucgcccucgagaaccagcacaccaucgaccucaccgacuccgagaugaacaagcucuucgagcgcacccgcaagcagcuccgcgagaacgccgaggacaugggcaacggcugcuucaagaucuaccacaagugcgacaacgccugcaucggcuccauccgcaacggcaccuacgaccacgacgucuaccgcgacgaggcccucaacaaccgcuuccagaucaagggcgucgagcucaaguccggcuacaaggacuggauccucuggaucuccuucgccaucuccugcuuccuccucugcgucguccuccucggcuucaucaugugggccugccagaagggcaacauccgcugcaacaucugcaucuga

SEQ ID NO: 96146 - RNA, 1701 nt, Artificial Sequence
  derived and/or modified CDS sequence (opt2) from hemagglutinin__InfluenzaA__AAX76733
augaagaccaucaucgcccucuccuacauccucugccucgucuucgcccagaagcuccccggcaacgacaacuccaccgccacccucugccucggccaccacgccguccccaacggcacccucgucaagaccaucaccaacgaccagaucgaggucaccaacgccaccgagcucguccaguccuccuccaccgaccgcaucugcgacuccccccaccagauccucgacggcggcaacugcacccucaucgacgcccuccucggcgacccccacugcgacggcuuccagaacaaggagugggaccucuucgucgagcgcuccaaggccuacuccaacugcuaccccuacgacguccccgacuacgucucccuccgcucccucgucgccuccuccggcacccucgaguucaacaacgaguccuucaacuggaccggcgucgcccagaacggcaccuccuccgccugcaagcgccgcuccgacaaguccuucuucucccgccucaacuggcuccaccagcucaagaacaaguaccccgcccucaacgucgccaugcccaacaacgagaaguucgacaagcucuacaucuggggcguccaccaccccggcaccgacuccgaccagaucucccucuacgcccaggccuccggccgcgucaccgucuccaccaagcgcucccagcagaccgucauccccaacaucggcucccgcccccgcguccgcgacaucuccucccgcaucuccaucuacuggaccaucgucaagcccggcgacauccuccucaucaacuccaccggcaaccucaucgccccccgcggcuacuucaagauccgcuccggcaaguccuccaucaugcgcuccgacgcccccaucggcaagugcaacuccgagugcaucacccccaacggcuccauccccaacgacaagcccuuccagaacgucaaccgcaucaccuacggcgccugcccccgcuacgucaagcagaacacccucaagcucgccaccggcaugcgcaacguccccgagaagcagacccgcggcaucuucggcgccaucgccggcuucaucgagaacggcugggagggcauggucgacggcugguacggcuuccgccaccagaacuacgagggcaccggccaggccgccgaccucaaguccacccaggccgccaucaaccagaucaacggcaagcucaaccgccucaucgagaagaccaacgagaaguuccaccagaucgagaaggaguucuccgaggucgagggccgcauccaggaccucgagaaguacgucgaggacaccaagaucgaccucugguccuacaacgccgagcuccucgucgcccucgagaaccagcacaccaucgaccucaccgacuccgagaugaacaagcucuucgagcgcaccaagaagcagcuccgcgagaacgccgaggacaugggcaacggcugcuucaagaucuaccacaagugcgacaacgccugcaucggcuccauccgcaacggcaccuacgaccacgacgucuaccgcgacgaggcccucaacaaccgcuuccagaucaagggcgucgagcucaaguccggcuacaaggacuggauccucuggaucuccuucgccaucuccugcuuccuccucugcaucguccuccucggcuucaucaugugggccugccagaagggcaacauccgcugcaacaucugcaucuga

SEQ ID NO: 96147 - RNA, 1701 nt, Artificial Sequence
  derived and/or modified CDS sequence (opt2) from hemagglutinin__InfluenzaA__AAX76743
augaagaccaucaucgcccucuccuacauccucugccucgucuucgcccagaagcuccccggcaacgacaacuccaccgccacccucugccucggccaccacgccguccccaacggcacccucgucaagaccaucaccaacgaccagaucgaggucaccaacgccaccgagcucguccaguccuccuccaccggccgcaucugcgacuccccccaccagauccucgacggcgagaacugcacccucaucgacgcccuccucggcgacccccacugcgacggcuuccagaacaaggagugggaccucuucgucgagcgcuccaaggccuacuccaacugcuaccccuacgacguccccgacuacgucucccuccgcucccucgucgccuccuccggcacccucgaguucaacaacgaguccuucaacuggaccggcgucgcccagaacggcaccuccuccgccugcaagcgccgcuccaacaaguccuucuucucccgccucaacuggcuccaccagcucaagaacaaguaccccgcccucaacgucgccaugcccaacaacgagaaguucgacaagcucuacaucuggggcguccaccaccccggcaccgacuccgaccagaucucccucuacgcccaggccuccggccgcgucaccgucuccaccaagcgcucccagcagaccgucauccccaacaucggcucccgcccccgcguccgcgacaucuccucccgcaucuccaucuacuggaccaucgucaagcccggcgacauccuccucaucaacuccaccggcaaccucaucgccccccgcggcuacuucaagauccgcuccggcaaguccuccaucaugcgcuccgacgcccccaucggcaagugcaacuccgagugcaucacccccaacggcuccauccccaacgacaagcccuuccagaacgucaaccgcaucaccuacggcgccugcccccgcuacgucaagcagaacacccucaagcucgccaccggcaugcgcaacguccccgagaagcagacccgcggcaucuucggcgccaucgccggcuucaucgagaacggcugggagggcaugauggacggcugguacggcuuccgccaccagaacuccgagggcaccggccaggccgccgaccucaaguccacccaggccgccaucaaccagaucaacggcaagcucaaccgccucaucgagaagaccaacgagaaguuccaccagaucgagaaggaguucuccgaggucgagggccgcauccaggaccucgagaaguacgucgaggacaccaagaucgaccucugguccuacaacgccgagcuccucgucgcccucgagaaccagcacaccaucgaccucaccgacuccgagaugaacaagcucuucgagcgcaccaagaagcagcuccgcgagaacgccgaggacaugggcaacggcugcuucaagaucuaccacaagugcgacaacgccugcaucggcuccauccgcaacggcaccuacgaccacgacgucuaccgcgacgaggcccucaacaaccgcuuccagaucaagggcgucgagcucaaguccggcuacaaggacuggauccucuggaucuccuucgccaucuccugcuuccuccucugcaucguccuccucggcuucaucaugugggccugccagaagggcaacauccgcugcaacaucugcaucuga

SEQ ID NO: 96148 - RNA, 1701 nt, Artificial Sequence
  derived and/or modified CDS sequence (opt2) from hemagglutinin__InfluenzaA__AAX76763
augaagaccaucaucgcccucuccuacauccucugccucgucuucgcccagaagcuccccggcaacgacaacuccaccgccacccucugccucggccaccacgccguccccaacggcaccaucgucaagaccaucaccaacgaccagaucgaggucaccaacgccaccgagcucguccaguccuccuccaccggcggcaucugcgacuccccccaccagauccucgacggcgagaacugcacccucaucgacgcccuccucggcgacccccagugcgacggcuuccagaacaagaagugggaccucuucgucgagcgcuccaaggccuacuccaacugcuaccccuacgacguccccgacuacgccucccuccgcucccucgucgccuccuccggcacccucgaguucaacaacgaguccuucgacuggaccggcgucacccagaacggcaccuccuccgccugcaagcgccgcuccaacaaguccuucuucucccgccucaacuggcucacccaccucaaguacaaguaccccgcccucaacgucaccaugcccaacaacgagaaguucgacaagcucuacaucuggggcguccaccaccccggcaccgacuccgaccagaucucccucuacgcccaggccuccggccgcaucaccgucuccaccaagcgcucccagcagaccgucauccccaacaucggcucccgcccccgcguccgcgacaucuccucccgcaucuccaucuacuggaccaucgucaagcccggcgacauccuccucaucaacuccaccggcaaccucaucgccccccgcggcuacuucaagauccgcuccggcaaguccuccaucaugcgcuccgacgcccccaucggcaagugcaacuccgagugcaucacccccaacggcuccauccccaacgacaagcccuuccagaacgucaaccgcaucaccuacggcgccugcccccgcuacgucaagcagaacacccucaagcucgccaccggcaugcgcaacguccccgagaagcagacccgcggcaucuucggcgccaucgccggcuucaucgagaacggcugggagggcauggucgacggcugguacggcuuccgccaccagaacuccgagggcaccggccaggccgccgaccucaaguccacccaggccgccaucaaccagaucaacggcaagcucaaccgccucaucggcaagaccaacgagaaguuccaccagaucgagaaggaguucuccgaggucgagggccgcauccaggaccucgagaaguacgucgaggacaccaagaucgaccucugguccuacaacgccgagcuccucaucgcccucgagaaccagcacaccaucgaccucaccgacuccgagaugaacaagcucuucgagcgcaccaagaagcagcuccgcgagaacgccgaggacaugggcaacggcugcuucaagaucuaccacaagugcgacaacgccugcaucggcuccauccgcaacggcaccuacgaccacgacgucuaccgcgacgaggcccucaacaaccgcuuccagaucaagggcgucgagcucaaguccggcuacaaggacuggauccucuggaucuccuucgccaucuccugcuuccuccucugcgucgcccuccucggcuucaucaugugggccugccagaagggcaacauccgcugcaacaucugcaucuga

SEQ ID NO: 96149 - RNA, 1701 nt, Artificial Sequence; identical to SEQ ID NO: 96068
  derived and/or modified CDS sequence (opt2) from hemagglutinin__InfluenzaA__AAY18086

SEQ ID NO: 96150 - RNA, 1701 nt, Artificial Sequence
  derived and/or modified CDS sequence (opt2) from hemagglutinin__InfluenzaA__AAY18096
augaagaccaucaucgcccucuccugcauccucugccucgucuucgcccagaagcuccccggcaacgacaacuccaccgccacccucugccucggccaccacgccguccccaacggcaccaucgucaagaccaucaccaacgaccagaucgaggucaccaacgccaccgagcucguccaguccuccuccaccggcggcaucugcgacuccccccaccagauccucgacggcgagaacugcacccucaucgacgcccuccucggcgacccccagugcgacggcuuccagaacaagaagugggaccucuucgucgagcgcuccaaggccuacuccaacugcuaccccuacgacguccccgacuacgccucccuccgcucccucgucgccuccuccggcacccucgaguucaacaacgaguccuucaacuggaccggcgucacccagaacggcaccuccuccgccugcgagcgccgcuccaacaaguccuucuucucccgccucaacuggcucacccaccucaaguacaaguaccccgcccucaacgucaccaugcccaacaacgagaaguucgacaagcucuacaucuggggcguccaccaccccggcaccgacuccgaccagaucucccucuacgcccaggccuccggccgcaucaccgucuccaccaagcgcucccagcagaccgucauccccaacaucggcucccgcccccgcguccgcgacgucuccucccgcaucuccaucuacuggaccaucgucaagcccggcgacauccuccucaucaacuccaccggcaaccucaucgccccccgcggcuacuucaagauccgcuccggcaaguccuccaucaugcgcuccgacgcccccaucggcaagugcaacuccgagugcaucacccccaacggcuccauccccaacgacaagcccuuccagaacgucaaccgcaucaccuacggcgccugcccccgcuacgucaagcagaacacccucaagcucgccaccggcaugcgcaacguccccgagaagcagacccgcggcaucuucggcgccaucgccggcuucaucgagaacggcugggagggcauggucgacggcugguacggcuuccgccaccagaacuccgagggcaccggccaggccgccgaccucaaguccacccaggccgccaucaaccagaucaacggcaagcucaaccgccucaucggcaagaccaacgagaaguuccaccagaucgagaaggaguucuccgaggucgagggccgcauccaggaccucgagaaguacgucgaggacaccaagaucgaccucugguccuacaacgccgagcuccucgucgcccucgagaaccagcacaccaucgaccucaccgacuccgagaugaacaagcucuucgagcgcaccaagaagcagcuccgcgagaacgccgaggacaugggcaacggcugcuucaagaucuaccacaagugcgacaacgccugcaucggcuccauccgcaacggcaccuacgaccacgacgucuaccgcgacgaggcccucaacaaccgcuuccagaucaagggcgucgagcucaaguccggcuacaaggacuggauccucuggaucuccuucgccaucuccugcuuccuccucugcgucgcccuccucggcuucaucaugugggccugccagaagggcaacauccgcugcgacaucugcaucuga

SEQ ID NO: 96151 - RNA, 1701 nt, Artificial Sequence; identical to SEQ ID NO: 96083
  derived and/or modified CDS sequence (opt2) from hemagglutinin__InfluenzaA__AAY18106

SEQ ID NO: 96152 - RNA, 1701 nt, Artificial Sequence; identical to SEQ ID NO: 96083
  derived and/or modified CDS sequence (opt2) from hemagglutinin__InfluenzaA__AAY18116

SEQ ID NO: 96153 - RNA, 1701 nt, Artificial Sequence
  derived and/or modified CDS sequence (opt2) from hemagglutinin__InfluenzaA__AAY18126
augaagaccaucaucgcccucuccuacauccucugccucgucuucgcccagaagcuccccggcaacgacaacuccaccgccacccucugccucggccaccacgccguccccaacggcaccaucgucaagaccaucaccaacgaccagaucgaggucaccaacgccaccgagcucguccaguccuccuccaccggcggcaucugcgacuccccccaccagauccucgacggcgagaacugcacccucaucgacgcccuccucggcgacccccagugcgacggcuuccagaacaagaagugggaccucuucgucgagcgcuccaaggccuacuccaacugcuaccccuacgacguccccgacuacgccucccuccgcucccucgucgccuccuccggcacccucgaguucaacaacgagggcuucaacuggaccggcgucacccagaacggcaccuccuccgccugcaagcgcaaguccaacaaguccuucuucucccgccucaacuggcucacccaccucaaguacaaguaccccgcccucaacgucaccaugcccaacaacgagaaguucgacaagcucuacaucuggggcguccaccaccccggcaccgacaacgaccagaucucccucuacgcccaggccuccggccgcaucaccgucuccaccaagcgcucccagcagaccgucauccccaacaucggcucccgcccccgcguccgcgacgucuccucccgcaucuccaucuacuggaccaucgucaagcccggcgacauccuccucaucaacuccaccggcaaccucaucgccccccgcggcuacuucaagauccgcuccggcaaguccuccaucaugcgcuccgacgcccccaucggcaagugcaacuccgagugcaucacccccaacggcuccauccccaacgacaagcccuuccagaacgucaaccgcaucaccuacggcgccugcccccgcuacgucaagcagaacacccucaagcucgccaccggcaugcgcaacguccccgagaagcagacccgcggcaucuucggcgccaucgccggcuucaucgagaacggcugggagggcauggucgacggcugguacggcuuccgccaccagaacuccgagggcaccggccaggccgccgaccucaaguccacccaggccgccaucaaccagaucaacggcaagcucaaccgccucaucggcaagaccaacgagaaguuccaccagaucgagaaggaguucuccgaggucgagggccgcauccaggaccucgagaaguacgucgaggacaccaagaucgaccucugguccuacaacgccgagcuccucgucgcccucgagaaccagcacaccaucgaccucaccgacuccgagaugaacaagcucuucgagcgcaccaagaagcagcuccgcgagaacgccgaggacaugggcaacggcugcuucaagaucuaccacaagugcgacaacgccugcaucggcuccauccgcaacggcaccuacgaccacgacgucuaccgcgacgaggcccucaacaaccgcuuccagaucaagggcgucgagcucaaguccggcuacaaggacuggauccucuggaucuccuucgccaucuccugcuuccuccucugcgucgcccuccucggcuucaucaugugggccugccagaagggcaacauccgcugcaacaucugcaucuga

SEQ ID NO: 96154 - RNA, 1701 nt, Artificial Sequence
  derived and/or modified CDS sequence (opt2) from hemagglutinin__InfluenzaA__AAY18136
augaagaccaucaucgcccucuccuacauccucugccucgucuucgcccagaagcuccccggcaacgacaacuccaccgccacccucugccucggccaccacgccguccccaacggcaccaucgucaagaccaucaccaacgaccagaucgaggucaccaacgccaccgagcucguccaguccuccuccaccggcggcaucugcgacuccccccaccagauccucgacggcgagaacugcacccucaucgacgcccuccucggcgacccccagugcgacggcuuccagaacaagaagugggaccucuucgucgagcgcuccaaggccuacuccaacugcuaccccuacgacguccccgacuacgccucccuccgcucccucgucgccuccuccggcacccucgaguucaacaacgaguccuucgacuggaccggcgucacccagaacggcaccuccuccgccugcaagcgccgcuccaacaaguccuucuucucccgccucaacuggcucacccaccucaaguacaaguaccccgcccucaacgucaccaugcccaacaacgagaaguucgacaagcucuacaucuggggcguccaccaccccggcaccgacuccgaccagaucucccucuacgcccaggccuccggccgcaucaccgucuccaccaagcgcucccagcagaccgucauccccaacaucggcucccgcccccgcguccgcgacgucuccucccgcaucuccaucuacuggaccaucgucaagcccggcgacauccuccucaucaacuccaccggcaaccucaucgccccccgcggcuacuucaagauccgcuccggcaaguccuccaucaugcgcuccgacgcccccaucggcaagugcaacuccgagugcaucacccccaacggcuccauccccaacgacaagcccuuccagaacgucaaccgcaucaccuacggcgccugcccccgcuacaucaagcagaacacccucaagcucgccaccggcaugcgcaacguccccgagaagcagacccgcggcaucuucggcgccaucgccggcuucaucgagaacggcugggagggcauggucgacggcugguacggcuuccgccaccagaacuccgagggcaccggccaggccgccgaccucaaguccacccaggccgccaucaaccagaucaacggcaagcucaaccgccucaucggcaagaccaacgagaaguuccaccagaucgagaaggaguucuccgaggucgagggccgcauccaggaccucgagaaguacgucgaggacaccaagaucgaccucugguccuacaacgccgagcuccucgucgcccucgagaaccagcacaccaucgaccucaccgacuccgagaugaacaagcucuucgagcgcaccaagaagcagcuccgcgagaacgccgaggacaugggcaacggcugcuucaagaucuaccacaagugcgacaacgccugcaucggcuccauccgcaacggcaccuacgaccacgacgucuaccgcgacgaggcccucaacaaccgcuuccagaucaagggcgucgagcucaaguccggcuacaaggacuggauccucuggaucuccuucgccaucuccugcuuccuccucugcgucgcccuccucggcuucaucaugugggccugccagaagggcaacauccgcugcaacaucugcaucuga

SEQ ID NO: 96155 - RNA, 1701 nt, Artificial Sequence; identical to SEQ ID NO: 96108
  derived and/or modified CDS sequence (opt2) from hemagglutinin__InfluenzaA__AAY18156

SEQ ID NO: 96156 - RNA, 1701 nt, Artificial Sequence; identical to SEQ ID NO: 96108
  derived and/or modified CDS sequence (opt2) from hemagglutinin__InfluenzaA__AAY18176

SEQ ID NO: 96157 - RNA, 1701 nt, Artificial Sequence; identical to SEQ ID NO: 96108
  derived and/or modified CDS sequence (opt2) from hemagglutinin__InfluenzaA__AAY18186

SEQ ID NO: 96158 - RNA, 1701 nt, Artificial Sequence; identical to SEQ ID NO: 96109
  derived and/or modified CDS sequence (opt2) from hemagglutinin__InfluenzaA__AAY18564

SEQ ID NO: 96159 - RNA, 1701 nt, Artificial Sequence
  derived and/or modified CDS sequence (opt2) from hemagglutinin__InfluenzaA__AAY18585
augaagaccaucaucgcccucuccuacauccucugccucgucuucgcccagaagcuccccgagaacgacaacuccaccgccacccucugccucggccaccacgccguccccaacggcacccucgucaagaccaucaccaacgaccagaucgaggucaccaacgccaccgagcucguccaguccuccuccaccggccgcaucugcgacuccccccaccagauccucgacggcgagaacugcacccucaucgacgcccuccucggcgacccccacugcgacggcuuccagaacaaggagugggaccucuucgucgagcgcuccaaggccuacuccaacugcuaccccuacgacguccccgacuacgucucccuccgcucccucgucgccuccuccggcacccucgaguucaacaacgaguccuucaacuggaccggcgucgcccagaacggcaccuccuccgccugcaagcgccgcuccgacaaguccuucuucucccgccucaacuggcuccaccagcucaaguacaaguaccccgcccucaacgucaccaugcccaacaacgagaaguucgacaagcucuacaucuggggcguccaccaccccggcaccgacuccgaccagaucucccucuacgcccaggccuccggccgcgucaccgucuccaccaagcgcucccagcagaccgucauccccaacaucggcucccgccccuggguccgcggcgucuccucccgcaucuccaucuacuggaccaucgucaagcccggcgacauccuccucaucaacuccaccggcaaccucaucgccccccgcggcuacuucaagauccgcuccggcaaguccuccaucaugcgcuccgacgcccccaucggcaagugcaacuccgagugcaucacccccaacggcuccauccccaacgacaagcccuuccagaacgucaaccgcaucaccuacggccccugcccccgcuacgucaagcagaacacccucaagcucgccaccggcaugcgcaacguccccgagaagcagacccgcggcaucuucggcgccaucgccggcuucaucgagaacggcugggagggcaugauggacggcugguacggcuuccgccaccagaacuccgagggcaccggccaggccgccgaccucaaguccacccaggccgccaucaaccagaucaacggcaagcucaaccgccucaucgagaagaccaacgagaaguuccaccagaucgagaaggaguucuccgaggucgagggccgcauccaggaccucgagaaguacgucgaggacaccaagaucgaccucugguccuacaacgccgagcuccucgucgcccucgagaaccagcacaccaucgaccucaccgacuccgagaugaacaagcucuucgagcgcaccaagaagcagcuccgcgagaacgccgaggacaugggcaacggcugcuucaagaucuaccacaagugcgacaacgccugcaucggcuccauccgcaacggcaccuacgaccacgacgucuaccgcgacgaggcccucaacaaccgcuuccagaucaagggcgucgagcucaaguccggcuacaaggacuggauccucuggaucuccuucgccaucuccugcuuccuccucugcaucguccuccucggcuucaucaugugggccugccagaagggcaacauccgcugcaacaucugcaucuga

SEQ ID NO: 96160 - RNA, 1701 nt, Artificial Sequence; identical to SEQ ID NO: 96068
  derived and/or modified CDS sequence (opt2) from hemagglutinin__InfluenzaA__AAY18611

SEQ ID NO: 96161 - RNA, 1701 nt, Artificial Sequence; identical to SEQ ID NO: 96109
  derived and/or modified CDS sequence (opt2) from hemagglutinin__InfluenzaA__AAY27843

SEQ ID NO: 96162 - RNA, 1701 nt, Artificial Sequence; identical to SEQ ID NO: 96068
  derived and/or modified CDS sequence (opt2) from hemagglutinin__InfluenzaA__AAY27853

SEQ ID NO: 96163 - RNA, 1701 nt, Artificial Sequence
  derived and/or modified CDS sequence (opt2) from hemagglutinin__InfluenzaA__AAY27863
augaagaccaucaucgcccucuccuacauccucugccucgucuucgcccagaagcuccccggcaacgacaacuccaccgccacccucugccucggccaccacgccguccccaacggcaccaucgucaagaccaucaccaacgaccagaucgaggucaccaacgccaccgagcucguccaguccuccuccaccggcggcaucugcgacuccccccaccagaucaucgacggcgagaacugcacccucaucgacgcccuccucggcgacccccagugcgacggcuuccagaacaagaagugggaccucuucgucgagcgcuccaaggccuacuccaacugcuaccccuacgacguccccgacuacgccucccuccgcucccucgucgccuccuccggcacccucgaguucaacaacgaguccuucgacuggaccggcgucacccagaacggcaccuccuccgccugcaagcgccgcuccaacaaguccuucuucucccgccucaacuggcucacccaccucaaguacaaguaccccgcccucaacgucaccaugcccaacaacgagaaguucgacaagcucuacaucuggggcguccaccaccccggcaccgacuccgaccagaucucccucuacgcccaggccuccggccgcaucaccgucuccaccaagcgcucccagcagaccgucauccccaacaucggcucccgcccccgcguccgcgacgucuccucccgcaucuccaucuacuggaccaucgucaagcccggcgacauccuccucaucaacuccaccggcaaccucaucgccccccgcggcuacuucaagauccgcuccggcaaguccuccaucaugaucuccgacgcccccaucggcaagugcaacuccgagugcaucacccccaacggcuccauccccaacgacaagcccuuccagaacgucaaccgcaucaccuacggcgccugcccccgcuacgucaagcagaacacccucaagcucgccaccggcaugcgcaacguccccgagaagcagacccgcggcaucuucggcgccaucgccggcuucaucgagaacggcugggagggcauggucgacggcugguacggcuuccgccaccagaacuccgagggcaccggccaggccgccgaccucaaguccacccaggccgccaucaaccagaucaacggcaagcucaaccgccucaucggcaagaccaacgagaaguuccaccagaucgagaaggaguucuccgaggucgagggccgcauccaggaccucgagaaguacgucgaggacaccaagaucgaccucugguccuacaacgccgagcuccucgucgcccucgagaaccagcacaccaucgaccucaccgacuccgagaugaacaagcucuucgagcgcaccaagaagcagcuccgcgagaacgccgaggacaugggcaacggcugcuucaagaucuaccacaagugcgacaacgccugcaucggcuccauccgcaacggcaccuacgaccacgacgucuaccgcgacgaggcccucaacaaccgcuuccagaucaagggcgucgagcucaaguccggcuacaaggacuggauccucuggaucuccuucgccaucuccugcuuccuccucugcgucgcccuccucggcuucaucaugugggccugccagaagggcaacauccgcugcaacaucugcaucuga

SEQ ID NO: 96164 - RNA, 1701 nt, Artificial Sequence; identical to SEQ ID NO: 96087
  derived and/or modified CDS sequence (opt2) from hemagglutinin__InfluenzaA__AAY27959

SEQ ID NO: 96165 - RNA, 1701 nt, Artificial Sequence; identical to SEQ ID NO: 96067
  derived and/or modified CDS sequence (opt2) from hemagglutinin__InfluenzaA__AAY27994

SEQ ID NO: 96166 - RNA, 1701 nt, Artificial Sequence; identical to SEQ ID NO: 96067
  derived and/or modified CDS sequence (opt2) from hemagglutinin__InfluenzaA__AAY28004

SEQ ID NO: 96167 - RNA, 1701 nt, Artificial Sequence; identical to SEQ ID NO: 96067
  derived and/or modified CDS sequence (opt2) from hemagglutinin__InfluenzaA__AAY28265

SEQ ID NO: 96168 - RNA, 1701 nt, Artificial Sequence
  derived and/or modified CDS sequence (opt2) from hemagglutinin__InfluenzaA__AAY28275
augaagaccaucaucgcccucuccuacauccucugccucgucuucgcccagaagcuccccggcaacgacaacuccaccgccacccucugccucggccaccacgccguccccaacggcacccucgucaagaccaucaccaacgaccagaucgaggucaccaacgccaccgagcucguccaguccuccuccaccggccgcaucugcgacuccccccaccagauccucgacggcgagaacugcacccucaucgacgcccuccucggcgacccccacugcgacggcuuccagaacaaggagugggaccucuucgucgagcgcuccaaggccuacuccaacugcuaccccuacgacguccccgacuacgccucccuccgcucccucgucgccuccuccggcacccucgaguucaacaacgaguccuucaacuggaccggcgucgcccagaacggcaccuccuccgccugcaagcgccgcuccaacaaguccuucuucucccgccucaacuggcuccaccagcucaaguacaaguaccccgcccucaacgucaccaugcccaacaacgagaaguucgacaagcucuacaucuggggcguccaccaccccuccaccgacuccgaccagaucucccucuacgcccaggccuccggccgcgucaccgucuccaccaagcgcucccagcagaccgucauccccaacaucggcucccgccccuggguccgcggcgucuccucccgcaucuccaucuacuggaccaucgucaagcccggcgacauccuccucaucaacuccaccggcaaccucaucgccccccgcggcuacuucaagauccgcuccggcaaguccuccgucaugcgcuccgacgccuccaucggcaagugcaacuccgagugcaucacccccaacggcuccauccccaacgacaagcccuuccagaacgucaaccgcaucaccuacggcgccugcccccgcuacgucaagcagaacacccucaagcucgccaccggcaugcgcaacguccccgagaagcagacccgcggcaucuucggcgccaucgccggcuucaucgagaacggcugggagggcauggucgacggcugguacggcuuccgccaccagaacuccgagggcaccggccaggccgccgaccucaaguccacccaggccgccaucaaccagaucaacggcaagcucaaccgccucaucgagaagaccaacgagaaguuccaccagaucgagaaggaguucuccgaggucgagggccgcauccaggaccucgagaaguacgucgaggacaccaagaucgaccucugguccuacaacgccgagcuccucgucgcccucgagaaccagcacaccaucgaccucaccgacuccgagaugaacaagcucuucgagcgcaccaagaagcagcuccgcgagaacgccgaggacaugggcaacggcugcuucaagaucuaccacaagugcgacaacgccugcaucggcuccauccgcaacggcaccuacgaccacgacgucuaccgcgacgaggcccucaacaaccgcuuccagaucaagggcgucgagcucaaguccggcuacaaggacuggauccucuggaucuccuucgccaucuccugcuuccuccucugcgucguccuccucggcuucaucaugugggccugccagaagggcaacauccgcugcaacaucugcaucuga

SEQ ID NO: 96169 - RNA, 1701 nt, Artificial Sequence
  derived and/or modified CDS sequence (opt2) from hemagglutinin__InfluenzaA__AAY28285
augaagaccaucaucgcccucuccuacauccucugccucgucuucgcccagaagcuccccggcaacgacaacuccaccgccacccucugccucggccaccacgccguccccaacggcacccucgucaagaccaucaccaacgaccagaucgaggucaccaacgccaccgagcucguccagaacuccuccaccggccgcaucugcgacuccccccaccagauccucgacggcgagaacugcacccucaucgacgcccuccucggcgacccccacugcgacggcuuccagaacaaggagugggaccucuucgucgagcgcuccaaggccuacuccaacugcuaccccuacgacguccccgacuacgucucccuccgcucccucgucgccuccuccggcacccucgaguucaacaacgaguccuucaacuggaccggcgucgcccagaacggcaccuccuccgccugcaagcgccgcuccgacaaguccuucuucucccgccucaacuggcuccaccagcucaaguacaaguaccccgcccucaacgucaccaugcccaacaacgagaaguucgacaagcucuacaucuggggcguccaccaccccggcaccgacaacgaccagaucucccucuacgcccaggccuccggccgcgucaccgucuccaccaagcgcucccagcagaccgucauccccaacaucggcucccgccccuggguccgcggcgucuccucccgcaucuccaucuacuggaccaucgucaagcccggcgacauccuccucaucaacuccaccggcaaccucaucgccccccgcggcuacuucaagauccgcuccggcaaguccuccaucaugcgcuccgacgcccccaucggcaagugcaacuccgagugcaucacccccaacggcuccauccccaacgacaagcccuuccagaacgucaaccgcaucaccuacggccccugcccccgcuacgucaagcagaacacccucaagcucgccaccggcaugcgcaacguccccgagaagcagacccgcggcaucuucggcgccaucgccggcuucaucgagaacggcugggagggcaugauggacggcugguacggcuuccgccaccagaacuccgagggcaccggccaggccgccgaccucaaguccacccaggccgccaucaaccagaucaacggcaagcucaaccgccucaucgagaagaccaacgagaaguuccaccagaucgagaaggaguucuccgaggucgagggccgcauccaggaccucgagaaguacgucgaggacaccaagaucgaccucugguccuacaacgccgagcuccucgucgcccucgagaaccagcacaccaucgaccucaccgacuccgagaugaacaagcucuucgagcgcaccaagaagcagcuccgcgagaacgccgaggacaugggcaacggcugcuucaagaucuaccacaagugcgacaacgccugcaucggcuccauccgcaacggcaccuacgaccacgacgucuaccgcgacgaggcccucaacaaccgcuuccagaucaagggcgucgagcucaaguccggcuacaaggacuggauccucuggaucuccuucgccaucuccugcuuccuccucugcaucguccuccucggcuucaucaugugggccugccagaagggcaacauccgcugcaacaucugcaucuga

SEQ ID NO: 96170 - RNA, 1701 nt, Artificial Sequence
  derived and/or modified CDS sequence (opt2) from hemagglutinin__InfluenzaA__AAY28295
augaagaccaucaucgcccucuccuacauccucugccucgucuucgcccagaagcuccccggcaacgacaacuccaccgccacccucugccucggccaccacgccguccccaacggcaccaucgucaagaccaucaccaacgaccagaucgaggucaccaacgccaccgagcucguccaguccuccuccaccggcggcaucugcgacuccccccaccagauccucgacggcgagaacugcacccucaucgacgcccuccucggcgacccccagugcgacggcuuccagaacaagaagugggaccucuucgucgagcgcuccaaggccuacuccaacugcuaccccuacgacguccccgacuacgccucccuccgcucccucgucgccuccuccggcacccucgaguucaacaacgaguccuucgacuggaccggcgucacccagaacggcaccuccuccgccugcaagcgccgcuccaacaaguccuucuucucccgccucaacuggcucacccaccucaaguacaaguaccccgcccucaacgucaccaugcccaacaacgagaaguucgacaagcucuacaucuggggcguccaccaccccggcaccgacuccgaccagaucucccucuacgcccaggccuccggcaagaucaccgucuccaccaagcgcucccagcagaccgucauccccaacaucggcucccgcccccgcguccgcgacgucuccucccgcaucuccaucuacuggaccaucgucaagcccggcgacauccuccucaucaacuccaccggcaaccucaucgccccccgcggcuacuucaagauccaguccggcaaguccuccaucaugcgcuccgacgcccccaucggcaagugcaacuccgagugcaucacccccaacggcuccauccccaacgacaagcccuuccagaacgucaaccgcaucaccuacggcgccugcccccgcuacgucaagcagaagacccucaagcucgccaccggcaugcgcaacguccccgagaagcagacccgcggcaucuucggcgccaucgccggcuucaucgagaacggcugggagggcauggucgacggcugguacggcuuccgccaccagaacuccgagggcaccggccaggccgccgaccucaaguccacccaggccgccaucaaccagaucaacggcaagcucaaccgccucaucggcaagaccaacgagaaguuccaccagaucgagaaggaguucuccgaggucgagggccgcauccaggaccucgagaaguacgucgaggacaccaagaucgaccucugguccuacaacgccgagcuccucgucgcccucgagaaccagcacaccaucgaccucaccgacuccgagaugaacaagcucuucgagcgcaccaagaagcagcuccgcgagaacgccgaggacaugggcaacggcugcuucaagaucuaccacaagugcgacaacgccugcaucggcuccauccgcaacggcaccuacgaccacgacgucuaccgcgacgaggcccucaacaaccgcuuccagaucaagggcgucgagcucaaguccggcuacaaggacuggauccucuggaucuccuucgccaucuccugcuuccuccucugcgucgcccuccucggcuucaucaugugggccugccagaagggcaacauccgcugcaacaucugcaucuga

SEQ ID NO: 96171 - RNA, 1701 nt, Artificial Sequence
  derived and/or modified CDS sequence (opt2) from hemagglutinin__InfluenzaA__AAY28305
augaaggccaucaucgcccucuccuacauccucugccucgucuucgcccagaagcuccccggcaacgacaacuccaccgccacccucugccucggccaccacgccguccccaacggcacccucgucaagaccaucaccaacgaccagaucgaggucaccaacgccaccgagcucguccaguccuccuccaccggccgcaucugcgacuccccccaccagauccucgacggcgagaacugcacccucaucgacgcccuccucggcgacccccacugcgacggcuuccagaacaaggagugggaccucuucgucgagcgcuccaaggccuacuccaacugcuaccccuacgacguccccgacuacgucucccuccgcucccucgucgccuccuccggcacccucgaguucaacaacgaguccuucaacuggaccggcgucgcccagaacggcaccuccuccgccugcaagcgccgcuccgacaaguccuucuucucccgccucaacuggcuccaccagcucaaguacaaguaccccgcccucaacgucaccaugcccaacaacgagaaguucgacaagcucuacaucuggggcguccaccaccccggcaccgacuccgaccagaucucccucuacgcccaggccuccggccgcgucaccgucuccaccaagcgcucccagcagaccgucauccccaacaucggcuccggccccuggguccgcggcgucuccucccgcaucuccaucuacuggaccaucgucaagcccggcgacauccuccucaucaacuccaccggcaaccucaucgccccccgcggcuacuucaagauccgcuccggcaaguccuccaucaugcgcuccgacgcccccaucggcaagugcaacuccgagugcaucacccccaacggcuccauccccaacgacaagcccuuccagaacgucaaccgcaucaccuacggcgccugcccccgcuacgucaagcagaacacccucaagcucgccaccggcaugcgcaacguccccgagaagcagacccgcggcaucuucggcgccaucgccggcuucaucgagaacggcugggagggcaugauggacggcugguacggcuuccgccaccagaacuccgagggcaccggccaggccgccgaccucaaguccacccaggccgccaucaaccagaucaacggcaagcucaaccgccucaucgagaagaccaacgagaaguuccaccagaucgagaaggaguucuccgaggucgagggccgcauccaggaccucgagaaguacgucgaggacaccaagaucgaccucugguccuacaacgccgagcuccucgucgcccucgagaaccagcacaccaucgaccucaccgacuccgagaugaacaagcucuucgagcgcaccaagaagcagcuccgcgagaacgccgaggacaugggcaacggcugcuucaagaucuaccacaagugcgacaacgccugcaucggcuccauccgcaacggcaccuacgaccacgacgucuaccgcgacgaggcccucaacaaccgcuuccagaucaagggcgucgagcucaaguccggcuacaaggacuggauccucuggaucuccuucgccaucuccugcuuccuccucugcaucguccuccucggcuucaucaugugggccugccagaagggcaacauccgcugcaacaucugcaucuga

SEQ ID NO: 96172 - RNA, 1701 nt, Artificial Sequence
  derived and/or modified CDS sequence (opt2) from hemagglutinin__InfluenzaA__AAY28325
augaagaccaucaucgcccucuccuacauccucugccucgucuucgcccagaagcuccccggcaacgacaacuccaccgccacccucugccucggccaccacgccguccccaacggcacccucgucaagaccaucaccaacgaccagaucgaggucaccaacgccaccgagcucguccaguccuccuccaccucccgcaucugcgacuccccccaccagauccucgacggcgagaacugcacccucaucgacgcccuccucggcgacccccacugcgacggcuuccagaacaaggagugggaccucuucgucgagcgcuccaaggccuacuccaacugcuaccccuacgacguccccgacuacgucucccuccgcucccucgucgccuccuccggcacccucgaguucaacaacgaguccuucaacuggaccggcgucgcccagaacggcaccuccuccgccugcaagcgccgcuccgacaaguccuucuucucccgccucaacuggcuccaccagcucaaguacaaguaccccgcccucaacgucaccaugcccaacaacgagaaguucgacaagcucuacaucuggggcguccaccaccccggcaccgacuccgaccagaucucccucuacgcccaggccuccggccgcgucaucgucuccaccaagcgcucccagcagaccgucauccccaacaucggcuccggccccuggguccgcggcgucuccucccgcaucuccaucuacuggaccaucgucaagcccggcgacauccuccucaucaacuccaccggcaaccucaucgccccccgcggcuacuucaagauccgcuccggcaaguccuccaucaugcgcuccgacgcccccaucggcaagugcaacuccgagugcaucacccccaacggcuccauccccaacgacaagcccuuccagaacgucaaccgcaucaccuacggcgccugcccccgcuacgucaagcagaacacccucaagcucgccaccggcaugcgcaacguccccgagaagcagacccgcggcaucuucggcgccaucgccggcuucaucgagaacggcugggagggcaugauggacggcugguacggcuuccgccaccagaacuccgagggcaccggccaggccgccgaccucaaguccacccaggccgccaucaaccagaucaacggcaagcucaaccgccucaucgagaagaccaacgagaaguuccaccagaucgagaaggaguucgccgaggucgagggccgcauccaggaccucgagaaguacgucgaggacaccaagaucgaccucugguccuacaacgccgagcuccucgucgcccucgagaaccagcacaccaucgaccucaccgacuccgagaugaacaagcucuucgagcgcaccaagaagcagcuccgcgagaacgccgaggacaugggcaacggcugcuucaagaucuaccacaagugcgacaacgccugcaucggcuccauccgcaacggcaccuacgaccacgacgucuaccgcgacgaggcccucaacaaccgcuuccagaucaagggcgucgagcucaaguccggcuacaaggacuggauccucuggaucuccuucgccaucuccugcuuccuccucugcaucguccuccucggcuucaucaugugggccugccagaagggcaacauccgcugcaacaucugcaucuga

SEQ ID NO: 96173 - RNA, 1701 nt, Artificial Sequence
  derived and/or modified CDS sequence (opt2) from hemagglutinin__InfluenzaA__AAY28335
augaagaccaucaucgcccucuccuacauccucugccucgucuccgcccagaagcuccccggcaacgacaacuccaccgccacccucugccucggccaccacgccguccccaacggcacccucgucaagaccaucaccaacgaccagaucgaggucaccaacgccaccgagcucguccaguccuccuccaccucccgcaucugcgacuccccccaccagauccucgacggcgagaacugcacccucaucgacgcccuccucggcgacccccacugcgacggcuuccagaacaaggagugggaccucuucgucgagcgcuccaaggccuacuccaacugcuaccccuacgacguccccgacuacgucucccuccgcucccucgucgccuccuccggcacccucgaguucaacaacgaguccuucaacuggaccggcgucgcccagaacggcaccuccuccgccugcaagcgccgcuccgacaaguccuucuucucccgccucaacuggcuccaccagcucaaguacaaguaccccgcccucaacgucaccaugcccaacaacgagaaguucgacaagcucuacaucuggggcguccaccaccccggcaccgacuccgaccagaucucccucuacgcccaggccuccggccgcgucaccgucuccaccaagcgcucccagcagaccgucauccccaacaucggcucccgccccuggguccgcggcgucuccucccgcaucuccaucuacuggaccaucgucaagcccggcgacauccuccucaucaacuccaccggcaaccucaucgccccccgcggcuacuucaagauccgcuccggcaaguccuccaucaugcgcuccgacgcccccaucggcaagugcaacuccgagugcaucacccccaacggcuccauccccaacgacaagcccuuccagaacgucaaccgcaucaccuacggcgccugcccccgcuacgucaagcagaacacccucaagcucgccaccggcaugcgcaacguccccgagaagcagacccgcggcaucuucggcgccaucgccggcuucaucgagaacggcugggagggcaugauggacggcugguacggcuuccgccaccagaacuccgagggcaccggccaggccgccgaccucaaguccacccaggccgccaucaaccagaucaacggcaagcucaaccgccucaucgagaagaccaacgagaaguuccaccagaucgagaaggaguucuccgaggucgagggccgcauccaggaccucgagaaguacgucgaggacaccaaggucgaccucugguccuacaacgccgagcuccucgucgcccucgagaaccagcacaccaucgaccucaccgacuccgagaugaacaagcucuucgagcgcaccaagaagcagcuccgcgagaacgccgaggacaugggcaacggcugcuucaagaucuaccacaagugcgacaacgccugcaucggcuccauccgcaacggcaccuacgaccacgacgucuaccgcgacgaggcccucaacaaccgcuuccagaucaagggcgucgagcucaaguccggcuacaaggacuggauccucuggaucuccuucgccaucuccugcuuccuccucugcaucguccuccucggcuucaucaugugggccugccagaagggcaacauccgcugcaacaucugcaucuga

SEQ ID NO: 96174 - RNA, 1701 nt, Artificial Sequence; identical to SEQ ID NO: 96068
  derived and/or modified CDS sequence (opt2) from hemagglutinin__InfluenzaA__AAY28345

SEQ ID NO: 96175 - RNA, 1701 nt, Artificial Sequence; identical to SEQ ID NO: 96108
  derived and/or modified CDS sequence (opt2) from hemagglutinin__InfluenzaA__AAY28355

SEQ ID NO: 96176 - RNA, 1701 nt, Artificial Sequence
  derived and/or modified CDS sequence (opt2) from hemagglutinin__InfluenzaA__AAY28363
augaagaccaucaucgcccucuccuacauccucugcauggucuucgcccagaagcuccccgucaacgacaacuccaccgccacccucugccucggccaccacgccguccccaacggcacccucgucaagaccaucaccaacgaccacaucgaggucaccaacgccaccgagcucguccaguccuccuccaccggccgcaucugcgacuccccccaccagauccucgacggcgagaacugcacccucaucgacgcccuccucggcgacccccacugcgacggcuuccagaacaaggagugggaccucuucgucgagcgcuccaccgccuacuccaacugcuaccccuacgacguccccgacuacgccucccuccgcucccucgucgccuccuccggcacccucgaguucaacaacgaguccuucaacuggaccggcgucgcccagaacggcaccuccuccgccugcaagcgccgcuccaucaaguccuucuucucccgccucaacuggcuccaccagcucaaguacaaguaccccucccucaacgucaccaugcccaacaacgagaaguucgacaagcucuacaucuggggcguccaccaccccuccaccgacuccgaccagaucucccucuacgcccaggccuccggccgcgucaccgucuccaccaagcgcucccagcagaccgucauccccaacaucggcucccgccccuggguccgcggcgucuccucccgcaucuccaucuacuggaccaucgucaagcccggcgacauccuccucaucaacuccaccggcaaccucaucgccccccgcggcuacuucaagauccgcuccggcaaguccuccaucaugcgcuccaacgcccccaucggcaagugcaacuccgagugcaucacccccaacggcuccauccccaacgacaagcccuuccagaacgucaaccgcaucaccuacggcgccugcccccgcuacgucaagcagaacacccucaagcucgccaccggcaugcgcaacguccccgagaagcagacccgcggcaucuucggcgccaucgccggcuucaucgagaacggcugggagggcauggucgacggcugguacggcuuccgccaccagaacuccgagggcaccggccaggccgccgaccucaaguccacccaggccgccaucaaccagaucaacggcaagcucaaccgccucaucgagaagaccaacgagaaguuccaccagaucgagaaggaguucuccgaggucgagggccgcauccaggaccucgagaaguacgucgaggacaccaagaucgaccucugguccuacaacgccgagcuccucgucgcccucgagaaccagcacaccaucgaccucaccgacuccgagaugaacaagcucuucgagcgcacccgcaagcagcuccgcgagaacgccgaggacaugggcaacggcugcuucaagaucuaccacaagugcgacaacgccugcaucggcuccauccgcaacggcaccuacgaccacgacgucuaccgcgacgaggcccucaacaaccgcuuccagaucaagggcgucgagcucaaguccggcuacaaggacuggauccucuggaucuccuucgccaucuccugcuuccuccucugcgucguccuccucggcuucaucaugugggccugccagaagggcaacauccgcugcaacaucugcaucuga

SEQ ID NO: 96177 - RNA, 1701 nt, Artificial Sequence; identical to SEQ ID NO: 96108
  derived and/or modified CDS sequence (opt2) from hemagglutinin__InfluenzaA__AAY28375

SEQ ID NO: 96178 - RNA, 1701 nt, Artificial Sequence; identical to SEQ ID NO: 96068
  derived and/or modified CDS sequence (opt2) from hemagglutinin__InfluenzaA__AAY28385

SEQ ID NO: 96179 - RNA, 1701 nt, Artificial Sequence
  derived and/or modified CDS sequence (opt2) from hemagglutinin__InfluenzaA__AAY28395
augaagaccaucaucgcccucuccuacauccucugccucgucuucgcccagaagcuccccggcaacgacaacuccaccgccacccucugccucggccaccacgccguccccaacggcaccaucgucaagaccaucaccaacgaccagaucgaggucaccaacgccaccgagcucguccaguccuccuccaccggcggcaucugcgacuccccccaccagauccucgacggcgagaacugcacccucaucgacgcccuccucggcgacccccagugcgacggcuuccagaacaagaagugggaccucuucgucgagcgcuccaaggccuacuccaacugcuaccccuacgacguccccgacuacgccucccuccgcucccucgucgccuccuccggcacccucgaguucaacaacgaguccuucgacuggaccggcgucacccagaacggcaccuccuccgccugcaagcgccgcuccaacaaguccuucuucucccgccucaacuggcucacccaccucaaguacaaguaccccgcccucaacgucaccaugcccaacaacgagaaguucgacaagcucuacaucuggggcguccaccaccccggcaccgacuccgaccagaucaaccucuacgcccaggccuccggccgcaucaccgucuccaccaagcgcucccagcagaccgucauccccaacaucggcucccgcccccgcguccgcgacgucuccucccgcaucuccaucuacuggaccaucgucaagcccggcgacauccuccucaucaacuccaccggcaaccucaucgccccccgcggcuacuucaagauccgcuccggcaaguccuccaucaugcgcuccgacgcccccaucggcaagugcaacuccgagugcaucacccccaacggcuccauccccaacgacaagcccuuccagaacgucaaccgcaucaccuacggcgccugcccccgcuacaucaagcagaacacccucaagcucgccaccggcaugcgcaacguccccgagaagcagacccgcggcaucuucggcgccaucgccggcuucaucgagaacggcugggagggcauggucgacggcugguacggcuuccgccaccagaacuccgagggcaccggccaggccgccgaccucaaguccacccaggccgccaucaaccagaucaacggcaagcucaaccgccucaucggcaagaccaacgagaaguuccaccagaucgagaaggaguucuccgaggucgagggccgcauccaggaccucgagaaguacgucgaggacaccaagaucgaccucugguccuacaacgccgagcuccucgucgcccucgagaaccagcacaccaucgaccucaccgacuccgagaugaacaagcucuucgagcgcaccaagaagcagcuccgcgagaacgccgaggacaugggcaacggcugcuucaagaucuaccacaagugcgacaacgccugcaucggcuccauccgcaacggcaccuacgaccacgacgucuaccgcgacgaggcccucaacaaccgcuuccagaucaagggcgucgagcucaaguccggcuacaaggacuggauccucuggaucuccuucgccaucuccugcuuccuccucugcgucgcccuccucggcuucaucaugugggccugccagaagggcaacauccgcugcaacaucugcaucuga

SEQ ID NO: 96180 - RNA, 1701 nt, Artificial Sequence
  derived and/or modified CDS sequence (opt2) from hemagglutinin__InfluenzaA__AAY28405
augaagaccaucaucgcccucuccuacauccucugccucgucuucgcccagaagcuccccggcaacgacaacuccaccgccacccucugccucggccaccacgccguccccaacggcacccucgucaagaccaucaccaacgaccagaucgaggucaccaacgccaccgagcucguccagaucuccuccaccggccgcaucugcgacaacccccaccagauccucgacggcgagaacugcacccucaucgacgcccuccucggcgacccccacugcgacggcuuccagaacaaggagugggaccucuucgucgagcgcuccaaggccuacuccaacugcuaccccuacgacguccccgacuacgucucccuccgcucccucgucgccuccuccggcacccucgaguucaacaacgaguccuucaacuggaccggcgucgcccagaacggcaccuccuccgccugcaagcgccgcuccgacaaguccuucuucucccgccucaacuggcuccaccagcucaaguacaaguaccccgcccucaacgucaccaugcccaacaacgagaaguucgacaagcucuacaucuggggcguccaccaccccggcaccgacuccgaccagaucucccucuacgcccaggccuccggccgcgucaccgucuccaccaagcgcucccagcagaccgucauccccaacaucggcucccgccccuggguccgcggcgucuccucccgcaucuccaucuacuggaccaucgucaagcccggcgacauccuccucaucaacuccaccggcaaccucaucgccccccgcggcuacuucaagauccgcuccggcaaguccuccaucaugcgcuccgacgcccccaucggcaagugcaacuccgagugcaucacccccaacggcuccauccccaacgacaagcccuuccagaacgucaaccgcaucaccuacggccccugcccccgcuacgucaagcagaacacccucaagcucgccaccggcaugcgcaacguccccgagaagcagacccgcggcaucuucggcgccaucgccggcuucaucgagaacggcugggagggcaugauggacggcugguacggcuuccgccaccagaacuccgagggcaccggccaggccgccgaccucaaguccacccaggccgccaucaaccagaucaacggcaagcucaaccgccucaucgagaagaccaacgagaaguuccaccagaucgagaaggaguucuccgaggucgagggccgcauccaggaccucgagaaguacgucgaggacaccaagaucgaccucugguccuacaacgccgagcuccucgucgcccucgagaaccagcacaccaucgaccucaccgacuccgagaugaacaagcucuucgagcgcaccaagaagcagcuccgcgagaacgccgaggacaugggcaacggcugcuucaagaucuaccacaagugcgacaacgccugcaucggcuccauccgcaacggcaccuacgaccacgacgucuaccgcgacgaggcccucaacaaccgcuuccagaucaagggcgucgagcucaaguccggcuacaaggacuggauccucuggaucuccuucgccaucuccugcuuccuccucugcaucguccuccucggcuucaucaugugggccugccagaagggcaacauccgcugcaacaucugcgucuga

SEQ ID NO: 96181 - RNA, 1701 nt, Artificial Sequence; identical to SEQ ID NO: 96068
  derived and/or modified CDS sequence (opt2) from hemagglutinin__InfluenzaA__AAY28486

SEQ ID NO: 96182 - RNA, 1701 nt, Artificial Sequence; identical to SEQ ID NO: 96068
  derived and/or modified CDS sequence (opt2) from hemagglutinin__InfluenzaA__AAY28521

SEQ ID NO: 96183 - RNA, 1701 nt, Artificial Sequence; identical to SEQ ID NO: 96067
  derived and/or modified CDS sequence (opt2) from hemagglutinin__InfluenzaA__AAY28531

SEQ ID NO: 96184 - RNA, 1701 nt, Artificial Sequence; identical to SEQ ID NO: 96068
  derived and/or modified CDS sequence (opt2) from hemagglutinin__InfluenzaA__AAY28541

SEQ ID NO: 96185 - RNA, 1701 nt, Artificial Sequence
  derived and/or modified CDS sequence (opt2) from hemagglutinin__InfluenzaA__AAY28551
augaagaccaucaucgcccucuccuacauccucugccucgucuucgcccagaagcuccccgucaacgacaacuccaccgccacccucugccucggccaccacgccguccccaacggcacccucgucaagaccaucaccaacgaccacaucgaggucaccaacgccaccgagcucguccaguccuccuccaccggccgcaucugcgacuccccccaccagauccucgacggcgagaacugcacccucaucgacgcccuccucggcgacccccacugcgacggcuuccagaacaaggagugggaccucuucgucgagcgcuccaccgccuacuccaacugcuaccccuacgacguccccgacuacgccucccuccgcucccucgucgccuccuccggcacccucgaguucaacaacgaguccuucaacuggaccggcgucgcccagaacggcaccuccuccgccugcaagcgccgcuccaucaaguccuucuucucccgccucaacuggcuccaccagcucaaguacaaguaccccgcccucaacgucaccaugcccaacaacgagaaguucgacaagcucuacaucuggggcguccaccaccccuccaccgacuccgaccagaucucccucuacgcccaggccuccggccgcgucaccgucuccaccaagcgcucccagcagaccgucauccccaacaucggcuccggccccuggguccgcggcgucuccucccgcaucuccaucuacuggaccaucgucaagcccggcgacauccuccucaucaacuccaccggcaaccucaucgccccccgcggcuacuucaagauccgcuccggcaaguccuccaucaugcgcuccaacgcccccaucggcaagugcaacuccgagugcaucacccccaacggcuccauccccaacgacaagcccuuccagaacgucaaccgcaucaccuacggcgccugcccccgcuacgucaagcagaacacccucaagcucgccaccggcaugcgcaacguccccgagaagcagacccgcggcaucuucggcgccaucgccggcuucaucgagaacggcugggagggcauggucgacggcugguacggcuuccgccaccagaacuccgagggcaccggccaggccgccgaccucaaguccacccaggccgccaucaaccagaucaacggcaagcucaaccgccucaucgagaagaccaacgagaaguuccaccagaucgagaaggaguucuccgaggucgagggccgcauccaggaccucgagaaguacgucgaggacaccaagaucgaccucugguccuacaacgccgagcuccucgucgcccucgagaaccagcacaccaucgaccucaccgacuccgagaugaacaagcucuucgagcgcacccgcaagcagcuccgcgagaacgccgaggacaugggcaacggcugcuucaagaucuaccacaagugcgacaacgccugcaucggcuccauccgcaacggcaccuacgaccacgacgucuaccgcgacgaggcccucaacaaccgcuuccagaucaagggcgucgagcucaaguccggcuacaaggacuggauccucuggaucuccuucgccaucuccugcuuccuccucugcgucguccuccucggcuucaucaugugggccugccagaagggcaacauccgcugcaacaucugcaucuga

SEQ ID NO: 96186 - RNA, 1701 nt, Artificial Sequence; identical to SEQ ID NO: 96068
  derived and/or modified CDS sequence (opt2) from hemagglutinin__InfluenzaA__AAY28561

SEQ ID NO: 96187 - RNA, 1701 nt, Artificial Sequence; identical to SEQ ID NO: 96083
  derived and/or modified CDS sequence (opt2) from hemagglutinin__InfluenzaA__AAY28581

SEQ ID NO: 96188 - RNA, 1701 nt, Artificial Sequence
  derived and/or modified CDS sequence (opt2) from hemagglutinin__InfluenzaA__AAY28591
augaagaccaucaucgcccucuccuacauccucugccucgucuucgcccagaagcuccccgucaacgacaacuccaccgccacccucugccucggccaccacgccguccccaacggcacccucgucaagaccaucaccaacgaccacaucgaggucaccaacgccaccgagcucguccaguccuccuccaccggccgcaucugcgacuccccccaccagauccucgacggcgagaacugcacccucaucgacgcccuccucggcgacccccacugcgacggcuuccagaacaaggagugggaccucuucgucgagcgcuccaccgccuacuccaacugcuaccccuacgacguccccgacuacgccucccuccgcucccucgucgccuccuccggcacccucgaguucaacaacgaguccuucaacuggaccggcgucgcccagaacggcaccuccuccgccugcaagcgccgcuccaucaaguccuucuucucccgccucaacuggcuccaccagcucaaguacaaguaccccgcccucgacgucaccaugcccaacaacgagaaguucgacaagcucuacaucuggggcguccaccaccccuccaccgacuccgaccagaucucccucuacgcccaggccuccggccgcgucaccgucuccaccaagcgcucccagcagaccgucauccccaacaucggcucccgccccuggguccgcggcgucuccucccgcaucuccaucuacuggaccaucgucaagcccggcgacauccuccucaucaacuccaccggcaaccucaucgccccccgcggcuacuucaagauccgcuccggcaaguccuccaucaugcgcuccaacgcccccaucggcaagugcaacuccgagugcaucacccccaacggcuccauccccaacgacaagcccuuccagaacgucaaccgcaucaccuacggcgccugcccccgcuacgucaagcagaacacccucaagcucgccaccggcaugcgcaacguccccgagaagcagacccgcggcaucuucggcgccaucgccggcuucaucgagaacggcugggagggcauggucgacggcugguacggcuuccgccaccagaacuccgagggcaccggccaggccgccgaccucaaguccacccaggccgccaucaaccagaucaacggcaagcucaaccgccucaucgagaagaccaacgagaaguuccaccagaucgagaaggaguucuccgaggucgagggccgcauccaggaccucgagaaguacgucgaggacaccaagaucgaccucugguccuacaacgccgagcuccucgucgcccucgagaaccagcacaccaucgaccucaccgacuccgagaugaacaagcucuucgagcgcacccgcaagcagcuccgcgagaacgccgaggacaugggcaacggcugcuucaagaucuaccacaagugcgacaacgccugcaucggcuccauccgcaacggcaccuacgaccacgacgucuaccgcgacgaggcccucaacaaccgcuuccagaucaagggcgucgagcucaaguccggcuacaaggacuggauccucuggaucuccuucgccaucuccugcuuccuccucugcgucguccuccucggcuucaucaugugggccugccagaagggcaacauccgcugcaacaucugcaucuga

SEQ ID NO: 96189 - RNA, 1701 nt, Artificial Sequence; identical to SEQ ID NO: 96108
  derived and/or modified CDS sequence (opt2) from hemagglutinin__InfluenzaA__AAY28608

SEQ ID NO: 96190 - RNA, 1701 nt, Artificial Sequence
  derived and/or modified CDS sequence (opt2) from hemagglutinin__InfluenzaA__AAY28618
augaagaccaucaucgcccucuccuacauccucugccucgucuucgcccagaagcuccccggcaacgacaacuccaccgccacccucugccucggccaccacgccguccccaacggcaccaucgucaagaccaucaccaacgaccagaucgaggucaccaacgccaccgagcucguccaguccuccuccaccggcggcaucugcgacuccccccaccagauccucgacggcgagaacugcacccucaucgacgcccuccucggcgacccccagugcgacggcuuccagaacaagaagugggaccucuucgucgagcgcuccaaggccuacuccaacugcuaccccuacgacguccccgacuacgccucccuccgcucccucgucgccuccuccggcacccucgaguucaacaacgaguccuucaacuggaccggcgucacccagaacggcaccuccuccgccugcaagcgccgcuccaacaaguccuucuucucccgccucaacuggcucacccaccucaaguacaaguaccccgcccucaacgucaccaugcccaacaacgagaaguucgacaagcucuacaucuggggcguccaccaccccggcaccgacuccgaccagaucucccucuacgcccaggccuccggccgcaucaccgucuccaccaagcgcucccagcagaccgucauccccaacaucggcucccgcccccgcguccgcgacgucuccucccgcauguccaucuacuggaccaucgucaagcccggcgacauccuccucaucaacuccaccggcaaccucaucgccccccgcggcuacuucaagauccgcuccggcaaguccuccaucaugcgcuccgacgcccccaucggcaagugcaacuccgagugcaucacccccaacggcuccauccccaacgacaagcccuuccagaacgucaaccgcaucaccuacggcgccugcccccgcuacgucaagcagaacacccucaagcucgccaccggcaugcgcaacguccccgagaagcagacccgcggcaucuucggcgccaucgccggcuucaucgagaacggcugggagggcauggucgacggcugguacggcuuccgccaccagaacuccgagggcaccggccaggccgccgaccucaaguccacccaggccgccaucaaccagaucaacggcaagcucaaccgccucaucggcaagaccaacgagaaguuccaccagaucgagaaggaguucuccgaggucgagggccgcauccaggaccucgagaaguacgucgaggacaccaagaucgaccucugguccuacaacgccgagcuccucgucgcccucgagaaccagcacaccaucgaccucaccgacuccgagaugaacaagcucuucgagcgcaccaagaagcagcuccgcgagaacgccgaggacaugggcaacggcugcuucaagaucuaccacaagugcgacaacgccugcaucgaguccauccgcaacggcaccuacgaccacgacgucuaccgcgacgaggcccucaacaaccgcuuccagaucaagggcgucgagcucaaguccggcuacaaggacuggauccucuggaucuccuucgccaucuccugcuuccuccucugcgucgcccuccucggcuucaucaugugggccugccagaagggcaacauccgcugcaacaucugcaucuga

SEQ ID NO: 96191 - RNA, 1701 nt, Artificial Sequence; identical to SEQ ID NO: 96083
  derived and/or modified CDS sequence (opt2) from hemagglutinin__InfluenzaA__AAY28638

SEQ ID NO: 96192 - RNA, 1701 nt, Artificial Sequence
  derived and/or modified CDS sequence (opt2) from hemagglutinin__InfluenzaA__AAY28648
augaagaccaucaucgcccucuccuacauccucugccucgucuucgcccagaagcuccccggcaacgacaacuccaccgccacccucugccucggccaccacgccguccccaacggcacccucgucaagaccaucaccaacgaccagaucgaggucaccaacgccaccgagcucguccaguccuccuccaccggccgcaucugcgacuccccccaccagauccucgacggcgagaacugcacccucaucgacgcccuccucggcgacccccacugcgacggcuuccagaacaaggagugggaccucuucgucgagcgcuccaaggccuacuccaacugcuaccccuacgacguccccgacuacgucucccuccgcucccucgucgccuccuccggcacccucgaguucaacaacgaguccuucaacuggaccggcgucgcccagaacggcaccuccuccgccugcaagcgccgcuccgacaaguccuucuucucccgccucaacuggcuccaccagcucaaguacaaguaccccgcccucaacgucaccaugcccaacaacgagaaguucgacaagcucuacaucuggggcguccaccaccccggcaccgacuccgaccagaucucccucuacgcccaggccuccggccgcgucaccgucuccaccaagcgcucccagcagaccgucauccccaacaucggcuccggccccuggguccgcggcgucuccucccgcaucuccaucuacuggaccaucgucaagcccggcgacauccuccucaucaacuccaccggcaaccucaucgccccccgcggcuacuucaagauccgcuccggcaaguccuccaucaugcgcuccgacgcccccaucggcaagugcaacuccgagugcaucacccccaacggcuccauccccaacgacaagcccuuccagaacgucaaccgcaucaccuacggcgccugcccccgcuacgucaagcagaacacccucaagcucgccaccggcaugcgcaacguccccgagaagcagacccgcggcaucuucggcgccaucgccggcuucaucgagaacggcugggagggcaugauggacggcugguacggcuuccgccaccagaacuccgagggcaccggccaggccgccgaccucaaguccacccaggccgccaucaaccagaucaacggcaagcucaaccgccucaucgagaagaccaacgagaaguuccaccagaucgagaaggaguucuccgaggucgagggccgcauccaggaccucgagaaguacgucgaggacaccaagaucgaccucugguccuacaacgccgagcuccucgucgcccucgagaaccagcacaccaucgaccucaccgacuccgagaugaacaagcucuucgagcgcaccaagaagcagcuccgcgagaacgccgaggacaugggcaacggcugcuucaagaucuaccacaagugcgacaacgccugcaucggcuccauccgcaacggcaccuacgaccacgacgucuaccgcgacgaggcccucaacaaccgcuuccagaucaagggcgucgagcucaaguccggcuacaaggacuggauccucuggaucuccuucgccaucuccugcuuccuccucugcaucguccuccucggcuucaucaugugggccugccagaagggcaacauccgcugcaacaucugcaucuga

SEQ ID NO: 96193 - RNA, 1701 nt, Artificial Sequence
  derived and/or modified CDS sequence (opt2) from hemagglutinin__InfluenzaA__AAY44610
augaagaccaucaucgcccucuccuacauccucugccucgucuucgcccagaagcuccccggcaacgacaacuccaccgccacccucugccucggccaccacgccguccccaacggcaccaucgucaagaccaucaccaacgaccagaucgaggucaccaacgccaccgagcucguccaguccuccuccaccggcggcaucugcgacuccccccaccagauccucgacggcgagaacugcacccucaucgacgcccuccucggcgacccccagugcgacggcuuccagaacaagaagugggaccucuucgucgagcgcaacaaggccuacuccaacugcuaccccuacgacguccccgacuacgccucccuccgcucccucgucgccuccuccggcacccucgaguucaacaacgaguccuucgacuggaccggcgucacccagaacggcaccuccuccgccugcaagcgccgcuccaacaaguccuucuucucccgccucaacuggcucacccaccucaaguacaaguaccccgcccucaacgucaccaugcccaacaacgagaaguucgacaagcucuacaucuggggcguccaccaccccggcaccgacuccgaccagaucucccucuacgcccaggccuccggccgcaucaccgucuccaccaagcgcucccagcagaccgucauccccaacaucggcucccgcccccgcguccgcgacgucuccucccgcaucuccaucuacuggaccaucgucaagcccggcgacauccuccucaucaacuccaccggcaaccucaucgccccccgcggcuacuucaagauccgcuccggcaaguccuccaucaugcgcuccgacgcccccaucggcaagugcaacuccgagugcaucacccccaacggcuccauccccaacgacaagcccuuccagaacgucaaccgcaucaccuacggcgccugcccccgcuacgucaagcagaacacccucaagcucgccaccggcaugcgcaacguccccgagaagcagacccgcggcaucuucggcgccaucgccggcuucaucgagaacggcugggagggcauggucgacggcugguacggcuuccgccaccagaacuccgagggcaccggccaggccgccgaccucaaguccacccaggccgccaucaaccagaucaacggcaagcucaaccgccucaucggcaagaccaacgagaaguuccaccagaucgagaaggaguucuccgaggucgagggccgcauccaggaccucgagaaguacgucgaggacaccaagaucgaccucugguccuacaacgccgagcuccucgucgcccucgagaaccagcacaccaucgaccucaccgacuccgagaugaacaagcucuucgagcgcaccaagaagcagcuccgcgagaacgccgaggacaugggcaacggcugcuucaagaucuaccacaagugcgacaacgccugcaucggcuccauccgcaacggcaccuacgaccacgacgucuaccgcgacgaggcccucaacaaccgcuuccagaucaagggcgucgagcucaaguccggcuacaaggacuggauccucuggaucuccuucgccaucuccugcuuccuccucugcgucgcccuccucggcuucaucaugugggccugccagaagggcaacauccgcugcaacaucugcaucuga

SEQ ID NO: 96194 - RNA, 1701 nt, Artificial Sequence
  derived and/or modified CDS sequence (opt2) from hemagglutinin__InfluenzaA__AAY44620
augaagaccaucaucgcccucuccuacauccucugccucgucuucgcccagaagcuccccggcaacgacaacuccaccgccacccucugccucggccaccacgccguccccaacggcacccucgucaagaccaucaccaacgaccagaucgaggucaccaacgccaccgagcucguccaguccuccuccaccggccgcaucugcgacuccccccaccagauccucgacggcgagaacugcacccucaucgacgcccuccucggcgacccccacugcgacggcuuccagaacaaggagugggaccucuucgucgagcgcuccaaggccuacuccaacugcuaccccuacgacguccccgacuacgucucccuccgcucccucgucgccuccuccggcacccucgaguucaacaacgaguccuucaacuggaccggcgucgcccagaacggcaccuccuccgccugcaagcgccgcuccgacaaguccuucuucucccgccucaacuggcuccaccagcucaaguacaaguaccccgcccucaacgucaccaugcccaacaacgagaaguucgacaagcucuacaucuggggcguccaccaccccggcaccgacuccgaccagaucucccucuacgcccaggccuccggccgcgucaccgucuccaccaagcgcucccagcagaccgucauccccaacaucggcucccgccccuggguccgcggcgucuccucccgcaucuccaucuacuggaccaucgucaagcccggcgacauccuccucaucaacuccaccggcaaccucaucgccccccgcggcuacuucaagauccgcuccggcaaguccuccaucaugcgcuccgacgcccccaucggcaagugcaacuccgagugcaucacccccaacggcuccauccccaacgacaagcccuuccagaacgucaaccgcaucaccuacggccccugcccccgcuacgucaagcagaacacccucaagcucgccaccggcaugcgcaacguccccgagaagcagacccgcggcaucuucggcgccaucgccggcuucaucgagaacggcugggagggcaugauggacggcugguacggcuuccgccaccagaacuccgagggcaccggccaggccgccgaccucaaguccacccaggccgccaucaaccagaucaacgagaagcucaaccgccucaucgagaagaccaacgagaaguuccaccagaucgagaaggaguucuccgaggucgagggccgcauccaggaccucgagaaguacgucgaggacaccaagaucgaccucugguccuacaacgccgagcuccucgucgcccucgagaaccagcacaccaucgaccucaccgacuccgagaugaacaagcucuucgagcgcaccaagaagcagcuccgcgagaacgccgaggacaugggcaacggcugcuucaagaucuaccacaagugcgacaacgccugcaucggcuccauccgcaacggcaccuacgaccacgacgucuaccgcgacgaggcccucaacaaccgcuuccagaucaagggcgucgagcucaaguccggcuacaaggacuggauccucuggaucuccuucgccaucuccugcuuccuccucugcaucguccuccucggcuucaucaugugggccugccagaagggcaacauccgcugcaacaucugcaucuga

SEQ ID NO: 96195 - RNA, 1701 nt, Artificial Sequence; identical to SEQ ID NO: 96116
  derived and/or modified CDS sequence (opt2) from hemagglutinin__InfluenzaA__AAY44621

SEQ ID NO: 96196 - RNA, 1701 nt, Artificial Sequence; identical to SEQ ID NO: 96083
  derived and/or modified CDS sequence (opt2) from hemagglutinin__InfluenzaA__AAY44631

SEQ ID NO: 96197 - RNA, 1701 nt, Artificial Sequence
  derived and/or modified CDS sequence (opt2) from hemagglutinin__InfluenzaA__AAY44641
augaagaccaucaucgcccucuccuacauccucugccucgucuucgcccagaagcuccccggcaacgacaacuccaccgccacccucugccucggccaccacgccguccccaacggcacccucgucaagaccaucaccaacgaccagaucgaggucaccaacgccaccgagcucguccaguccuccuccaccggccgcaucugcgacuccccccaccagauccucgacggcgagaacugcacccucaucgacgcccuccucggcgacccccacugcgacggcuuccagaacaaggagugggaccucuucgucgagcgcuccaaggccuacuccaacugcuaccccuacgacguccccgacuacgucucccuccgcucccucgucgccuccuccggcacccucgaguucaacaacgaguccuucaacuggaccggcgucgcccagaacggcaccuccuccgccugcaagcgccgcuccgacaaguccuucuucucccgccucaacuggcuccaccagcucaaguacaaguaccccgcccucaacgucaccaugcccaacaacgagaaguucgacaagcucuacaucuggggcguccaccaccccggcaccgacuccgaccagaucucccucuacgcccaggccuccggccgcgucaccgucuccaccaagcgcucccagcagaccgucauccccaacaucggcucccgccccuggguccgcggcgucuccucccgcaucuccaucuacuggaccaucgucaagcccggcgacauccuccucaucaacuccaccggcaaccucaucgccccccgcggcuacuucaagauccgcuccggcaaguccuccaucaugcgcuccgacgcccccaucggcaagugcaacuccgagugcaucacccccaacggcuccauccccaacgacaagcccuuccagaacgucaaccgcaucaccuacggccccugcccccgcuacgucaagcagaacacccucaagcucgccaccggcaugcgcaacguccccgagaagcagacccgcggcaucuucggcgccaucgccggcuucaucgagaacggcugggagggcaugauggacggcugguacggcuuccgccaccagaacuccgagggcaccggccaggccgccgaccucaaguccacccaggccgccaucaaccagaucaacggcaagcucaaccgccucaucgagaagaccaacgagaaguuccaccagaucgagaaggaguucuccgaggucgagggccgcauccaggaccucgagaaguacgucgaggacaccaagaucgaccucugguccuacaacgccgagcuccucgucgcccucgagaaccagcacaccaucgaccucaccgacuccgagaugaacaagcucuucgagcgcaccaagaagcagcuccgcgagaacgccgaggacaugggcaacggcugcuucaagaucuaccacaagugcgacaacgccugcaucggcuccauccgcaacggcaccuacgaccacgacgucuaccgcgacgaggcccucaacaaccgcuuccagaucaagggcgucgagcucaaguccggcuacaaggacuggauccucuggaucuccuucgccaucuccugcuuccuccucugcaucggccuccucggcuucaucaugugggccugccagaagggcaacauccgcugcaacaucugcaucuga

SEQ ID NO: 96198 - RNA, 1701 nt, Artificial Sequence
  derived and/or modified CDS sequence (opt2) from hemagglutinin__InfluenzaA__AAY44651
augaagaccaucaucgcccucuccuacauccucugccucgucuucgcccagaagcuccccgucaacgacaacuccaccgccacccucugccucggccaccacgccguccccaacggcacccucgucaagaccaucaccaacgaccacaucgaggucaccaacgccaccgagcucguccaguccuccuccaccggccgcaucugcgacuccccccaccagauccucgacggcgagaacugcacccucaucgacgcccuccucggcgacccccacugcgacggcuuccagaacaaggagugggaccucuucgucgagcgcuccaccgccuacuccaacugcuaccccuacgacguccccgacuacgccucccuccgcucccucgucgccuccuccggcacccucgaguucaacaacgaguccuucaacuggaccggcgucgcccagaacggcaccuccuccgccugcaagcgccgcuccaucaaguccuucuucucccgccucaacuggcuccaccagcucaaguacaaguaccccgcccucaacgucaccaugcccaacaacgagaaguucgacaagcucuacaucuggggcguccaccaccccuccaccgacuccgaccagaucucccucuacgcccaggccuccggccgcgucaccgucuccaccaagcgcucccagcagaccgucauccccaacaucggcucccgccccugggagcgcggcgucuccucccgcaucuccaucuacuggaccaucgucaagcccggcgacauccuccucaucaacuccaccggcaaccucaucgccccccgcggcuacuucaagauccgcuccggcaaguccuccaucaugcgcuccaacgcccccaucggcaagugcaacuccgagugcaucacccccaacggcuccauccccaacgacaagcccuuccagaacgucaaccgcaucaccuacggcgccugcccccgcuacgucaagcagaacacccucaagcucgccaccggcaugcgcaacguccccgagaagcagacccgcggcaucuucggcgccaucgccggcuucaucgagaacggcugggagggcauggucgacggcugguacggcuuccgccaccagaacuccgagggcaccggccaggccgccgaccucaaguccacccaggccgccaucaaccagaucaacggcaagcucaaccgccucaucgagaagaccaacgagaaguuccaccagaucgagaaggaguucuccgaggucgagggccgcauccaggaccucgagaaguacgucgaggacaccaagaucgaccucugguccuacaacgccgagcuccucgucgcccucgagaaccagcacaccaucgaccucaccgacuccgagaugaacaagcucuucgagcgcacccgcaagcagcucaaggagaacgccgaggacaugggcaacggcugcuucaagaucuaccacaagugcgacaacgccugcaucggcuccauccgcaacggcaccuacgaccacgacgucuaccgcgacgaggcccucaacaaccgcuuccagaucaagggcgucgagcucaaguccggcuacaaggacuggauccucuggaucuccuucgccaucuccugcuuccuccucugcgucguccuccucggcuucaucaugugggccugccagaagggcaacauccgcugcaacaucugcaucuga

SEQ ID NO: 96199 - RNA, 1701 nt, Artificial Sequence
  derived and/or modified CDS sequence (opt2) from hemagglutinin__InfluenzaA__AAY44755
augaagaccaucaucgcccucuccuacauccucugccucgucuucgcccagaagcuccccggcaacgacaacuccaccgccacccucugccucggccaccacgccguccccaacggcacccucgucaagaccaucaccaacgaccagaucgaggucaccaacgccaccgagcucguccaguccuccuccaccggccgcaucugcgacuccccccaccagauccucgacggcgagaacugcacccucaucgacgcccuccucggcgacccccacugcgacggcuuccagaacaaggagugggaccucuucgucgagcgcuccaaggccuacuccaacugcuaccccuacgacguccccgacuacgccucccuccgcucccucgucgccuccuccggcacccucgaguucaacaacgaguccuucaacuggaccggcgucgcccagaacggcaccuccuccgccugcaagcgccgcuccaacaaguccuucuucucccgccucaacuggcuccaccagcucaaguacaaguaccccgcccucaacgucaccaugcccaacaacgagaaguucgacaagcucuacaucuggggcguccaccaccccuccaccgacuccgaccagaucucccucuacgcccaggccuccggccgcgucaccgucuccaccaagcgcggccagcagaccgucauccccaacaucggcucccgccccuggguccgcggcgucuccuccaucaucuccaucuacuggaccaucgucaagcccggcgacauccuccucaucaacuccaccggcaaccucaucgccccccgcggcuacuucaagauccgcuccggcaaguccuccgucaugcgcuccgacgccuccaucggcaagugcaacuccgagugcaucacccccaacggcuccauccccaacgacaagcccuuccagaacgucaaccgcaucaccuacggcgccugcccccgcuacgucaagcagaacacccucaagcucgccaccggcaugcgcaacguccccgagaagcagacccgcggcaucuucggcgccaucgccggcuucaucgagaacggcugggagggcauggucgacggcugguacggcuuccgccaccagaacuccgagggcaccggccaggccgccgaccucaaguccacccaggccgccaucaaccagaucaacggcaagcucaaccgccucaucgagaagaccaacgagaaguuccaccagaucgagaaggaguucuccgaggucgagggccgcauccaggaccucgagaaguacgucgaggacaccaagaucgaccucugguccuacaacgccgagcuccucgucgcccucgagaaccagcacaccaucgaccucaccgacuccgagaugaacaagcucuucgagcgcaccaagaagcagcuccgcgagaacgccgaggacaugggcaacggcugcuucaagaucuaccacaagugcgacaacgccugcaucggcuccauccgcaacggcaccuacgaccacgacgucuaccgcgacgaggcccucaacaaccgcuuccagaucaagggcgucgagcucaaguccggcuacaaggacuggauccucuggaucuccuucgccaucuccugcuuccuccucugcgucguccuccucggcuucaucaugugggccugccagaagggcaacauccgcugcaacaucugcaucuga

SEQ ID NO: 96200 - RNA, 1701 nt, Artificial Sequence
  derived and/or modified CDS sequence (opt2) from hemagglutinin__InfluenzaA__AAY44775
augaagaccaucaucgcccucuccuacauccucugccucgucuucgcccagaagcuccccgucaacgacaacuccaccgccacccucugccucggccaccacgccguccccaacggcacccucgucaagaccaucaccaacgaccacaucgaggucaccaacgccaccgagcucguccaguccuccuccaccggccgcaucugcgacuccccccaccagauccucgacggcgagaacugcacccucaucgacgcccuccucggcgacccccacugcgacggcuuccaggacaaggagugggaccucuucgucgagcgcuccaccgccuacuccaacugcuaccccuacgacguccccgacuacgccucccuccgcucccucgucgccuccuccggcacccucgaguucaacaacgaguccuucaacuggaccggcgucgcccagaacggcaccuccuccgccugcaagcgccgcuccaucaaguccuucuucucccgccucaacuggcuccaccagcucaaguacaaguaccccgcccucaacgucaccaugcccaacaacgagaaguucgacaagcucuacaucuggggcguccaccaccccuccaccgacuccgaccagaucucccucuacgcccaggccuccggccgcgucaccgucuccaccaagcgcucccagcagaccgucauccccaacaucggcucccgccccuggguccgcggcgucuccucccgcaucuccaucuacuggaccaucgucaagcccggcgacauccuccucaucaacuccaccggcaaccucaucgccccccgcggcuacuucaagauccgcuccggcaaguccuccaucaugcgcuccaacgcccccaucggcaagugcaacuccgagugcaucacccccaacggcuccauccccaacgacaagcccuuccagaacgucaaccgcaucaccuacggcgccugcccccgcuacgucaagcagaccacccucaagcucgccaccggcaugcgcaacguccccgagaagcagacccgcggcaucuucggcgccaucgccggcuucaucgagaacggcugggagggcauggucgacggcugguacggcuuccgccaccagaacuccgagggcaccggccaggccgccgaccucaaguccacccaggccgccaucaaccagaucaacggcaagcucaaccgccucaucgagaagaccaacgagaaguuccaccagaucgagaaggaguucuccgaggucgagggccgcauccaggaccucgagaaguacgucgaggacaccaagaucgaccucugguccuacaacgccgagcuccucgucgcccucgagaaccagcacaccaucgaccucaccgacuccgagaugaacaagcucuucgagcgcacccgcaagcagcuccgcgagaacgccgaggacaugggcaacggcugcuucaagaucuaccacaagugcgacaacgccugcaucggcuccauccgcaacggcaccuacgaccacgacgucuaccgcgacgaggcccucaacaaccgcuuccagaucaagggcgucgagcucaaguccggcuacaaggacuggauccucuggaucuccuucgccaucuccugcuuccuccucugcgucguccuccucggcuucaucaugugggccugccagaagggcaacauccgcugcaacaucugcaucuga

SEQ ID NO: 96201 - RNA, 1701 nt, Artificial Sequence; identical to SEQ ID NO: 96108
  derived and/or modified CDS sequence (opt2) from hemagglutinin__InfluenzaA__AAY44785

SEQ ID NO: 96202 - RNA, 1701 nt, Artificial Sequence
  derived and/or modified CDS sequence (opt2) from hemagglutinin__InfluenzaA__AAY44795
augaagaccaucaucgcccucuccuacauccucugccucgucuucgcccagaagcuccccgucaacgacaacuccaccgccacccucugccucggccaccacgccguccccaacggcacccucgucaagaccaucaccaacgaccacaucgaggucaccaacgccaccgagcucguccaguccuccuccaccggccgcaucugcgacuccacccaccagauccucgacggcgagaacugcacccucaucgacgcccuccucggcgacccccacugcgacggcuuccagaacaaggagugggaccucuucgucgagcgcuccaccgccuacuccaacugcuaccccuacgacguccccgacuacgccucccuccgcucccucgucgccuccuccggcacccucgaguucaacaacgaguccuucaacuggaccggcgucgcccagaacggcaccuccuccgccugcaagcgccgcuccaucaaguccuucuucucccgccucaacuggcuccaccagcucaaguacaaguaccccgcccucaacgucaccaugcccaacaacgagaaguucgacaagcucuacaucuggggcguccaccaccccuccaccgacuccgaccagaucucccucuacgcccaggccuccggccgcgucaccgucuccaccaagcgcucccagcagaccgucauccccaacaucggcucccgccccuggguccgcggcgucuccucccgcaucuccaucuacuggaccaucgucaagcccggcgacauccuccucaucaacuccaccggcaaccucaucgccccccgcggcuacuucaagauccgcuccggcaaguccuccaucaugcgcuccaacgcccccaucggcaagugcaacuccgagugcaucacccccaacggcuccauccccaacgacaagcccuuccagaacgucaaccgcaucaccuacggcgccugcccccgcuacgucaagcagaacacccucaagcucgccaccggcaugcgcaacguccccgagaagcagacccgcggcaucuucggcgccaucgccggcuucaucgagaacggcugggagggcauggucgacggcugguacggcuuccgccaccagaacuccgagggcaccggccaggccgccgaccucaaguccacccaggccgccaucaaccagaucaacggcaagcucaaccgccucaucgagaagaccaacgagaaguuccaccagaucgagaaggaguucuccgaggucgagggccgcauccaggaccucgagaaguacgucgaggacaccaagaucgaccucugguccuacaacgccgagcuccucgucgcccucgagaaccagcacaccaucgaccucaccgacuccgagaugaacaagcucuucgagcgcacccgcaagcagcuccgcgagaacgccgaggacaugggcaacggcugcuucaagaucuaccacaagugcgacaacgccugcaucggcuccauccgcaacggcaccuacgaccacgacgucuaccgcgacgaggcccucaacaaccgcuuccagaucaagggcgucgagcucaaguccggcuacaaggacuggauccucuggaucuccuucgccaucuccugcuuccuccucugcgucguccuccucggcuucaucaugugggccugccagaagggcaacauccgcugcaacaucugcaucuga

SEQ ID NO: 96203 - RNA, 1701 nt, Artificial Sequence
  derived and/or modified CDS sequence (opt2) from hemagglutinin__InfluenzaA__AAY44796
augaagaccaucaucgcccucuccuacacccucugccucgucuucgcccagaagcuccccggcaacgacaacuccaccgccacccucugccucggccaccacgccguccccaacggcaccaucgucaagaccaucaccaacgaccagaucgaggucaccaacgccaccgagcucguccaguccuccuccaccggcggcaucugcgacuccccccaccagauccucgacggcgagaacugcacccucaucgacgcccuccucggcgacccccagugcgacggcuuccagaacaagaagugggaccucuucgucgagcgcuccaaggccuacuccaacugcuaccccuacgacguccccgacuacgccucccuccgcucccucgucgccuccuccggcacccucgaguucaacaacgaguccuucgacuggaccggcgucacccagaacggcaccuccuccgccugcaagcgccgcuccaacaaguccuucuucucccgccucaacuggcucacccaccucaaguacaaguaccccgcccucaacgucaccaugcccaacaacgagaaguucgacaagcucuacaucuggggcguccaccaccccggcaccgacuccgaccagaucucccucuacgcccaggccuccggccgcaucaccgucuccaccaagcgcucccagcagaccgucauccccaacaucggcucccgcccccgcguccgcgacgucuccucccgcaucuccaucuacuggaccaucgucaagcccggcgacauccuccucaucaacuccaccggcaaccucaucgccccccgcggcuacuucaagauccgcuccggcaaguccuccaucaugcgcuccgacgcccccaucggcaagugcaacuccgagugcaucacccccaacggcuccauccccaacgacaagcccuuccagaacgucaaccgcaucaccuacggcgccugcccccgcuacaucaagcagaacacccucaagcucgccaccggcaugcgcaacguccccgagaagcagacccgcggcaucuucggcgccaucgccggcuucaucgagaacggcugggagggcauggucgacggcugguacggcuuccgccaccagaacuccgagggcaccggccaggccgccgaccucaaguccacccaggccgccaucaaccagaucaacggcaagcucaaccgccucaucggcaagaccaacgagaaguuccaccagaucgagaaggaguucuccgaggucgagggccgcauccaggaccucgagaaguacgucgaggacaccaagaucgaccucugguccuacaacgccgagcuccucgucgcccucgagaaccagcacaccaucgaccucaccgacuccgagaugaacaagcucuucgagcgcaccaagaagcagcuccgcgagaacgccgaggacaugggcaacggcugcuucaagaucuaccacaagugcgacaacgccugcaucggcuccauccgcaacggcaccuacgaccacgacgucuaccgcgacgaggcccucaacaaccgcuuccagaucaagggcgucgagcucaaguccggcuacaaggacuggauccucuggaucuccuucgccaucuccugcuuccuccucugcgucgcccuccucggcuucaucaugugggccugccagaagggcaacauccgcugcaacaucugcaucuga

SEQ ID NO: 96204 - RNA, 1701 nt, Artificial Sequence; identical to SEQ ID NO: 96083
  derived and/or modified CDS sequence (opt2) from hemagglutinin__InfluenzaA__AAY44896

SEQ ID NO: 96205 - RNA, 1701 nt, Artificial Sequence
  derived and/or modified CDS sequence (opt2) from hemagglutinin__InfluenzaA__AAY44906
augaagaccaucaucgcccucuccuacauccucugccucgucuucgcccagaagcuccccggcaacgacaacuccaccgccacccucugccucggccaccacgccguccccaacggcaccaucgucaagaccaucaccaacgaccagaucgaggucaccaacgccaccgagcucguccaguccuccuccaccggcggcaucugcgacuccccccaccagauccucgacggcgagaacugcacccucaucgacgcccuccucggcgacccccagugcgacggcuuccagaacaagaagugggaccucuucgucgagcgcuccaaggccuacuccaacugcuaccccuacgacguccccgacuacgccucccuccgcucccucgucgccuccuccggcacccucgaguucaacaacgaguccuucgacuggaccggcgucacccagaacggcaccuccuccgccugcaagcgccgcuccaacaaguccuucuucucccgccucaacuggcucacccaccucaaguacaaguaccccgcccucaacgucaccaugcccaacaacgagaaguucgacaagcucuacaucuggggcguccaccaccccggcaccgacuccgaccagaucucccucuacgcccaggccuccggccgcaucaccgucuccaccaagcgcucccagcagaccgucauccccaacaucggcucccgcccccgcguccgcgacgucuccucccgcaucuccaucuacuggaccaucgucaagcccggcgacauccuccucaucaacuccaccggcaaccucaucgccccccgcggcuacuucaagauccgcuccggcaaguccuccaucaugcgcuccgacgcccccaucggcaagugcaacuccgagugcaucacccccaacggcuccauccccaacgacaagcccuuccagaacgucaaccgcaucaccuacggcgccugcccccgcuacgucaagcagaacacccucaagcucgccaccggcaugcgcaacguccccgagcgccagacccgcggcaucuucggcgccaucgccggcuucaucgagaacggcugggagggcauggucgacggcugguacggcuuccgccaccagaacuccgagggcaccggccaggccgccgaccucaaguccacccaggccgccaucaaccagaucaacggcaagcucaaccgccucaucggcaagaccaacgagaaguuccaccagaucgagaaggaguucuccgaggucgagggccgcauccaggaccucgagaaguacgucgaggacaccaagaucgaccucugguccuacaacgccgagcuccucgucgcccucgagaaccagcacaccaucgaccucaccgacuccgagaugaacaagcucuucgagcgcaccaagaagcagcuccgcgagaacgccgaggacaugggcaacggcugcuucaagaucuaccacaagugcgacaacgccugcaucggcuccauccgcaacggcaccuacgaccacgacgucuaccgcgacgaggcccucaacaaccgcuuccagaucaagggcgucgagcucaaguccggcuacaaggacuggauccucuggaucuccuucgccaucuccugcuuccuccucugcgucgcccuccucggcuucaucaugugggccugccagaagggcaacauccgcugcaacaucugcaucuga

SEQ ID NO: 96206 - RNA, 1701 nt, Artificial Sequence
  derived and/or modified CDS sequence (opt2) from hemagglutinin__InfluenzaA__AAY46371
augaagaccaucaucgcccucuccuacauccucugccucgucuucgcccagaagcuccccggcaacgacaacuccaccgccacccucugccucggccaccacgccguccccaacggcacccucgucaagaccaucaccuccgaccagaucgaggucaccaacgccaccgagcucguccaguccuccuccaccggccgcaucugcgacuccccccaccgcauccucgacggcgagaacugcacccucaucgacgcccuccucggcgacccccacugcgacggcuuccagaacaaggagugggaccucuucgucgagcgcuccaaggccuacuccaacugcuaccccuacgacguccccgacuacgccucccuccgcucccucgucgccuccuccggcacccucgaguucaacaacgaguccuucaacuggaccggcgucgcccagaacggcaccuccuucgccugcaagcgccgcuccaucaaguccuucuucucccgccucaacuggcuccaccagcucaaguacaaguaccccgcccucaacgucaccaugcccaacaacgacaaguucgacaagcucuacaucuggggcguccaccaccccggcaccgacuccgaccagaccucccucuacgcccaggccuccggccgcgucaccgucuccaccaagcgcucccagcagaccgucauccccaacaucggcucccgccccuggguccgcggcgucuccucccgcaucuccaucuacuggaccaucgucaagcccggcgacauccuccucaucaacuccaccggcaaccucaucgccccccgcggcuacuucaagauccgcuccggcaaguccuccaucaugcgcuccgacgcccccaucggcaagugcaacuccgagugcaucacccccaacggcuccauccccaacggcaagcccuuccagaacgucaaccgcaucaccuacggcgccugcccccgcuacgucaagcagaacacccucaagcucgccaccggcaugcgcaacguccccgagaagcagacccgcggcaucuucggcgccaucgccggcuucaucgagaacggcugggagggcauggucgacggcugguacggcuuccgccaccagaacuccgagggcaccggccaggccgccgaccucaaguccacccaggccgccaucaaccagaucaacggcaagcucaaccgccucaucgagaagaccaacgagaaguuccaccagaucgagaaggaguucaccgaggucgagggccgcauccaggaccucgagaaguacgucgaggacaccaagaucgaccucugguccuacaacgccgagcuccucgucgcccucgagaaccagcacaccaucgaccucaccgacuccgagaugaacaagcucuucgagcgcacccgcaagcagcuccgcgagaacgccgaggacaugggcaacggcugcuucaagaucuaccacaagugcgacaacgccugcaucggcuccauccgcaacggcaccuacgaccacgacgucuaccgcgacgaggcccucaacaaccgcuuccagaucaagggcgucgagcucaaguccggcuacaaggacuggauccucuggaucuccuucgccaccuccugcuuccuccucugcgucguccuccucggcuucaucaugugggccugccagaagggcaacauccgcugcaacaucugcaucuga

SEQ ID NO: 96207 - RNA, 1701 nt, Artificial Sequence; identical to SEQ ID NO: 96068
  derived and/or modified CDS sequence (opt2) from hemagglutinin__InfluenzaA__AAY46381

SEQ ID NO: 96208 - RNA, 1701 nt, Artificial Sequence
  derived and/or modified CDS sequence (opt2) from hemagglutinin__InfluenzaA__AAY46391
augaagaccaucaucgcccucuccuacauccucugccucgucuucgcccagaagcuccccgucaacgacaacuccaccgccacccucugccucggccaccacgccguccccaacggcacccucgucaagaccaucaccaacgaccacaucgaggucaccaacgccaccgagcucguccaguccuccuccaccggccgcaucugcgacuccccccaccagauccucgacggcgagaacugcacccucaucgacgcccuccucggcgacccccacugcgacggcuuccagaacaaggagugggaccucuucgucgagcgcuccaccgccuacuccaacugcuaccccuacgacguccccgacuacgccucccuccgcucccucgucgccuccuccggcacccucgaguucaacaacgaguccuucaacuggaccggcgucgcccagaacggcaccuccuccgccugcaagcgccgcuccaucaaguccuucuucucccgccucaacuggcuccaccagcucaaguacaaguaccccgcccucaacgucaccaugcccaacaacgagaaguucgacaagcucuacaucuggggcguccaccaccccuccaccgacuccgaccagaucucccucuacgcccaggccuccggccgcgucaccgucuccaccaagcgcucccagcagaccgucauccccaacaucggcucccgccccuggguccgcggcgucuccuccaucaucuccaucuacuggaccaucgucaagcccggcgacauccuccucaucaacuccaccggcaaccucaucgccccccgcggcuacuucaagauccgcuccggcaaguccuccaucaugcgcuccaacgcccccaucggcaagugcaacuccgagugcaucacccccaacggcuccauccccaacgacaagcccuuccagaacgucaaccgcaucaccuacggcgccugcccccgcuacgucaagcagaacacccucaagcucgccaccggcaugcgcaacguccccgagaagcagacccgcggcaucuucggcgccaucgccggcuucaucgagaacggcugggagggcauggucgacggcugguacggcuuccgccaccagaacuccgagggcaccggccaggccgccgaccucaaguccacccaggccgccaucaaccagaucaacggcaagcucaaccgccucaucgagaagaccaacgagaaguuccaccagaucgagaaggaguucuccgaggucgagggccgcauccaggaccucgagaaguacgucgaggacaccaagaucgaccucugguccuacaacgccgagcuccucgucgcccucgagaaccagcacaccaucgaccucaccgacuccgagaugaacaagcucuucgagcgcacccgcaagcagcuccgcgagaacgccgaggacaugggcaacggcugcuucaagaucuaccacaagugcgacaacgccugcaucggcuccauccgcaacggcaccuacgaccacgacgucuaccgcgacgaggcccucaacaaccgcuuccagaucaagggcgucgagcucaaguccggcuacaaggacuggauccucuggaucuccuucgccaucuccugcuuccuccucugcgucguccuccucggcuucaucaugugggccugccagaagggcaacauccgcugcaacaucugcaucuga

SEQ ID NO: 96209 - RNA, 1701 nt, Artificial Sequence
  derived and/or modified CDS sequence (opt2) from hemagglutinin__InfluenzaA__AAY46426
augaagaccaucaucgcccucuccuacauccucugccucgucuucgcccagaagcuccccggcaacgacaacuccaccgccacccucugccucggccaccacgccguccccaacggcacccucgucaagaccaucaccaacgaccagaucgaggucaccaacgccaccgagcucguccaguccuccuccaccggccgcaucugcgacuccccccaccagauccucgacggcgagaacugcacccucaucgacgcccuccucggcgacccccacugcgacggcuuccagaacaaggagugggaccucuucgucgagcgcuccaaggccuacuccaacugcuaccccuacgacguccccgacuacgccucccuccgcucccucgucgccuccuccggcacccucgaguucaacaacgaguccuucaacuggaccggcgucgcccagaacggcaccuccuccgccugcaagcgccgcuccaacaaguccuucuucucccgccucaacuggcuccaccagcucaaguacaaguaccccgcccucaacgucaccaugcccaacaacaagaaguucgacaagcucuacaucuggggcguccaccaccccuccaccgacuccgaccagaucucccucuacgcccaggccuccggccgcgucaccgucuccaccaagcgcucccagcagaccgucauccccaacaucggcucccgccccuggguccgcggcgucuccucccgcaucuccaucuacuggaccaucgucaagcccggcgacauccuccucaucaacuccaccggcaaccucaucgccccccgcggcuacuucaagauccgcuccggcaaguccuccaucaugcgcuccgacgcccccaucggcaagugcaacuccgagugcaucacccccaacggcuccauccccaacgacaagcccuuccagaacgucaaccgcaucaccuacggcgccugcccccgcuacgucaagcagaacacccucaagcucgccaccggcaugcgcaacauccccgagaagcagacccgcggcaucuucggcgccaucgccggcuucaucgagaacggcugggagggcauggucgacggcugguacggcuuccgccaccagaacuccgagggcaccggccaggccgccgaccucaaguccacccaggccgccaucaaccagaucaacggcaagcucaaccgccucaucgagaagaccaacgagaaguuccaccagaucgagaaggaguucuccgaggucgagggccgcauccaggaccucgagaaguacgucgaggacaccaagaucgaccucugguccuacaacgccgagcuccucgucgcccucgagaaccagcacaccaucgaccucaccgacuccgagaugaacaagcucuucgagcgcaccaagaagcagcuccgcgagaacgccgaggacaugggcaacggcugcuucaagaucuaccacaagugcgacaacgccugcaucggcuccauccgcaacggcaccuacgaccacgacgucuaccgcgacgaggcccucaacaaccgcuuccagaucaagggcgucgagcucaaguccggcuacaaggacuggauccucuggaucuccuucgccaucuccugcuuccuccucugcgucguccuccucggcuucaucaugugggccugccagaagggcaacauccgcugcaacaucugcaucuga

SEQ ID NO: 96210 - RNA, 1701 nt, Artificial Sequence
  derived and/or modified CDS sequence (opt2) from hemagglutinin__InfluenzaA__AAY47013
augaagaccaucaucgcccucuccuacauccucugccucgucuucgcccagaagcuccccggcaacgacaacuccaccgccacccucugccucggccaccacgccguccccaacggcacccucgucaagaccaucaccaacgaccagaucgaggucaccaacgccaccgagcucguccaguccuccuccaccggccgcaucugcgacuccccccaccagauccucgacggcgagaacugcacccucaucgacgcccuccucggcgacccccacugcgacggcuuccagaacaaggagugggaccucuucgucgagcgcuccaaggccuacuccaacugcuaccccuacgacguccccgacuacgucucccuccgcucccucgucgccuccuccggcacccucgaguucaacaacgaguccuucaacuggaccggcgucgcccagaacggcaccuccuccgccugcaagcgccgcuccgacaaguccuucuucucccgccucaacuggcuccaccagcucaaguacaaguaccccgcccucaacgucaccaugcccaacaacgagaaguucgacaagcucuacaucuggggcguccaccaccccggcaccgacuccgaccagaucucccucuacgcccaggccuccggccgcgucaccgucuccaccaagcgcucccagcagaccgucauccccaacaucggcuccggccccuggguccgcggcgucuccucccgcaucuccaucuacuggaccaucgucaagcccggcgacauccuccucaucaacuccaccggcaaccucaucgccccccgcggcuacuucaagauccgcuccggcaaguccuccaucaugcgcuccgacgcccccaucggcaagugcaacuccgagugcaucacccccaacggcuccauccccaacgacaagcccuuccagaacgucaaccgcaucaccuacggccccugcccccgcuacgucaagcagaacacccucaagcucgccaccggcaugcgcaacguccccgagaagcagacccgcggcaucuucggcgccaucgccggcuucaucgagaacggcugggagggcaugauggacggcugguacggcuuccgccaccagaacuccgagggcaccggccaggccgccgaccucaaguccacccaggccgccaucaaccagaucaacggcaagcucaaccgccucaucaagaagaccaacgagaaguuccaccagaucgagaaggaguucuccgaggucgagggccgcauccaggaccucgagaaguacgucgaggacaccaagaucgaccucugguccuacaacgccgagcuccucgucgcccucgagaaccagcacaccaucgaccucaccgacuccgagaugaacaagcucuucgagcgcaccaagaagcagcuccgcgagaacgccgaggacaugggcaacggcugcuucaagaucuaccacaagugcgacaacgccugcaucggcuccauccgcaacggcaccuacgaccacgacgucuaccgcgacgaggcccucaacaaccgcuuccagaucaagggcgucgagcucaaguccggcuacaaggacuggauccucuggaucuccuucgccaucuccugcuuccuccucugcaucguccuccucggcuucaucaugugggccugccagaagggcaacauccgcugcaacaucugcaucuga

SEQ ID NO: 96211 - RNA, 1701 nt, Artificial Sequence
  derived and/or modified CDS sequence (opt2) from hemagglutinin__InfluenzaA__AAY47023
augaagaccaucaucgcccucuccuacauccucugccucgucuucgcccagaagcuccccggcaacgacaacuccaccgccacccucugccucggccaccacgccguccccaacggcacccucgucaagaccaucaccaacgaccagaucgaggucaccaacgccaccgagcucguccaguccuccuccaccucccgcaucugcgacuccccccaccagauccucgacggcgagaacugcacccucaucgacgcccuccucggcgacccccacugcgacggcuuccagaacaaggaguggggccucuucgucgagcgcuccaaggccuacuccaacugcuaccccuacgacguccccgacuacgucucccuccgcucccucgucgccuccuccggcacccucgaguucaacaacgaguccuucaacuggaccggcgucgcccagaacggcaccuccuccgccugcaagcgccgcuccgacaaguccuucuucucccgccucaacuggcuccaccagcucaaguacaaguaccccgcccucaacgucaccaugcccaacaacgagaaguucgacaagcucuacaucuggggcguccaccaccccggcaccgacuccgaccagaucucccucuacgcccaggccuccggccgcgucaccgucuccaccaagcgcucccagcagaccgucauccccaacaucggcucccgccccuggguccgcggcgucuccucccgcaucuccaucuacuggaccaucgucaagcccggcgacauccuccucaucaacuccaccggcaaccucaucgccccccgcggcuacuucaagauccgcuccggcaaguccuccaucaugcgcuccgacgcccccaucggcaagugcaacuccgagugcaucacccccaacggcuccauccccaacgacaagcccuuccagaacgucaaccgcaucaccuacggcgccugcccccgcuacgucaagcagaacacccucaagcucgccaccggcaugcgcaacguccccgagaagcaggcccgcggcaucuucggcgccaucgccggcuucaucgagaacggcugggagggcaugauggacggcugguacggcuuccgccaccagaacuccgagggcaccggccaggccgccgaccucaaguccacccaggccgccaucaaccagaucaacggcaagcucaaccgccucaucgagaagaccaacgagaaguuccaccagaucgagaaggaguucuccgaggucgagggccgcauccaggaccucgagaaguacgucgaggacaccaagaucgaccucugguccuacaacgccgagcuccucgucgcccucgagaaccagcacaccaucgaccucaccgacuccgagaugaacaagcucuucgagcgcaccaagaagcagcuccgcgagaacgccgaggacaugggcaacggcugcuucaagaucuaccacaagugcgacaacgccugcaucggcuccauccgcaacggcaccuacgaccacgacgucuaccgcgacgaggcccucaacaaccgcuuccagaucaagggcgucgagcucaaguccggcuacaaggacuggauccucuggaucuccuucgccaucuccugcuuccuccucugcaucguccuccucggcuucaucaugugggccugccagaagggcaacauccgcugcaacaucugcaucuga

SEQ ID NO: 96212 - RNA, 1701 nt, Artificial Sequence; identical to SEQ ID NO: 96208
  derived and/or modified CDS sequence (opt2) from hemagglutinin__InfluenzaA__AAY47052

SEQ ID NO: 96213 - RNA, 1701 nt, Artificial Sequence
  derived and/or modified CDS sequence (opt2) from hemagglutinin__InfluenzaA__AAY47075
augaagaccaucaucgcccucuccuacauccucugccucgucuucgcccagaagcuccccggcaacgacaacuccauggccacccucugccucggccaccacgccguccccaacggcacccucgucaagaccaucaccaacgaccagaucgaggucaccaacgccaccgagcucguccaguccuccuccaccggccgcaucugcgacuccccccaccagauccucgacggcgagaacugcacccucaucgacgcccuccucggcgacccccacugcgacggcuuccagaacaaggagugggaccucuucgucgagcgcuccaaggccuacuccaacugcuaccccuacgacguccccgacuacgucucccuccgcucccucgucgccuccuccggcacccucgaguucaacaacgaguccuucaacuggaccggcgucgcccagaacggcaccuccuccgccugcaagcgccgcuccaacaaguccuucuucucccgccucaacuggcuccaccagcucaagaacaaguaccccgcccucaacgucaccaugcccaacaacgagaaguucgacaagcucuacaucuggggcguccaccaccccggcaccgacuccgaccagaucucccucuacgcccaggccuccggccgcgucaccgucuccaccaagcgcucccagcagaccgucauccccaacaucggcucccgcccccgcguccgcgacaucuccucccgcaucuccaucuacuggaccaucgucaagcccggcgacauccuccucaucaacuccaccggcaaccucaucgccccccgcggcuacuucaagauccgcuccggcaaguccuccaucaugcgcuccgacgcccccaucggcaagugcaacuccgagugcaucacccccaacggcuccauccccaacgacaagcccuuccagaacgucaaccgcaucaccuacggcgccugcccccgcuacgucaagcagaacacccucaagcucgccaccggcaugcgcaacguccccgagaagcagacccgcggcaucuucggcgccaucgccggcuucaucgagaacggcugggagggcaugauggacggcugguacggcuuccgccaccagaacuccgagggcaccggccaggccgccgaccucaaguccacccaggccgccaucaaccagaucaacggcaagcucaaccgccucaucgagaagaccaacgagaaguuccaccagaucgagaaggaguucuccgaggucgagggccgcauccaggaccucgagaaguacgucgaggacaccaagaucgaccucugguccuacaacgccgagcuccucgucgcccucgagaaccagcacaccaucgaccucaccgacuccgagaugaacaagcucuucgagcgcaccaagaagcagcuccgcgagaacgccgaggacaugggcaacggcugcuucaagaucuaccacaagugcgacaacgccugcaucggcuccauccgcaacggcaccuacgaccacgacgucuaccgcgacgaggcccucaacaaccgcuuccagaucaagggcgucgagcucaaguccggcuacaaggacuggauccucuggaucuccuucgccaucuccugcuuccuccucugcaucguccuccucggcuucaucaugugggccugccagaagggcaacauccgcugcaacaucugcaucuga

SEQ ID NO: 96214 - RNA, 1701 nt, Artificial Sequence
  derived and/or modified CDS sequence (opt2) from hemagglutinin__InfluenzaA__AAY47085
augaagaccaucaucgcccucuccuacauccucugccucgucuucgcccagaagcuccccggcaacgacaacuccaccgccacccucugccucggccaccacgccguccccaacggcaccaucgucaagaccaucaccaacgaccagaucgaggucaccaacgccaccgagcucguccaguccuccuccaccggcggcaucugcgacuccccccaccagauccucgacggcgagaacugcacccucaucgacgcccuccucggcgacccccagugcgacggcuuccagaacaagaagugggaccucuucgucgagcgcuccaaggccuacuccaacugcuaccccuacgacguccccgacuacgccucccuccgcucccucgucgccuccuccggcacccucgaguucaacaacgaguccuucaacuggaccggcgucacccagaacggcaccuccuccgccugcaagcgccgcuccaacaaguccuucuucucccgccucaacuggcucacccaccucaaguacaaguaccccgcccucaacgucaccaugcccaacaacgagaaguucgacaagcucuacaucuggggcguccaccaccccggcaccgacuccgaccagaucucccucuacgcccaggccuccggccgcaucaccgucuccaccaagcgcucccagcagaccgucauccccaacgucggcucccgcccccgcguccgcgacgucuccucccgcaucuccaucuacuggaccaucgucaagcccggcgacauccuccucaucaacuccaccggcaaccucaucgccccccgcggcuacuucaagauccgcuccggcaaguccuccaucaugcgcuccgacgcccccaucggcaagugcaacuccgagugcaucacccccaacggcuccauccccaacgacaagcccuuccagaacgucaaccgcaucaccuacggcgccugcccccgcuacgucaagcagaacacccucaagcucgccaccggcaugcgcaacguccccgagaagcagacccgcggcaucuucggcgccaucgccggcuucaucgagaacggcugggagggcauggucgacggcugguacggcuuccgccaccagaacuccgagggcaccggccaggccgccgaccucaaguccacccaggccgccaucaaccagaucaacggcaagcucaaccgccucaucggcaagaccaacgagaaguuccaccagaucgagaaggaguucuccgaggucgagggccgcauccaggaccucgagaaguacgucgaggacaccaagaucgaccucugguccuacaacgccgagcuccucgucgcccucgagaaccagcacaccaucgaccucaccgacuccgagaugaacaagcucuucgagcgcaccaagaagcagcuccgcgagaacgccgaggacaugggcaacggcugcuucaagaucuaccacaagugcgacaacgccugcaucgaguccauccgcaacggcaccuacgaccacgacgucuaccgcgacgaggcccucaacaaccgcuuccagaucaagggcgucgagcucaaguccggcuacaaggacuggauccucuggaucuccuucgccaucuccugcuuccuccucugcgucgcccuccucggcuucaucaugugggccugccagaagggcaacauccgcugcaacaucugcaucuga

SEQ ID NO: 96215 - RNA, 1701 nt, Artificial Sequence
  derived and/or modified CDS sequence (opt2) from hemagglutinin__InfluenzaA__AAY58320
augaagaccaucaucgcccucuccuacauccucugccucgucuucgcccagaagcuccccggcaacgacaacuccaccgccacccucugccucggccaccacgccguccccaacggcaccaucgucaagaccaucaccaacgaccagaucgaggucaccaacgccaccgagcucguccaguccuccuccaccggcggcaucugcgacuccccccaccagauccucgacggcgagaacugcacccucaucgacgcccuccucggcgacccccagugcgacggcuuccagaacaagaagugggaccucuucgucgagcgcuccaaggccuacuccaacugcuaccccuacgacguccccgacuacgccucccuccgcucccucgucgccuccuccggcacccucgaguucaacaacgaguccuucgacuggaccggcgucacccagaacggcaccuccuccgccugcaagcgccgcuccaacaaguccuucuucucccgccucaacuggcucacccaccucaaguacaaguaccccgcccucaacgucaccaugcccaacaacgagaaguucgacaagcucuacaucuggggcguccaccaccccggcaccgacuccgaccagaucucccucuacgcccaggccuccggccgcaucaccgucuccaccaagcgcucccagcagaccgucauccccaacaucggcucccgcccccgcguccgcgacaucuccucccgcaucuccaucuacuggaccaucgucaagcccggcgacauccuccucaucaacuccaccggcaaccucaucgccccccgcggcuacuucaagauccgcuccggcaaguccuccaucaugcgcuccgacgcccccaucggcaagugcaacuccgagugcaucacccccaacggcuccauccccaacgacaagcccuuccagaacgucaaccgcaucaccuacggcgccugcccccgcuacgucaagcagaacacccucaagcucgccaccggcaugcgcaacguccccgagaagcagacccgcggcaucuucggcgccaucgccggcuucaucgagaacggcugggagggcauggucgacggcugguacggcuuccgccaccagaacuccgagggcaccggccaggccgccgaccucaaguccacccaggccgccaucaaccagaucaacggcaagcucaaccgccucaucggcaagaccaacgagaaguuccaccagaucgagaaggaguucuccgaggucgagggccgcauccaggaccucgagaaguacgucgaggacaccaagaucgaccucugguccuacaacgccgagcuccucgucgcccucgagaaccagcacaccaucgaccucaccgacuccgagaugaacaagcucuucgagcgcaccaagaagcagcuccgcgagaacgccgaggacaugggcaacggcugcuucaagaucuaccacaagugcgacaacgccugcaucggcuccauccgcaacggcaccuacgaccacgacgucuaccgcgacgaggcccucaacaaccgcuuccagaucaagggcgucgagcucaaguccggcuacaaggacuggauccucuggaucuccuucgccaucuccugcuuccuccucugcgucgcccuccucggcuucaucaugugggccugccagaagggcaacauccgcugcaacaucugcaucuga

SEQ ID NO: 96216 - RNA, 1701 nt, Artificial Sequence
  derived and/or modified CDS sequence (opt2) from hemagglutinin__InfluenzaA__AAY59035
augaagaccaucaucgcccucuccuacauccucugccucgucuucgcccagaagcucaccgucaacgacaacuccaccgccacccucugccucggccaccacgccguccccaacggcacccucgucaagaccaucaccaacgaccacaucgaggucaccaacgccaccgagcucguccaguccuccuccaccggccgcaucugcgacuccccccaccagauccucgacggcgagaacugcacccucaucgacgcccuccucggcgacccccacugcgacggcuuccagaacaaggagugggaccucuucgucgagcgcuccaccgccuacuccaacugcuaccccuacgacguccccgacuacgccucccuccgcucccucgucgccuccuccggcacccucgaguucaacaacgaguccuucaacuggaccggcgucgcccagaacggcaccuccuccgccugcaagcgccgcuccaucaaguccuucuucucccgccucaacuggcuccaccagcucaaguacaaguaccccgcccucaacgucaccaugcccaacaacgagaaguucgacaagcucuacaucuggggcguccaccaccccuccaccgacuccgaccagaucucccucuacgcccaggccuccggccgcgucaccgucuccaccaagcgcucccagcagaccgucauccccaacaucggcucccgccccuggguccgcggcgucuccucccgcaucuccaucuacuggaccaucgucaagcccggcgacauccuccucaucaacuccaccggcaaccucaucgccccccgcggcuacuucaagauccgcuccggcaaguccuccaucaugcgcuccaacgcccccaucggcaagugcaacuccgagugcaucacccccaacggcuccauccccaacgacaagcccuuccagaacgucaaccgcaucaccuacggcgccugcccccgcuacgucaagcagaacacccucaagcucgccaccggcaugcgcaacguccccgagaagcagacccgcggcaucuucggcgccaucgccggcuucaucgagaacggcugggagggcauggucgacggcugguacggcuuccgccaccagaacuccgagggcaccggccaggccgccgaccucaaguccacccaggccgccaucaaccagaucaacggcaagcucaaccgccucaucgagaagaccaacgagaaguuccaccagaucgagaaggaguucuccgaggucgagggccgcauccaggaccucgagaaguacgucgaggacaccaagaucgaccucugguccuacaacgccgagcuccucgucgcccucgagaaccagcacaccaucgaccucaccgacuccgagaugaacaagcucuucgagcgcacccgcaagcagcuccgcgagaacgccgaggacaugggcaacggcugcuucaagaucuaccacaagugcgacaacgccugcaucggcuccauccgcaacggcaccuacgaccacgacgucuaccgcgacgaggcccucaacaaccgcuuccagaucaagggcgucgagcucaaguccggcuacaaggacuggauccucuggaucuccuucgccaucuccugcuuccuccucugcgucguccuccucggcuucaucaugugggccugccagaagggcaacauccgcugcaacaucugcaucuga

SEQ ID NO: 96217 - RNA, 1701 nt, Artificial Sequence
  derived and/or modified CDS sequence (opt2) from hemagglutinin__InfluenzaA__AAY64202
augaagaccaucaucgcccucuccuacauccucugccucgucuucgcccagaagcuccccggcaacgacaacuccaccgccacccucugccucggccaccacgccguccccaacggcaccaucgucaagaccaucaccaacgaccagaucgaggucaccaacgccaccgagcucguccaguccuccuccaccggcggcaucugcgacuccccccaccagauccucgacggcgagaacugcacccucaucgacgcccuccucggcgacccccagugcgacggcuuccagaacaagaagugggaccucuucgucgagcgcuccaaggccuacuccaacugcuaccccuacgacguccccgacuacgccucccuccgcucccucgucgccuccuccggcacccucgaguucaacaacgaguccuucaacuggaccggcgucacccagaacggcaccuccuccgccugcgagcgccgcuccaacaaguccuucuucucccgccucaacuggcucacccaccucaaguacaaguaccccgcccucaacgucaccaugcccaacaacgagaaguucgacaagcucuacaucuggggcguccaccaccccggcaccgacuccgaccagaucucccucuacgcccaggccuccggccgcaucaccgucuccaccaagcgcucccagcagaccgucauccccaacaucggcucccgcccccgcguccgcgacgucuccucccgcaucuccaucuacuggaccaucgucaagcccggcgacauccuccucaucaacuccaccggcaaccucaucgccccccgcggcuacuucaagauccgcuccggcaaguccuccaucaugcgcuccgacgcccccaucggcaagugcaacuccgagugcaucacccccaacggcuccauccccaacgacaagcccuuccagaacgucaaccgcaucaccuacggcgccugcccccgcuacgucaagcagaacacccucaagcucgccaccggcaugcgcaacguccccgagaagcagaaccgcggcaucuucggcgccaucgccggcuucaucgagaacggcugggagggcauggucgacggcugguacggcuuccgccaccagaacuccgagggcaccggccaggccgccgaccucaaguccacccaggccgccaucaaccagaucaacggcaagcucaaccgccucaucggcaagaccaacgagaaguuccaccagaucgagaaggaguucuccgaggucgagggccgcauccaggaccucgagaaguacgucgaggacaccaagaucgaccucugguccuacaacgccgagcuccucgucgcccucgagaaccagcacaccaucgaccucaccgacuccgagaugaacaagcucuucgagcgcaccaagaagcagcuccgcgagaacgccgaggacaugggcaacggcugcuucaagaucuaccacaagugcgacaacgccugcaucggcuccauccgcaacggcaccuacgaccacgacgucuaccgcgacgaggcccucaacaaccgcuuccagaucaagggcgucgagcucaaguccggcuacaaggacuggauccucuggaucuccuucgccaucuccugcuuccuccucugcgucgcccuccucggcuucaucaugugggccugccagaagggcaacauccgcugcgacaucugcaucuga

SEQ ID NO: 96218 - RNA, 1701 nt, Artificial Sequence
  derived and/or modified CDS sequence (opt2) from hemagglutinin__InfluenzaA__AAY64212
augaagaccaucaucgcccucuccuacauccucugccucgucuucgcccagaagauccccgucaacgacaacuccaccgccacccucugccucggccaccacgccguccccaacggcacccucgucaagaccaucaccaacgagcacaucgaggucaccaacgccaccgagcucguccaguccuccuccaccggccgcaucugcgacuccccccaccagauccucgacggcgagaacugcacccucaucgacgcccuccucggcgacccccacugcgacggcuuccagaacaaggagugggaccucuucgucgagcgcuccaccgccuacuccaacugcuaccccuacgacguccccgacuacgccucccuccgcucccucgucgccuccuccggcacccucgaguucaacaacgaguccuucaacuggaccggcgucgcccagaacggcaccuccuccgccugcaagcgccgcuccaucaaguccuucuucucccgccucaacuggcuccaccagcucaaguacaaguaccccgcccucaacgucaccaugcccaacaacgagaaguucgacaagcucuacaucuggggcguccaccaccccuccaccgacuccgaccagaucucccucuacgcccaggccuccggccgcgucaccgucuccaccaagcgcucccagcagaccgucauccccaacaucggcucccgccccuggguccgcggcgucuccucccgcaucuccaucuacuggaccaucgucaagcccggcgacauccuccucaucaacuccaccggcaaccucaucgccccccgcggcuacuucaagauccgcuccggcaaguccuccaucaugcgcuccaacgcccucaucggcaagugcaacuccgagugcaucacccccaacggcuccauccccaacgacaagcccuuccagaacgucaaccgcaucaccuacggcgccugcccccgcuacgucaagcagaacacccucaagcucgccaccggcaugcgcaacguccccgagaagcagacccgcggcaucuucggcgccaucgccggcuucaucgagaacggcugggagggcauggucgacggcugguacggcuuccgccaccagaacuccgagggcaccggccaggccgccgaccucaaguccacccaggccgccaucaaccagaucaacggcaagcucaaccgccucaucgagaagaccaacgagaaguuccaccagaucgagaaggaguucuccgaggucgagggccgcauccaggaccucgagaaguacgucgaggacaccaagaucgaccucugguccuacaacgccgagcuccucgucgcccucgagaaccagcacaccaucgaccucaccgacuccgagaugaacaagcucuucgagcgcacccgcaagcagcuccgcgagaacgccgaggacaugggcaacggcugcuucaagaucuaccacaagugcgacaacgccugcaucggcuccauccgcaacggcaccuacgaccacgacgucuaccgcgacgaggcccucaacaaccgcuuccagaucaagggcgucgagcucaaguccggcuacaaggacuggauccucuggaucuccuucgccaucuccugcuuccuccucugcgucguccuccucggcuucaucaugugggccugccagaagggcaacauccgcugcaacaucugcaucuga

SEQ ID NO: 96219 - RNA, 1701 nt, Artificial Sequence
  derived and/or modified CDS sequence (opt2) from hemagglutinin__InfluenzaA__AAY64222
augaagaccaucaucgcccucuccuacauccucugccucgucuucgcccagaagcuccccggcaacgacaacuccaccgccacccucugccucggccaccacgccguccccaacggcacccucgucaagaccaucaccaacgaccagaucgaggucaccaacgccaccgagcucguccaguccuccuccaucggccgcaucugcgacuccccccaccagauccucgacggcgagaacugcacccucaucgacgcccuccucggcgacccccacugcgacggcuuccagaacaaggagugggaccucuucgucgagcgcuccaaggccuacuccaacugcuaccccuacgacguccccgacuacgucucccuccgcucccucgucgccuccuccggcacccucgaguucaacaacgaguccuucaacuggaccggcgucgcccagaacggcaccuccuccuccugcaagcgccgcuccgacaaguccuucuucucccgccucaacuggcuccaccagcucaaguacaaguaccccgcccucaacgucaccaugcccaacaacgagaaguucgacaagcucuacaucuggggcguccaccaccccggcaccgacuccgaccagaucucccucuacgcccaggccuccggccgcgucaccgucuccaccaagcgcucccagcagaccgucauccccaacaucggcucccgccccuggguccgcggcgucuccucccgcaucuccaucuacuggaccaucgucaagcccggcgacauccuccucaucaacuccaccggcaaccucaucgccccccgcggcuacuucaagauccgcuccggcaaguccuccaucaugcgcuccgacgcccccaucggcaagugcaacuccgagugcaucacccccaacggcuccauccccaacgacaagcccuuccagaacgucaaccgcaucaccuacggccccugcccccgcuacgucaagcagaacacccucaagcucgccaccggcaugcgcaacguccccgagaagcagacccgcggcaucuucggcgccaucgccggcuucaucgagaacggcugggagggcaugauggacggcugguacggcuuccgccaccagaacuccgagggcaccggccaggccgccgaccucaaguccacccaggccgccaucaaccagaucaacggcaagcucaaccgccucaucgagaagaccaacgagaaguuccaccagaucgagaaggaguucuccgaggucgagggccgcauccaggaccucgagaaguacgucgaggacaccaagaucgaccucugguccuacaacgccgagcuccucgucgcccucgagaaccagcacaccaucgaccucaccgacuccgagaugaacaagcucuucgagaagaccaagaagcagcuccgcgagaacgccgaggacaugggcaacggcugcuucaagaucuaccacaagugcgacaacgccugcaucggcuccauccgcaacggcaccuacgaccacgacgucuaccgcgacgaggcccucaacaaccgcuuccagaucaagggcgucgagcucaaguccggcuacaaggacuggauccucuggaucuccuucgccaucuccugcuuccuccucugcaucguccuccucggcuucaucaugugggccugccagaagggcaacauccgcugcaacaucugcaucuga

SEQ ID NO: 96220 - RNA, 1701 nt, Artificial Sequence
  derived and/or modified CDS sequence (opt2) from hemagglutinin__InfluenzaA__AAY64262
augaagaccaucaucgcccucuccuacauccucugccucgucuucgcccagaagcuccccggcaacgacaacuccaccgccacccucugccucggccaccacgccguccccaacggcacccucgucaagaccaucaccaacgaccagaucgaggucaccaacgccaccgagcucguccaguccuccuccaccggccgcaucugcgacuccccccaccagauccucgacggcgagaacugcacccucaucgacgcccuccucggcgacccccacugcgacggcuuccagaacaaggagugggaccucuucgucgagcgcuccaaggccuacuccaacugcuaccccuacgacguccccgacuacgccucccuccgcucccucgucgccuccuccggcacccucgaguucaacaacgaguccuucaacuggaccggcgucgcccagaacggcaccuccuccgccugcaagcgccgcuccaacaaguccuucuucucccgccucaacuggcuccaccagcucaaguacaaguaccccgcccucaacgucaccaugcccaacaacgagaaguucgacaagcucuacaucuggggcguccaccaccccuccaccgacuccgaccagaucucccucuacgcccaggccuccggccgcgucaccgucuccaccaagcgcucccagcagaccgucauccccaacaucggcucccgccccuggguccgcggcgucuccucccgcaucuccaucuacuggaccaucgucaagcccggcgacauccuccucaucaacuccaccggcaaccucaucgccccccgcggcuacuucaagauccgcuccggcaaguccuccaucaugcgcuccgacgcccccaucggcaagugcaacuccgagugcaucacccccaacggcuccauccccaacgacaagcccuuccagaacgucaaccgcaucaccuacggcgccugcccccgcuacgucaagcagaacacccucaagcucgccaccggcaugcgcaacguccccgagaagcagacccgcggcaucuucggcgccaucgccggcuucaucgagaacggcugggagggcauggucgacggcugguacggcuuccgccaccagaacuccgagggcaccggccaggccgccgaccucaaguccacccaggccgccaucaaccagaucaacggcaagcucaaccgccucaucgagaagaccaacgagaaguuccaccagaucgagaaggaguucuccgaggucgagggccgcauccaggaccucgagaaguacgucgaggacaccaagaucgaccucugguccuacaacgccgagcuccucgucgcccucgagaaccagcacaccaucgaccucaccgacuccgagaugaacaagcucuucgagcgcaccaagaagcagcuccgcgagaacgccgaggacaugggcaacggcugcuucaagaucuaccacaagugcgacaacgccugcaugggcuccauccgcaacggcaccuacgaccacgacgucuaccgcgacgaggcccucaacaaccgcuuccagaucaagggcgucgagcucaaguccggcuacaaggacuggauccucuggaucuccuucgccaucuccugcuuccuccucugcgucguccuccucggcuucaucaugugggccugccagaagggcaacauccgcugcaacaucugcaucuga

SEQ ID NO: 96221 - RNA, 1701 nt, Artificial Sequence
  derived and/or modified CDS sequence (opt2) from hemagglutinin__InfluenzaA__AAY64272
augaagaccaucaucgcccucuccuacauccucugccucgucuucgcccagaagcuccccggcaacgacaacuccaccgccacccucugccucggccaccacgccguccccaacggcaccaucgucaagaccaucaccaacgaccagaucgaggucaccaacgccaccgagcucguccaguccuccuccaccggcggcaucugcgacuccccccaccagauccucgacggcgagaacugcacccucaucgacgcccuccucggcgacccccagugcgacggcuuccagaacaagaagugggaccucuucgucgagcgcuccaaggccuacuccaacugcuaccccuacgacguccccgacuacgccucccuccgcucccucgucgccuccuccggcacccucgaguucaacaacgaguccuucaacuggaccggcgucacccagaacggcaccuccuccgccugcaagcgccgcuccaacaaguccuucuucucccgccucaacuggcucacccaccucaaguacaaguaccccgcccucaacgucaccaugcccaacaacgagaaguucgacaagcucuacaucuggggcguccaccaccccggcaccgacuccgaccagaucucccucuacgcccaggccuccggccgcaucaccgucuccaccaagcgcucccagcagaccgucauccccaacaucggcucccgcccccgcguccgcgacgucuccucccgcaucuccaucuacuggaccaucgucaagcccggcgacauccuccucaucaacuccaccggcaaccucaucgccccccgcggcuacuucaagauccgcuccggcaaguccuccaucaugcgcuccgacgcccccaucggcaagugcaacuccgagugcaucacccccaacggcuccauccccaacgacaagcccuuccagaacgucaaccgcaucaccuacggcgccugcccccgcuacgucaagcagaacacccucaagcucgccaccggcaugcgcaacguccccgagaagcagacccgcggcaucuucggcgccaucgccggcuucaucgagaacggcugggagggcauggucgacggcugguacggcuuccgccaccagaacuccgagggcaccggccaggccgccgaccucaaguccacccaggccgccaucaaccagaucaacggcaagcucaaccgccucaucggcaagaccaacgagaaguuccaccagaucgagaaggaguucuccgaggucgagggccgcauccaggaccucgagaaguacgucgaggacaccaagaucgaccucugguccuacaacgccgagcuccucgucgcccucgagaaccagcacaccaucgaccucaccgacuccgagaugaacaagcucuucgagcgcaccaagaagcagcuccgcgagaacgccgaggacaugggcaacggcugcuucaagaucuaccacaagugcgacaacgccugcaucgaguccauccgcaacggcaccuacgaccacgacgucuaccgcgacgaggcccucaacaaccgcuuccagaucaagggcgucgagcucaaguccggcuacaaggacuggauccucuggaucuccuucgccaucuccugcuuccuccucugcgucgcccuccucggcuucaucaugugggccugccagaagggcaacauccgcugcaacaucugcaucuga

SEQ ID NO: 96222 - RNA, 1701 nt, Artificial Sequence
  derived and/or modified CDS sequence (opt2) from hemagglutinin__InfluenzaA__AAY64282
augaagaccaucaucgcccucuccuacauccucugccucgucuucgcccagaagcuccccggcaacgacaacuccaccgccacccucugccucggccaccacgccguccccaacggcacccucgucaagaccaucaccaacgaccagaucgaggucaccaacgccaccgagcucguccaguccuccuccaccggccgcaucugcgacuccccccaccagauccucgacggcgagaacugcacccucaucgacgcccuccucggcgacccccacugcgacggcuuccagaacaaggagugggaccucuucgucgagcgcuccaaggccuacuccaacugcuaccccuacgacguccccgacuacgccucccuccgcucccucgucgccuccuccggcacccucgaguucaacaacgaguccuucaacuggaccggcgucgcccagaacggcaccuccuccgccugcaagcgccgcuccaacaaguccuucuucucccgccucaacuggcuccaccagcucaaguacaaguaccccgcccucaacgucaccaugcccaacaacgagaaguucgacaagcucuacaucuggggcguccaccaccccuccaccgacuccgaccagaucucccucuacgcccaggccuccggccgcgucaccgucuccaccaagcgcucccagcagaccgucauccccaacaucggcucccgccccuggguccgcggcgucuccucccgcaucuccaucuacuggaccaucgucaagcccggcgacauccuccucaucaacuccaccggcaaccucaucgccccccgcggcuacuucaagauccgcuccggcaaguccuccaucaugcgcuccgacgcccccaucggcaagugcaacuccgagugcaucacccccaacggcuccauccccaacgacaagcccuuccagaacgucaaccgcaucaccuacggcgccugcccccgcuacgucaagcagaacacccucaagcucgccaccggcaugcgcaacguccccgagaagcagacccgcggcaucuucggcgccaucgccggcuucaucgagaacggcugggagggcauggucgacggcugguacggcuuccgccaccagaacuccgagggcaccggccaggccgccgaccucaaguccacccaggccgccaucaaccagaucaacggcaagcucaaccgccucaucgagaagaccaacgagaaguuccaccagaucgagaaggaguucuccgaggucgagggccgcauccaggaccucgagaaguacgucgaggacaccaagaucgaccucugguccuacaacgccgagcuccucgucgcccucgagaaccagcacaccaucgaccucaccgacuccgagaugaacaagcucuucgagcgcaccaagaagcagcuccgcgagaacgccgaggacaugggcaacggcugcuucaagaucuaccacaagugcgacaacgccugcaucggcuccauccgcaacggcaccuacgaccacgacgucuaccgcgacgaggcccucaacaaccgcuuccagaucaagggcgucgagcucaaguccggcuacaaggacuggauccucuggaucuccuucgccaucuccugcuuccuccucugcgucguccuccucggcuucaucaugugggccugccagaagggcaacauccgcugcaacaucugcaucuga

SEQ ID NO: 96223 - RNA, 1701 nt, Artificial Sequence
  derived and/or modified CDS sequence (opt2) from hemagglutinin__InfluenzaA__AAY64292
augaagaccaucaucgcccucuccuacauccucugccucgucuucgcccagaagcuccccggcaacgacaacuccaccgccacccucugccucggccaccacgccguccccaacggcacccucgucaagaccaucaccaacgaccagaucgaggucaccaacgccaccgagcucguccaguccuccuccaccgacaagaucugcgacuccccccaccagauccucgacggcggcaacugcacccucaucgacgcccuccucggcgacccccacugcgacggcuuccagaacaaggagugggaccucuucgucgagcgcuccaaggccuacuccaacugcuaccccuacgacguccccgacuacgucucccuccgcucccucgucgccuccuccggcacccucgaguucaacaacgaguccuucaacuggaccggcgucgcccagaacggcaccuccuccgccugcaagcgccgcuccgacaaguccuucuucucccgccucaacuggcuccaccagcucaagaacaaguaccccgcccucaacgucaccaugcccaacaacgagaaguucgacaagcucuacaucuggggcguccaccaccccggcaccgacuccgaccagaucucccucuacgcccaggccuccggccgcgucaccgucuccaccaagcgcucccagcagaccgucauccccaacaucggcucccgcccccgcguccgcgacaucuccucccgcaucuccaucuacuggaccaucgucaagcccggcgacauccuccucaucaacuccaccggcaaccucaucgccccccgcggcuacuucaagauccgcuccggcaaguccuccaucaugcgcuccgacgcccccaucggcaagugcaacuccgagugcaucacccccaacggcuccauccccaacgacaagcccuuccagaacgucaaccgcaucaccuacggcgccugcccccgcuacgucaagcagaacacccucaagcucgccaccggcaugcgcaacguccccgagaagcagacccgcggcaucuucggcgccaucgccggcuucaucgagaacggcugggagggcauggucgacggcugguacggcuuccgccaccagaacuccgagggcaccggccaggccgccgaccucaaguccacccaggccgccaucaaccagaucaacggcaagcucaaccgccucaucgagaagaccaacgagaaguuccaccagaucgagaaggaguucuccgaggucgagggccgcauccaggaccucgagaaguacgucgaggacaccaagaucgaccucugguccuacaacgccgagcuccucgucgcccucgagaaccagcacaccaucgaccucaccgacuccgagaugaacaagcucuucgagcgcaccaagaagcagcuccgcgagaacgccgaggacaugggcaacggcugcuucaagaucuaccacaagugcgacaacgccugcaucggcuccauccgcaacggcaccuacgaccacgacgucuaccgcgacgaggcccucaacaaccgcuuccagaucaagggcgucgagcucaaguccggcuacaaggacuggauccucuggaucuccuucgccaucuccugcuuccuccucugcaucguccuccucggcuucaucaugugggccugccagaagggcaacauccgcugcaacaucugcaucuga

SEQ ID NO: 96224 - RNA, 1701 nt, Artificial Sequence
  derived and/or modified CDS sequence (opt2) from hemagglutinin__InfluenzaA__AAY64302
augaagaccaucaucgcccucuccuacauccucugccucgucuucgcccagaagcuccccggcaacgacaacuccaccgccacccucugccucggccaccacgccguccccaacggcacccucgucaagaccaucaccuccgaccagaucgaggucaccaacgccaccgagcucguccaguccuccuccaccggccgcaucugcgacuccccccaccgcauccucgacggcgagaacugcacccucaucgacgcccuccucggcgacccccacugcgacggcuuccagaacaaggagugggaccucuucgucgagcgcuccaaggccuacuccaacugcuaccccuacgacguccccgacuacgccucccuccgcucccucgucgccuccuccggcacccucgaguucaacaacgaguccuucaacuggaccggcgucgcccagaacggcaccuccuucgccugcaagcgccgcuccaucaaguccuucuucucccgccucaacuggcuccaccagcucaaguacaaguaccccgcccucaacgucaccaugcccaacaacgacaaguucgacaagcucuacaucuggggcguccaccaccccuccaccgacuccgaccagaccucccucuacgcccaggccuccggccgcgucaccgucuccaccaagcgcucccagcagaccgucauccccaacaucggcucccgccccuggguccgcggcgucuccucccgcaucuccaucuacuggaccaucgucaagcccggcgacauccuccucaucaacuccaccggcaaccucaucgccccccgcggcuacuucaagauccgcuccggcaaguccuccaucaugaaguccgacgcccccaucggcaagugcaacuccgagugcaucacccccaacggcuccauccccaacgacaagcccuuccagaacgucaaccgcaucaccuacggcgccugcccccgcuacgucaagcagaacacccucaagcucgccaccggcaugcgcaacguccccgagaagcagacccgcggcaucuucggcgccaucgccggcuucaucgagaacggcugggagggcauggucgacggcugguacggcuuccgccaccagaacuccgagggcaccggccaggccgccgaccucaaguccacccaggccgccaucaaccagaucaacggcaagcucaaccgccucaucgagaagaccaacgagaaguuccaccagaucgagaaggaguucaccgaggucgagggccgcauccaggaccucgagaaguacgucgaggacaccaagaucgaccucugguccuacaacgccgagcuccucgucgcccucgagaaccagcacaccaucgaccucaccgacuccgagaugaacaagcucuucgagcgcacccgcaagcagcuccgcgagaacgccgaggacaugggcaacggcugcuucaagaucuaccacaagugcgacaacgucugcaucggcuccauccgcaacggcaccuacgaccacgacgucuaccgcgacgaggcccucaacaaccgcuuccagaucaagggcgucgagcucaaguccggcuacaaggacuggauccucuggaucuccuucgccaccuccugcuuccuccucugcgucguccuccucggcuucaucaugugggccugccagaagggcaacauccgcugcaacaucugcaucuga

SEQ ID NO: 96225 - RNA, 1701 nt, Artificial Sequence; identical to SEQ ID NO: 96219
  derived and/or modified CDS sequence (opt2) from hemagglutinin__InfluenzaA__AAY64312

SEQ ID NO: 96226 - RNA, 1701 nt, Artificial Sequence; identical to SEQ ID NO: 96222
  derived and/or modified CDS sequence (opt2) from hemagglutinin__InfluenzaA__AAY64322

SEQ ID NO: 96227 - RNA, 1701 nt, Artificial Sequence
  derived and/or modified CDS sequence (opt2) from hemagglutinin__InfluenzaA__AAY64332
augaagaccaucaucgcccucuccuacauccucugccucgucuucacccagaagcuccccggcaacgacaacuccaccgccacccucugccucggccaccacgccguccccaacggcaccaucgucaagaccaucaccaacgaccagaucgaggucaccaacgccaccgagcucguccaguccuccuccaccggcggcaucugcgacuccccccaccagauccucgacggcgagaacugcacccucaucgacgcccuccucggcgacccccagugcgacggcuuccagaacaagaagugggaccucuucgucgagcgcuccaaggccuacuccaacugcuaccccuacgacguccccgacuacgccucccuccgcucccucgucgccuccuccggcacccucgaguucaacaacgaguccuucgacuggaccggcgucacccagaacggcaccuccuccgccugcaagcgccgcuccaacaaguccuucuucucccgccucaacuggcucacccaccucaaguucaaguaccccgcccucaacgucaccaugcccaacaacgagaaguucgacaagcucuacaucuggggcguccaccaccccggcaccgacuccgaccagaucucccucuacgcccaggccuccggccgcaucaccgucuccaccaagcgcucccagcagaccgucauccccaacaucggcucccgcccccgcguccgcgacgucuccucccgcaucuccaucuacuggaccaucgucaagcccggcgacauccuccucaucaacuccaccggcaaccucaucgccccccgcggcuacuucaagauccgcuccggcaaguccuccaucaugcgcuccgacgcccccaucggcaagugcaacuccgagugcaucacccccaacggcuccauccccaacgacaagcccuuccagaacgucaaccgcaucaccuacggcgccugcccccgcuacgucaagcagaacacccucaagcucgccaccggcaugcgcaacguccccgagaagcagacccgcggcaucuucggcgccaucgccggcuucaucgagaacggcugggagggcauggucgacggcugguacggcuuccgccaccagaacuccgagggcaccggccaggccgccgaccucaaguccacccaggccgccaucaaccagaucaacggcaagcucaaccgccucaucggcaagaccaacgagaaguuccaccagaucgagaaggaguucuccgaggucgagggccgcauccaggaccucgagaaguacgucgaggacaccaagaucgaccucugguccuacaacgccgagcuccucgucgcccucgagaaccagcacaccaucgaccucaccgacuccgagaugaacaagcucuucgagcgcaccaagaagcagcuccgcgagaacgccgaggacaugggcaacggcugcuucaagaucuaccacaagugcgacaacgccugcaucggcuccauccgcaacggcaccuacgaccacgacgucuaccgcgacgaggcccucaacaaccgcuuccagaucaagggcgucgagcucaaguccggcuacaaggacuggauccucuggaucuccuucgccaucuccugcuuccuccucugcgucgcccuccucggcuucaucaugugggccugccagaagggcaacauccgcugcgacaucugcaucuga

SEQ ID NO: 96228 - RNA, 1701 nt, Artificial Sequence
  derived and/or modified CDS sequence (opt2) from hemagglutinin__InfluenzaA__AAY64342
augaagaccaucaucgcccucuccuacauccucugccucgucuucgcccagaagcuccccggcaacgacaacuccaccgccacccucugccucggccaccacgccguccccaacggcacccucgucaagaccaucaccaacgaccagaucgaggucaccaacgccaccgagcucguccaguccuccuccaccggccgcaucugcgacuccccccaccagauccucgacggcgagaacugcacccucaucgacgcccuccucggcgacccccacugcgacggcuuccagaacaaggagugggaccucuucgucgagcgcuccaaggccuacuccaacugcuaccccuacgacguccccgacuacgccucccuccgcucccucgucgccuccuccggcacccucgaguucaacaacgaguccuucaacuggaccggcgucgcccagaacggcaccuccuccgccugcaagcgccgcuccaacaaguccuucuucucccgccucaacuggcuccaccagcucaaguacaaguaccccgcccucaacgucaccaugcccaacaacgagaaguucgacaagcucuacaucuggggcguccaccaccccuccaccgacuccgaccagaucucccucuacgcccaggccuccggccgcgucaccgucuccaccaagcgcucccagcagaccgucauccccaacaucggcucccgccccuggguccgcggcgucuccucccgcaucuccaucuacuggaccaucgucaagcccggcgacauccuccucaucaacuccaccggcaaccucaucgccccccgcggcuacuucaagauccgcuccggcaaguccuccaucaugcgcuccgacgcccccaucggcaagugcaacuccgagugcaucacccccaacggcuccauccccaacgacaagcccuuccagaacgucaaccgcaucaccuacggcgccugcccccgcuacgucaagcagaacacccucaagcucgccaccggcaugcgcaacguccccgagaagcagacccgcggcaucuucggcgccaucgccggcuucaucgagaacggcugggagggcauggucgacggcugguacggcuuccgccaccagaacuccgagggcaccggccaggccgccgaccucaaguccacccaggccgccaucaaccagaucaacggcaagcucaaccgccucaucgagaagaccaacgagaaguuccaccagaucgagaaggaguucuccgaggucgagggccgcauccaggaccucgagaaguacgucgaggacaccaagaucgaccucugguccuacaacgccgagcuccucgucgcccucgagaaccagcacaccaucgaccucaccgacuccgagaugaacaagcucuucgagcgcaccaagaagcagcuccgcgagaacgccgaggacaugggcaacggcugcuucaagaucuaccacaagugcgacaacgccugcaucggcuccauccgcaacggcaccuacgaccacgacgucuaccgcgacgaggcccucaacaaccgcuuccagaucaagggcgucgagcucaaguccggcuacaaggacuggauccucuggaucuccuucgccaccuccugcuuccuccucugcgucguccuccucggcuucaucaugugggccugccagaagggcaacauccgcugcaacaucugcaucuga

SEQ ID NO: 96229 - RNA, 1701 nt, Artificial Sequence; identical to SEQ ID NO: 96068
  derived and/or modified CDS sequence (opt2) from hemagglutinin__InfluenzaA__AAY64352

SEQ ID NO: 96230 - RNA, 1701 nt, Artificial Sequence
  derived and/or modified CDS sequence (opt2) from hemagglutinin__InfluenzaA__AAY64362
augaagaccaucaucgcccucuccuacauccucugccucgucuucgcccagaagcuccccggcaacgacaacuccaccgccacccucugccucggccaccacgccguccccaacggcaccaucgucaagaccaucaccaacgaccagaucgaggucaccaacgccaccgagcucguccaguccuccuccaccggcgagaucugcgacuccccccaccagauccucgacggcgagaacugcacccucaucgacgcccuccucggcgacccccagugcgacggcuuccagaacaagaagugggaccucuucgucgagcgcuccaaggccuacuccaacugcuaccccuacgacguccccgacuacgccucccuccgcucccucgucgccuccuccggcacccucgaguucaacaacgaguccuucgacuggaccggcgucacccagaacggcaccuccuccgccugcaagcgccgcuccaacaaguccuucuucucccgccucaacuggcucacccaccucaaguacaaguaccccgcccucaacgucaccaugcccaacaacgagaaguucgacaagcucuacaucuggggcguccaccaccccggcaccgacuccgaccagaucucccucuacgcccaggccuccggccgcaucaccgucuccaccaagcgcucccagcagaccgucauccccaacaucggcucccgcccccgcguccgcgacaucuccucccgcaucuccaucuacuggaccaucgucaagcccggcgacauccuccucaucaacuccaccggcaaccucaucgccccccgcggcuacuucaagauccgcuccggcaaguccuccaucaugcgcuccgacgcccccaucggcaagugcaacuccgagugcaucacccccaacggcuccauccccaacgacaagcccuuccagaacgucaaccgcaucaccuacggcgccugcccccgcuacaucaagcagaacacccucaagcucgccaccggcaugcgcaacguccccgagaagcagacccgcggcaucuucggcgccaucgccggcuucaucgagaacggcugggagggcauggucgacggcugguacggcuuccgccaccagaacuccgagggcaccggccaggccgccgaccucaaguccacccaggccgccaucaaccagaucaacggcaagcucaaccgccucaucggcaagaccaacgagaaguuccaccagaucgagaaggaguucuccgaggucgagggccgcauccaggaccucgagaaguacgucgaggacaccaagaucgaccucugguccuacaacgccgagcuccucgucgcccucgagaaccagcacaccaucgaccucaccgacuccgagaugaacaagcucuucgagcgcaccaagaagcagcuccgcgagaacgccgaggacaugggcaacggcugcuucaagaucuaccacaagugcgacaacgccugcaucggcuccauccgcaacggcaccuacgaccacgacgucuaccgcgacgaggcccucaacaaccgcuuccagaucaagggcgucgagcucaaguccggcuacaaggacuggauccucuggaucuccuucgccaucuccugcuuccuccucugcgucgcccuccucggcuucaucaugugggccugccagaagggcaacauccgcugcaacaucugcaucuga

SEQ ID NO: 96231 - RNA, 1701 nt, Artificial Sequence; identical to SEQ ID NO: 96222
  derived and/or modified CDS sequence (opt2) from hemagglutinin__InfluenzaA__AAY64382

SEQ ID NO: 96232 - RNA, 1701 nt, Artificial Sequence
  derived and/or modified CDS sequence (opt2) from hemagglutinin__InfluenzaA__AAY64392
augaagaccaucaucgcccucuccuacauccucugccucgucuucgcccagaagcuccccggcaacgacaacuccaccgccacccucugccucggccaccacgccguccccaacggcaccaucgucaagaccaucaccaacgaccagaucgaggucaccaacgccaccgagcucguccaguccuccuccaccggcggcaucugcgacuccccccaccagauccucgacggcgagaacugcacccucaucgacgcccuccucggcgacccccagugcgacggcuuccagaacaagaagugggaccucuucgucgagcgcuccaaggccuacuccaacugcuaccccuacgacguccccgacuacgccucccuccgcucccucgucgccuccuccggcacccucgaguucaacaacgaguccuucaacuggaccggcgucacccagaacggcaccuccuccgccugcaagcgccgcuccaacaaguccuucuucucccgccucaacuggcucacccaccucaaguacaaguaccccgcccucaacgucaccaugcccaacaacgagaaguucgacaagcucuacaucuggggcguccaccaccccggcaccgacaacgaccagaucucccucuacgcccaggccuccggccgcaucaccgucuccaccaagcgcucccagcagaccgucauccccaacaucggcucccgcccccgcguccgcgacgucuccucccgcaucuccaucuacuggaccaucgucaagcccggcgacauccuccucaucaacuccaccggcaaccucaucgccccccgcggcuacuucaagauccgcuccggcaaguccuccaucaugcgcuccgacgcccccaucggcaagugcaacuccgagugcaucacccccaacggcuccauccccaacgacaagcccuuccagaacgucaaccgcaucaccuacggcgccugcccccgcuacgucaagcagaacacccucaagcucgccaccggcaugcgcaacguccccgagaagcagacccgcggcaucuucggcgccaucgccggcuucaucgagaacggcugggagggcauggucgacggcugguacggcuuccgccaccagaacuccgagggcaccggccaggccgccgaccucaaguccacccaggccgccaucaaccagaucaacggcaagcucaaccgccucaucggcaagaccaacgagaaguuccaccagaucgagaaggaguucuccgaggucgagggccgcauccaggaccucgagaaguacgucgaggacaccaagaucgaccucugguccuacaacgccgagcuccucgucgcccucgagaaccagcacaccaucgaccucaccgacuccgagaugaacaagcucuucgagcgcaccaagaagcagcuccgcgagaacgccgaggacaugggcaacggcugcuucaagaucuaccacaagugcgacaacgccugcaucggcuccauccgcaacggcaccuacgaccacgacgucuaccgcgacgaggcccucaacaaccgcuuccagaucaagggcgucgagcucaaguccggcuacaaggacuggauccucuggaucuccuucgccaucuccugcuuccuccucugcgucgcccuccucggcuucaucaugugggccugccagaagggcaacauccgcugcaacaucugcaucuga

SEQ ID NO: 96233 - RNA, 1701 nt, Artificial Sequence; identical to SEQ ID NO: 96224
  derived and/or modified CDS sequence (opt2) from hemagglutinin__InfluenzaA__AAY64402

SEQ ID NO: 96234 - RNA, 1701 nt, Artificial Sequence; identical to SEQ ID NO: 96222
  derived and/or modified CDS sequence (opt2) from hemagglutinin__InfluenzaA__AAY98037

SEQ ID NO: 96235 - RNA, 1701 nt, Artificial Sequence; identical to SEQ ID NO: 96222
  derived and/or modified CDS sequence (opt2) from hemagglutinin__InfluenzaA__AAY98047

SEQ ID NO: 96236 - RNA, 1701 nt, Artificial Sequence; identical to SEQ ID NO: 96083
  derived and/or modified CDS sequence (opt2) from hemagglutinin__InfluenzaA__AAY98057

SEQ ID NO: 96237 - RNA, 1701 nt, Artificial Sequence
  derived and/or modified CDS sequence (opt2) from hemagglutinin__InfluenzaA__AAY98067
augaagaccaucaucgcccucuccuacauccucugccucgucuucgcccaggagcuccccggcaacgacaacuccaccgccacccucugccucggccaccacgccguccccaacggcacccucgucaagaccaucaccaacgaccagaucgaggucaccaacgccaccgagcucguccaguccuccuccaccggccgcaucugcgacuccccccaccagauccucgacggcgagaacugcacccucaucgacgcccuccucggcgacccccacugcgacggcuuccagaacaaggagugggaccucuucgucgagcgcuccaaggccuacuccaacugcuaccccuacgacguccccgacuacgucucccuccgcucccucgucgccuccuccggcacccucgaguucaacaacgaguccuucaacuggaccggcgucgcccagaacggcaccuccuccgccugcaagcgccgcuccgacaaguccuucuucucccgccucaacuggcuccaccagcucaaguacaaguaccccgcccucaacgucaccaugcccaacaacgagaaguucgacaagcucuacaucuggggcguccaccaccccggcaccgacuccgaccagaucucccucuacgcccaggccuccggccgcgucaccgucuccaccaagcgcucccagcagaccgucauccccaacaucggcuccggccccuggguccgcggcgucuccucccgcaucuccaucuacuggaccaucgucaagcccggcgacauccuccucaucaacuccaccggcaaccucaucgccccccgcggcuacuucaagauccgcuccggcaaguccuccaucaugcgcuccgacgcccccaucggcaagugcaacuccgagugcaucacccccaacggcuccauccccaacgacaagcccuuccagaacgucaaccgcaucaccuacggccccugcccccgcuacgucaagcagaacacccucaagcucgccaccggcaugcgcaacguccccgagaagcagacccgcggcaucuucggcgccaucgccggcuucaucgagaacggcugggagggcaugauggacggcugguacggcuuccgccaccagaacuccgagggcaccggccaggccgccgaccucaaguccacccaggccgccaucaaccagaucaacggcaagcucaaccgccucaucgagaagaccaacgagaaguuccaccagaucgagaaggaguucuccgaggucgagggccgcauccaggaccucgagaaguacgucgaggacaccaagaucgaccucugguccuacaacgccgagcuccucgucgcccucgagaaccagcacaccaucgaccucaccgacuccgagaugaacaagcucuucgagcgcaccaagaagcagcuccgcgagaacgccgaggacaugggcaacggcugcuucaagaucuaccacaagugcgacaacgccugcaucggcuccauccgcaacggcaccuacgaccacgacgucuaccgcgacgaggcccucaacaaccgcuuccagaucaagggcgucgagcucaaguccggcuacaaggacuggauccucuggaucuccuucgccaucuccugcuuccuccucugcaucguccuccucggcuucaucaugugggccugccagaagggcaacauccgcugcaacaucugcaucuga

SEQ ID NO: 96238 - RNA, 1701 nt, Artificial Sequence
  derived and/or modified CDS sequence (opt2) from hemagglutinin__InfluenzaA__AAY98077
augaagaccaucaucgcccucuccuacauccucugccucgucuucgcccagaagcuccccggcaacgacaacuccaccgccacccucugccucggccaccacgccguccccaacggcacccucgucaagaccaucaccaacgaccagaucgaggucaccaacgccaccgagcucguccaguccuccuccgccucccgcaucugcgacuccccccaccagauccucgacggcgagaacugcacccucaucgacgcccuccucggcgacccccacugcgacggcuuccagaacaaggagugggaccucuucgucgagcgcuccaaggccuacuccaacugcuaccccuacgacguccccgacuacgucucccuccgcucccucgucgccuccuccggcacccucgaguucaacaacgaguccuucaacuggaccggcgucgcccagaacggcaccuccuccgccugcaagcgccgcuccgacaaguccuucuucucccgccucaacuggcuccaccagcucaaguacaaguaccccgcccucaacgucaccaugcccaacaacgagaaguucgacaagcucuacaucuggggcguccaccaccccggcaccgacuccgaccagaucucccucuacgcccaggccuccggccgcgucaccgucuccaccaagcgcucccagcagaccgucauccccaacaucggcucccgccccuggguccgcggcgucuccucccgcaucuccaucuacuggaccaucgucaagcccggcgacauccuccucaucaacuccaccggcaaccucaucgccccccgcggcuacuucaagauccgcuccggcaaguccuccaucaugcgcuccgacgcccccaucggcaagugcaacuccgagugcaucacccccaacggcuccauccccaacgacaagcccuuccagaacgucaaccgcaucaccuacggcgccugcccccgcuacgucaagcagaacacccucaagcucgccaccggcaugcgcaacguccccgagaagcagacccgcggcaucuucggcgccaucgccggcuucaucgagaacggcugggagggcaugauggacggcugguacggcuuccgccaccagaacuccgagggcaccggccaggccgccgaccucaaguccacccaggccgccaucaaccagaucaacggcaagcucaaccgccucaucgagaagaccaacgagaaguuccaccagaucgagaaggaguucuccgaggucgagggccgcauccaggaccucgagaaguacgucgaggacaccaagaucgaccucugguccuacaacgccgagcuccucgucgcccucgagaaccagcacaccaucgaccucaccgacuccgagaugaacaagcucuucgagcgcaccaagaagcagcuccgcgagaacgccgaggacaugggcaacggcugcuucaagaucuaccacaagugcgacaacgccugcaucggcuccauccgcaacggcaccuacgaccacgacgucuaccgcgacgaggcccucaacaaccgcuuccagaucaagggcgucgagcucaaguccggcuacaaggacuggauccucuggaucuccuucgccaucuccugcuuccuccucugcaucguccuccucggcuucaucaugugggccugccagaagggcaacauccgcugcaacaucugcaucuga

SEQ ID NO: 96239 - RNA, 1701 nt, Artificial Sequence
  derived and/or modified CDS sequence (opt2) from hemagglutinin__InfluenzaA__AAY98087
augaagaccaucaucgcccucuccuacauccucugccucgucuucgcccagaagcuccccggcaacgacaacuccaccgccacccucugccucggccaccacgccguccccaacggcacccucgucaagaccaucaccaacgaccagaucgaggucaccaacgccaccgagcucguccaguccuccuccaccggccgcaucugcgacuccccccaccgcauccucgacggcgagaacugcacccucaucgacgcccuccucggcgacccccacugcgacggcuuccagaacaaggagugggaccucuucgucgagcgcuccaaggccuacuccaacugcuaccccuacgacguccccgacuacgccucccuccgcucccucgucgccuccuccggcacccucgaguucaacaacgaguccuucaacuggaccggcgucgcccagaacggcaccuccuccgccugcaagcgccgcuccaucaaguccuucuucucccgccucaacuggcuccaccagcucaaguacaaguaccccgcccucaacgucaccaugcccaacaacgacaaguucgacaagcucuacaucuggggcguccaccaccccuccaccgacuccgaccagaccucccucuacgcccaggccuccggccgcgucaccgucuccaccaagcgcucccagcagaccgucauccccaacaucggcucccgccccuggguccgcggcgucuccucccgcaucuccaucuacuggaccaucgucaagcccggcgacauccuccucaucaacuccaccggcaaccucaucgccccccgcggcuacuucaagauccgcuccggcaaguccuccaucaugcgcuccgacgcccccaucggcaagugcaacuccgagugcaucacccccaacggcuccauccccaacgacaagcccuuccagaacgucaaccgcaucaccuacggcgccugcccccgcuacgucaagcagaacacccucaagcucgccaccggcaugcgcaacguccccgagaagcagacccgcggcaucuucggcgccaucgccggcuucaucgagaacggcugggagggcauggucgacggcugguacggcuuccgccaccagaacuccgagggcaccggccaggccgccgaccucaaguccacccaggccgccaucaaccagaucaacggcaagcucaaccgccucaucgagaagaccaacgagaaguuccaccagaucgagaaggaguucuccgaggucgagggccgcauccaggaccucgagaaguacgucgaggacaccaagaucgaccucugguccuacaacgccgagcuccucgucgcccucgagaaccagcacaccaucgaccucaccgacuccgagaugaacaagcucuucgagcgcacccgcaagcagcuccgcgagaacgccgaggacaugggcaacggcugcuucaagaucuaccacaagugcgacaacgccugcaucggcuccauccgcaacggcaccuacgaccacgacgucuaccgcgacgaggcccucaacaaccgcuuccagaucaagggcgucgagcucaaguccggcuacaaggacuggauccucuggaucuccuucgccaucuccugcuuccuccucugcgucguccuccucggcuucaucaugugggccugccagaagggcaacauccgcugcaacaucugcaucuga

SEQ ID NO: 96240 - RNA, 1701 nt, Artificial Sequence; identical to SEQ ID NO: 96222
  derived and/or modified CDS sequence (opt2) from hemagglutinin__InfluenzaA__AAY98097

SEQ ID NO: 96241 - RNA, 1701 nt, Artificial Sequence; identical to SEQ ID NO: 96222
  derived and/or modified CDS sequence (opt2) from hemagglutinin__InfluenzaA__AAY98107

SEQ ID NO: 96242 - RNA, 1701 nt, Artificial Sequence
  derived and/or modified CDS sequence (opt2) from hemagglutinin__InfluenzaA__AAY98117
augaagaccaucaucgcccucuccuacauccucugccucgucuucgcccagaagcuccccggcaacgacaacuccaccgccacccucugccucggccaccacgccguccccaacggcacccucgucaagaccaucaccaacgaccagaucgaggucaccaacgccaccgagcucguccaguccuccuccaccggccgcaucugcgacuccccccaccagauccucgacggcgagaacugcacccucaucgacgcccuccucggcgacccccacugcgacggcuuccagaacaaggagugggaccucuucgucgagcgcuccaaggccuacuccaacugcuaccccuacgacguccccgacuacgccucccuccgcucccucgucgccuccuccggcacccucgaguucaacaacgaguccuucaacuggaccggcgucgcccagaacggcaccuccuccgccugcaagcgcggcuccaacaaguccuucuucucccgccucaacuggcuccaccagcucaaguacaaguaccccgcccucaacgucaccaugcccaacaacgagaaguucgagaagcucuacaucuggggcguccaccaccccuccaccgacuccgaccagaucucccucuacgcccaggccuccggccgcgucaccgucuccaccaagcgcucccagcagaccgucauccccaacaucggcucccgccccuggguccgcggcgucuccucccgcaucuccaucuacuggaccaucgucaagcccggcgacauccuccucaucaacuccaccggcaaccucaucgccccccgcggcuacuucaagauccgcuccggcaaguccuccaucaugcgcuccgacgcccccaucggcaagugcaacuccgagugcaucacccccaacggcuccauccccaacgacaagcccuuccagaacgucaaccgcaucaccuacggcgccugcccccgcuacgucaagcagaacacccucaagcucgccaccggcaugcgcaacguccccgagaagcagacccgcggcaucuucggcgccaucgccggcuucaucgagaacggcugggagggcauggucgacggcugguacggcuuccgccaccagaacuccgagggcaccggccaggccgccgaccucaaguccacccaggccgccaucaaccagaucaacggcaagcucaaccgccucaucgagaagaccaacgagaaguuccaccagaucgagaaggaguucuccgaggucgagggccgcauccaggaccucgagaaguacgucgaggacaccaagaucgaccucugguccuacaacgccgagcuccucgucgcccucgagaaccagcacaccaucgaccucaccgacuccgagaugaacaagcucuucgagcgcaccaagaagcagcuccgcgagaacgccgaggacaugggcaacggcugcuucaagaucuaccacaagugcgacaacgccugcaucggcuccauccgcaacggcaccuacgaccacgacgucuaccgcgacgaggcccucaacaaccgcuuccagaucaagggcgucgagcucaaguccggcuacaaggacuggauccucuggaucuccuucgccaucuccugcuuccuccucugcgucguccuccucggcuucaucaugugggccugccagaagggcaacauccgcugcaacaucugcaucuga

SEQ ID NO: 96243 - RNA, 1701 nt, Artificial Sequence; identical to SEQ ID NO: 96222
  derived and/or modified CDS sequence (opt2) from hemagglutinin__InfluenzaA__AAY98147

SEQ ID NO: 96244 - RNA, 1701 nt, Artificial Sequence; identical to SEQ ID NO: 96222
  derived and/or modified CDS sequence (opt2) from hemagglutinin__InfluenzaA__AAY98157

SEQ ID NO: 96245 - RNA, 1701 nt, Artificial Sequence
  derived and/or modified CDS sequence (opt2) from hemagglutinin__InfluenzaA__AAY98167
augaagaccaucaucgcccucuccuacauccucugccucgucuucgcccagaagcuccccggcaacgacaacuccaccgccacccucugccucggccaccacgccguccccaacggcacccucgucaagaccaucaccaacgaccagaucgaggucaccaacgccaccgagcucguccaguccuccuccaccggccgcaucugcgacuccccccaccagauccucgacggcgagaacugcacccucaucgacgcccuccucggcgacccccacugcgacggcuuccagaacaaggagugggaccucuucgucgagcgcuccaaggccuacuccaacugcuaccccuacgacguccccgacuacgccucccuccgcucccucgucgccuccuccggcacccucgaguucaacaacgaguccuucaacuggaccggcgucgcccagaacggcaccuccuccgccugcaagcgccgcuccaacaaguccuucuucucccgccucaacuggcuccaccagcucaaguacaaguaccccgcccucaacgucaccaugcccaacaacgagaaguucgacaagcucuacaucuggggcguccaccaccccuccaccgacuccgaccagaucucccucuacgcccaggccuccggccgcgucaccgucuccacccagcgcucccagcagaccgucauccccaacaucggcucccgccccuggguccgcggcgucuccucccgcaucuccaucuacuggaccaucgucaagcccggcgacauccuccucaucaacuccaccggcaaccucaucgccccccgcggcuacuucaagauccgcuccggcaaguccuccaucaugcgcuccgacgcccccaucggcaagugcaacuccgagugcaucacccccaacggcuccauccccaacgacaagcccuuccagaacgucaaccgcaucaccuacggcgccugcccccgcuacgucaagcagaacacccucaagcucgccaccggcaugcgcaacguccccgagaagcagacccgcggcaucuucggcgccaucgccggcuucaucgagaacggcugggagggcauggucgacggcugguacggcuuccgccaccagaacuccgagggcaccggccaggccgccgaccucaaguccacccaggccgccaucaaccagaucaacggcaagcucaaccgccucaucgagaagaccaacgagaaguuccaccagaucgagaaggaguucuccgaggucgagggccgcauccaggaccucgagaaguacgucgaggacaccaagaucgaccucugguccuacaacgccgagcuccucgucgcccucgagaaccagcacaccaucgaccucaccgacuccgagaugaacaagcucuucgagcgcaccaagaagcagcuccgcgagaacgccgaggacaugggcaacggcugcuucaagaucuaccacaagugcgacaacgccugcaucggcuccauccgcaacggcaccuacgaccacgacgucuaccgcgacgaggcccucaacaaccgcuuccagaucaagggcgucgagcucaaguccggcuacaaggacuggauccucuggaucuccuucgccaucuccugcuuccuccucugcgucguccuccucggcuucaucaugugggccugccagaagggcaacauccgcugcaacaucugcaucuga

SEQ ID NO: 96246 - RNA, 1701 nt, Artificial Sequence
  derived and/or modified CDS sequence (opt2) from hemagglutinin__InfluenzaA__AAY98177
augaagaccaucaucgcccucuccuacauccucugccucgucuucgcccagaagcuccccggcaacgacaacuccaccgccacccucugccucggccaccacgccguccccaacggcacccucgucaagaccaucaccaacgaccagaucgaggucaccaacgccaccgagcucguccaguccuccuccaccggccgcaucugcgacuccccccaccagauccucgacggcgagaacugcacccucaucgacgcccuccucggcgacccccacugcgacggcuuccagaacaaggagugggaccucuucgucgagcgcuccaaggccuacuccaacugcuaccccuacgacguccccgacuacgccucccuccgcucccucgucgccuccuccggcacccucgaguucaacaacgaguccuucaacuggaccggcgucgcccagaacggcaccuccuccgccugcaagcgccgcuccaacaaguccuucuucucccgccucaacuggcuccaccagcucaaguacaaguaccccgcccucaacgucaccaugcccaacaacgagaaguucgacaagcucuacaucuggggcguccaccaccccuccaccgacuccgaccagaucucccucuacgcccaggccuccggccgcgucaccgucuccaccaagcgcucccagcagaccgucauccccaacaucggcucccgccccuggguccgcggcgucuccucccgcaucuccaucuacuggaccaucgucaagcccggcgacauccuccucaucaacuccaccggcaaccucaucgccccccgcggcuacuucaagauccgcuccggcaaguccuccaucaugcgcuccgacgcccccaucggcaagugcaacuccgagugcaucacccccaacggcuccauccccaacgacaagcccuuccagaacgucaaccgcaucaccuacggcgccugcccccgcuacgucaagcagaacacccucaagcucgccaccggcaugcgcaacguccccgagaagcagacccgcggcaucuucggcgccaucgccggcuucaucgagaacggcugggagggcauggucgacggcugguacggcuuccgccaccagaacuccgagggcaccggccaggccgccgaccucaaguccacccaggccgccaucaaccagaucaacggcaagcucaaccgccucaucgagaagaccaacgagaaguuccaccagaucgagaaggaguucuccgaggucgagggccgcauccaggaccucgagaaguacgucgaggacaccaagaucgaccucugguccuacaacgccggccuccucgucgcccucgagaaccagcacaccaucgaccucaccgacuccgagaugaacaagcucuucgagcgcaccaagaagcagcuccgcgagaacgccgaggacaugggcaacggcugcuucaagaucuaccacaagugcgacaacgccugcaucggcuccauccgcaacggcaccuacgaccacgacgucuaccgcgacgaggcccucaacaaccgcuuccagaucaagggcgucgagcucaaguccggcuacaaggacuggauccucuggaucuccuucgccaucuccugcuuccuccucugcgucguccuccucggcuucaucaugugggccugccagaagggcaacauccgcugcaacaucugcaucuga

SEQ ID NO: 96247 - RNA, 1701 nt, Artificial Sequence
  derived and/or modified CDS sequence (opt2) from hemagglutinin__InfluenzaA__AAY98195
augaagaccaucaucgcccucuccuacauccucugccucgucuucgcccagaagcuccccggcaacgacaacuccaccgccacccucugccucggccaccacgccguccccaacggcacccucgucaagaccaucaccaacgaccagaucgaggucaccaacgccaccgagcucguccaguccuccuccaccggccgcaucugcgacuccccccaccagauccucgacggcgagaacugcacccucaucgacgcccuccucggcgacccccacugcgacggcuuccagaacaaggagugggaccucuucgucgagcgcuccaaggccuacuccaacugcuaccccuacgacguccccgacuacgccucccuccgcucccucgucgccuccuccggcacccucgaguucaacaacgaguccuucaacuggaccggcgucgcccagaacggcaccuccuccgccugcaagcgccgcuccaacaaguccuucuucucccgccucaacuggcuccaccagcucaaguacaaguaccccgcccucaacgucaccaugcccaacaacgagaaguucgacaagcucuacaucuggggcguccaccaccccuccaccgacuccgaccagaucucccucuacgcccaggccuccggccgcgucaccgucuccaccaagcgcucccagcagaccgucauccccaacaucggcucccgccccuggguccgcggcgucuccucccgcaucuccaucuacuggaccaucgucaagcccggcgacauccuccucaucaacuccaccggcaaccucaucgccccccgcggcuacuucaagauccgcuccggcaaguccuccaucaugcgcuccgacgcccccaucggcaagugcaacuccgagugcaucacccccaacggcuccauccccaacgacaagcccuuccagaacgucaaccgcaucaccuacggcgccugcccccgcuacgucaagcagaacacccucaagcucgccaccggcaugcgcaacguccccgagaagcagacccgcggcaucuucggcgccaucgccggcuucaucgagaacggcugggagggcauggucgacggcugguacggcuuccgccaccagaacuccgagggcaccggccaggccgccgaccucaaguccacccaggccgccaucaaccagaucaacggcaagcucaaccgccucaucgagaagaccaacgagaaguuccaccagaucgagaaggaguucuccgaggucgagggccgcauccaggaccucgagaaguacgucgaggacaccaagaucgaccucugguccuacaacgccgagcuccucgucgcccucgagaaccagcacaccaucgaccucaccgacuccgagaugaacaagcucuucgagcgcacccgcaagcagcuccgcgagaacgccgaggacaugggcaacggcugcuucaagaucuaccacaagugcgacaacgccugcaucggcuccauccgcaacggcaccuacgaccacgacgucuaccgcgacgaggcccucaacaaccgcuuccagaucaagggcgucgagcucaaguccggcuacaaggacuggauccucuggaucuccuucgccaucuccugcuuccuccucugcgucguccuccucggcuucaucaugugggccugccagaagggcaacauccgcugcaacaucugcaucuga

SEQ ID NO: 96248 - RNA, 1701 nt, Artificial Sequence; identical to SEQ ID NO: 96222
  derived and/or modified CDS sequence (opt2) from hemagglutinin__InfluenzaA__AAY98207

SEQ ID NO: 96249 - RNA, 1701 nt, Artificial Sequence; identical to SEQ ID NO: 96224
  derived and/or modified CDS sequence (opt2) from hemagglutinin__InfluenzaA__AAY98217

SEQ ID NO: 96250 - RNA, 1701 nt, Artificial Sequence; identical to SEQ ID NO: 96222
  derived and/or modified CDS sequence (opt2) from hemagglutinin__InfluenzaA__AAY98227

SEQ ID NO: 96251 - RNA, 1701 nt, Artificial Sequence; identical to SEQ ID NO: 96222
  derived and/or modified CDS sequence (opt2) from hemagglutinin__InfluenzaA__AAY98237

SEQ ID NO: 96252 - RNA, 1701 nt, Artificial Sequence
  derived and/or modified CDS sequence (opt2) from hemagglutinin__InfluenzaA__AAY98247
augaagaccaucaucgcccucuccuacauccucugccucgucuucgcccagaagcuccccggcaacgacaacuccaccgccacccucugccucggccaccacgccguccccaacggcacccucgucaagaccaucaccaacgaccagaucgaggucaccaacgccaccgagcucguccaguccuccuccaccggccgcaucugcgacuccccccaccagauccucgacggcgagaacugcacccucaucgacgcccuccucggcgacccccacugcgacggcuuccagaacaaggagugggaccucuucgucgagcgcuccaaggccuacuccaacugcuaccccuacgacguccccgacuacgccucccuccgcucccucgucgccuccuccggcacccucgaguucaacaacgaguccuucaacuggaccggcgucgcccagaacggcaccuccuccgccugcaagcgccgcuccaacaaguccuucuucucccgccucaacuggcuccaccagcucaaguacaaguaccccgcccucaacgucaccaugcccaacaacgagaaguucgacaagcucuacaucuggggcguccaccaccccuccaccgacuccgaccagaucucccucuacgcccaggccuccggccgcgucaccgucuccaccaagcgcucccagcagaccgucauccccaacaucggcucccgccccuggguccgcggcgucuccucccgcaucuccaucuacuggaccaucgucaagcccggcgacauccuccucaucaacuccaccggcaaccucaucgccccccgcggcuacuucaagauccgcuccggcaaguccuccaucaugcgcuccgacgcccccaucggcaagugcaacuccgagugcaucacccccaacggcuccauccccaacgacaagcccuuccagaacgucaaccgcaucaccuacggcgccugcccccgcuacaucaagcagaacacccucaagcucgccaccggcaugcgcaacguccccgagaagcagacccgcggcaucuucggcgccaucgccggcuucaucgagaacggcugggagggcauggucgacggcugguacggcuuccgccaccagaacuccgagggcaccggccaggccgccgaccucaaguccacccaggccgccaucaaccagaucaacggcaagcucaaccgccucaucgagaagaccaacgagaaguuccaccagaucgagaaggaguucuccgaggucgagggccgcauccaggaccucgagaaguacgucgaggacaccaagaucgaccucugguccuacaacgccgagcuccucgucgcccucgagaaccagcacaccaucgaccucaccgacuccgagaugaacaagcucuucgagcgcaccaagaagcagcuccgcgagaacgccgaggacaugggcaacggcugcuucaagaucuaccacaagugcgacaacgccugcaucggcuccauccgcaacggcaccuacgaccacgacgucuaccgcgacgaggcccucaacaaccgcuuccagaucaagggcgucgagcucaaguccggcuacaaggacuggauccucuggaucuccuucgccaucuccugcuuccuccucugcgucguccuccucggcuucaucaugugggccugccagaagggcaacauccgcugcaacaucugcaucuga

SEQ ID NO: 96253 - RNA, 1701 nt, Artificial Sequence; identical to SEQ ID NO: 96222
  derived and/or modified CDS sequence (opt2) from hemagglutinin__InfluenzaA__AAY98319

SEQ ID NO: 96254 - RNA, 1701 nt, Artificial Sequence
  derived and/or modified CDS sequence (opt2) from hemagglutinin__InfluenzaA__AAY98329
augaagaccaucaucgcccucuccuacauccucugccucgucuucgcccagaagcuccccggcaacgacaacuccaccgccacccucugccucggccaccacgccguccccaacggcacccucgucaagaccaucaccaacgaccagaucgaggucaccaacgccaccgagcucguccaguccuccuccaccggccgcaucugcgacuccccccaccagauccucgacggcgagaacugcacccucaucgacgcccuccucggcgacccccacugcgacggcuuccagaacaaggagugggaccucuucgucgagcgcuccaaggccuacuccaacugcuaccccuacgacguccccgacuacgccucccuccgcucccucgucgccuccuccggcacccucgaguucaacaacgaguccuucaacuggaccggcgucgcccagaacggcaccuccuccgccugcaagcgccgcuccaacaaguccuucuucucccgccucaacuggcuccaccagcucaaguacaaguaccccgcccucaacgucaccaugcccaacaacgagaaguucgacaagcucuacaucuggggcguccaccaccccuccaccgacuccgaccagaucucccucuacgcccaggcccucggccgcgucaccgucuccaccaagcgcucccagcagaccgucauccccaacaucggcucccgccccuggguccgcggcgucuccucccgcaucuccaucuacuggaccaucgucaagcccggcgacauccuccucaucaacuccaccggcaaccucaucgccccccgcggcuacuucaagauccgcuccggcaaguccuccaucaugcgcuccgacgcccccaucggcaagugcaacuccgagugcaucacccccaacggcuccauccccaacgacaagcccuuccagaacgucaaccgcaucaccuacggcgccugcccccgcuacgucaagcagaacacccucaagcucgccaccggcaugcgcaacguccccgagaagcagacccgcggcaucuucggcgccaucgccggcuucaucgagaacggcugggagggcauggucgacggcugguacggcuuccgccaccucaacuccgagggcaccggccaggccgccgaccucaaguccacccaggccgccaucaaccagaucaacggcaagcucaaccgccucaucgagaagaccaacgagaaguuccaccagaucgagaaggaguucuccgaggucgagggccgcauccaggaccucgagaaguacgucgaggacaccaagaucgaccucugguccuacaacgccgagcuccucgucgcccucgagaaccagcacaccaucgaccucaccgacuccgagaugaacaagcucuucgagcgcaccaagaagcagcuccgcgagaacgccgaggacaugggcaacggcugcuucaagaucuaccacaagugcgacaacgccugcaucggcuccauccgcaacggcaccuacgaccacgacgucuaccgcgacgaggcccucaacaaccgcuuccagaucaagggcgucgagcucaaguccggcuacaaggacuggauccucuggaucuccuucgccaucuccugcuuccuccucugcgucguccuccucggcuucaucaugugggccugccagaagggcaacauccgcugcaacaucugcaucuga

SEQ ID NO: 96255 - RNA, 1701 nt, Artificial Sequence; identical to SEQ ID NO: 96222
  derived and/or modified CDS sequence (opt2) from hemagglutinin__InfluenzaA__AAY98339

SEQ ID NO: 96256 - RNA, 1701 nt, Artificial Sequence; identical to SEQ ID NO: 96222
  derived and/or modified CDS sequence (opt2) from hemagglutinin__InfluenzaA__AAY98353

SEQ ID NO: 96257 - RNA, 1701 nt, Artificial Sequence
  derived and/or modified CDS sequence (opt2) from hemagglutinin__InfluenzaA__AAY98366
augaagaccaucaucgcccucuccuacauccucugccucgucuucgcccagaagcuccccggcaacgacaacuccaccgccacccucugccucggccaccacgccguccccaacggcacccucgucaagaccaucaccuccgaccagaucgaggucaccaacgccaccgagcucguccaguccuccuccaccggccgcaucugcgacuccccccaccgcauccucgacggcgagaacugcacccucaucgacgcccuccucggcgacccccacugcgacggcuuccagaacaaggagugggaccucuucgucgagcgcuccaaggccuacuccaacugcuaccccuacgacguccccgacuacgccucccuccgcucccucgucgccuccuccggcacccucgaguucaacaacgaguccuucaacuggaccggcgucgcccagaacggcaccuccuucgccugcaagcgccgcuccaucaaguccuucuucucccgccucaacuggcuccaccagcucaaguacaaguaccccgcccucaacgucaccaugcccaacaacgacaaguucgacaagcucuacaucuggggcguccaccaccccggcaccgacuccgaccagaccucccucuacgcccaggccuccggccgcgucaccgucuccaccaagcgcucccagcagaccgucauccccaacaucggcucccgccccuggguccgcggcgucuccucccgcaucuccaucuacuggaccaucgucaagcccggcgacauccuccucaucaacuccaccggcaaccucaucgccccccgcggcuacuucaagauccgcuccggcaaguccuccaucaugcgcuccgacgcccccaucggcaagugcaacuccgagugcaucacccccaacggcuccauccccaacgacaagcccuuccagaacgucaaccgcaucaccuacggcgccugcccccgcuacgucaagcagaacacccucaagcucgccaccggcaugcgcaacguccccgagaagcagacccgcggcaucuucggcgccaucgccggcuucaucgagaacggcugggagggcauggucgacggcugguacggcuuccgccaccagaacuccgagggcaccggccaggccgccgaccucaaguccacccaggccgccaucaaccagaucaacggcaagcucaaccgccucaucgagaagaccaacgagaaguuccaccagaucgagaaggaguucaccgaggucgagggccgcauccaggaccucgagaaguacgucgaggacaccaagaucgaccucugguccuacaacgccgagcuccucgucgcccucgagaaccagcacaccaucgaccucaccgacuccgagaugaacaagcucuucgagcgcacccgcaagcagcuccgcgagaacgccgaggacaugggcaacggcugcuucaagaucuaccacaagugcgacaacgccugcaucggcuccauccgcaacggcaccuacgaccacgacgucuaccgcgacgaggcccucaacaaccgcuuccagaucaagggcgucgagcucaaguccggcuacaaggacuggauccucuggaucuccuucgccaccuccugcuuccuccucugcgucguccuccucggcuucaucaugugggccugccagaagggcaacauccgcugcaacaucugcaucuga

SEQ ID NO: 96258 - RNA, 1701 nt, Artificial Sequence
  derived and/or modified CDS sequence (opt2) from hemagglutinin__InfluenzaA__AAY98376
augaagaccaucaucgcccucuccuacauccucugccucgucuucgcccagaagcuccccggcaacgacaacuccaccgccacccucugccucggccaccacgccguccccaacggcacccucgucaagaccaucaccaacgaccagaucgaggucaccaacgccaccgagcucguccaguccuccuccaccggccgcaucugcgacuccccccaccagauccucgacggcgagaacugcacccucaucgacgcccuccucggcgacccccacugcgacggcuuccagaacaaggagugggaccucuucgucgagcgcuccaaggccuacuccaacugcuaccccuacgacguccccgacuacgccucccuccgcucccucgucgccuccuccggcacccucgaguucaacaacgaguccuucaacuggaccggcgucgcccagaacggcaccuccuccgccugcaagcgccgcuccaucaaguccuucuucucccgccucaacuggcuccaccagcucaaguacaaguaccccgcccucaacgucaccaugcccaacaacgacaaguucgacaagcucuacaucuggggcguccaccaccccuccaccgacuccgaccagaccucccucuacgcccaggccuccggccgcgucaccgucuccaccaagcgcucccagcagaccgucauccccaacaucggcucccgccccuggguccgcggcgucuccucccgcaucuccaucuacuggaccaucgucaagcccggcgacauccuccucaucaacuccaccggcaaccucaucgccccccgcggcuacuucaagauccgcuccggcaaguccuccaucaugcgcuccgacgcccccaucggcaagugcaacuccgagugcaucacccccaacggcuccauccccaacgacaagcccuuccagaacgucaaccgcaucaccuacggcgccugcccccgcuacgucaagcagaacacccucaagcucgccaccggcaugcgcaacguccccgagaagcagacccgcggcaucuucggcgccaucgccggcuucaucgagaacggcugggagggcauggucgacggcugguacggcuuccgccaccagaacuccgagggcaccggccaggccgccgaccucaaguccacccaggccgccaucaaccagaucaacggcaagcucaaccgccucaucgagaagaccaacgagaaguuccaccagaucgagaaggaguucuccgaggucgagggccgcauccaggaccucgagaaguacgucgaggacaccaagaucgaccucugguccuacaacgccgagcuccucgucgcccucgagaaccagcacaccaucgaccucaccgacuccgagaugaacaagcucuucgagcgcacccgcaagcagcuccgcgagaacgccgaggacaugggcaacggcugcuucaagaucuaccacaagugcgacaacgccugcaucggcuccauccgcaacggcaccuacgaccacgacgucuaccgcgacgaggcccucaacaaccgcuuccagaucaagggcgucgagcucaaguccggcuacaaggacuggauccucuggaucuccuucgccaucuccugcuuccuccucugcgucguccuccucggcuucaucaugugggccugccagaagggcaacauccgcugcaacaucugcaucuga

SEQ ID NO: 96259 - RNA, 1701 nt, Artificial Sequence
  derived and/or modified CDS sequence (opt2) from hemagglutinin__InfluenzaA__AAY98386
augaagaccaucaucgcccucuccuacauccucugccucgucuucgcccagaagcuccccggcaacgacaacuccaccgccacccucugccucggccaccacgccguccccaacggcacccucgucaagaccaucaccaacgaccagaucgaggucaccaacgccaccgagcucguccaguccuccuccaccggccgcaucugcgacuccccccaccagauccucgacggcggcaacugcacccucaucgacgcccuccucggcgacccccacugcgacggcuuccagaacaaggagugggaccucuucgucgagcgcuccaaggucuacuccaacugcuaccccuacgacguccccgacuacgccucccuccgcucccucgucgccuccuccggcacccucgaguucaacaacgaguccuucaacuggaccggcgucgcccagaacggcaccuccuccgccugcaagcgccgcuccaucaaguccuucuucucccgccucaacuggcuccaccagcucaaguacaaguaccccgcccucaacgucaccaugcccaacaacgagaaguucgacaagcucuacaucuggggcguccaccaccccuccaccgacuccgaccagaucucccucuacgcccaggccuccggccgcgucaccgucuccaccaagcgcucccagcagaccgucauccccaacaucggcucccgccccuggguccgcggcgucuccucccgcaucuccaucuacuggaccaucgucaagcccggcgacauccuccucaucaacuccaccggcaaccucaucgccccccgcggcuacuucaagauccgcuccggcaaguccuccaucaugcgcuccgacgcccccaucggcaagugcaacuccgagugcaucacccccaacggcuccauccccaacgacaagcccuuccagaacgucaaccgcaucaccuacggcgccugcccccgcuacgucaagcagaacacccucaagcucgccaccggcaugcgcaacguccccgagaagcagacccgcggcaucuucggcgccaucgccggcuucaucgagaacggcugggagggcauggucgacggcugguacggcuuccgccaccagaacuccgagggcaccggccaggccgccgaccucaaguccacccaggccgccaucaaccagaucaacggcaagcucaaccgccucaucgagaagaccaacgagaaguuccaccagaucgagaaggaguucuccgaggucgagggccgcauccaggaccucgagaaguacgucgaggacaccaagaucgaccucugguccuacaacgccgagcuccucgucgcccucgagaaccagcacaccaucgaccucaccgacuccgagaugaacaagcucuucgagcgcaccaagaagcagcuccgcgagaacgccgaggacaugggcaacggcugcuucaagaucuaccacaagugcgacaacgccugcaucggcuccauccgcaacggcaccuacgaccacgacgucuaccgcgacgaggcccucaacaaccgcuuccagaucaagggcgucgagcucaaguccggcuacaaggacuggauccucuggaucuccuucgccaucuccugcuuccuccucugcgucguccuccucggcuucaucaugugggccugccagaagggcaacauccgcugcaacaucugcaucuga

SEQ ID NO: 96260 - RNA, 1701 nt, Artificial Sequence; identical to SEQ ID NO: 96222
  derived and/or modified CDS sequence (opt2) from hemagglutinin__InfluenzaA__AAY98396

SEQ ID NO: 96261 - RNA, 1701 nt, Artificial Sequence; identical to SEQ ID NO: 96222
  derived and/or modified CDS sequence (opt2) from hemagglutinin__InfluenzaA__AAY98406

SEQ ID NO: 96262 - RNA, 1701 nt, Artificial Sequence
  derived and/or modified CDS sequence (opt2) from hemagglutinin__InfluenzaA__AAZ32946
augaagaccaucaucgcccucuccuacauccucugccucgucuucgcccagaagcuccccggcaacgacaacuccaccgccacccucugccucggccaccacgccguccccaacggcaccaucgucaagaccaucaccaacgaccagaucgaggucaccaacgccaccgagcucguccaguccuccuccaccggcggcaucugcgacuccccccaccagauccucgacggcgagaacugcacccucaucgacgcccuccucggcgacccccagugcgacggcuuccagaacaagaagugggaccucuucgucgagcgcuccgaggccuacuccaacugcuaccccuacgacguccccgacuacgccucccuccgcucccucaucgccuccuccggcacccucgaguucaccaacgaguccuucaacuggaccggcgucacccagaacggcaccuccuccgccugcaagcgccgcuccaacaaguccuucuucucccgccucaacuggcucacccaccucaaguacaaguaccccgcccucaacgucaccaugcccaacaacgagaaguucgacaagcucuacaucuggggcguccaccaccccggcaccgacuccgaccagaucucccucuacgcccaggccuccggccgcaucaccgucuccaccaagcgcucccagcagaccgucauccccaacaucggcucccgcccccgcguccgcgacgucuccucccgcaucuccaucuacuggaccaucgucaagcccggcgacauccuccucaucaacuccaccggcaaccucaucgccccccgcggcuacuucaagauccgcuccggcaaguccuccaucaugcgcuccgacgcccccaucggcaagugcaacuccgagugcaucacccccaacggcuccauccccaacgacaagcccuuccagaacaucaaccgcaucaccuacggcaccugcccccgcuacgucaagcagaacacccucaagcucgccaccggcaugcgcaacguccccgagaagcagacccgcggcaucuucggcgccaucgccggcuucaucgagaacggcugggagggcauggucgacggcugguacggcuuccgccaccagaacuccgagggcaccggccaggccgccgaccucaaguccacccaggccgccaucaaccagaucaacggcaagcucaaccgccucaucggcaagaccaacgagaaguuccaccagaucgagaaggaguucuccgaggucgagggccgcauccaggaccucgagaaguacgucgaggacaccaagaucgaccucugguccuacaacgccgagcuccucgucgcccucgagaaccagcacaccaucgaccucaccgacuccgagaugaacaagcucuucgagcgcaccaagaagcagcuccgcgagaacgccgaggacaugggcaacggcugcuucaagaucuaccacaagugcgacaacgccugcaucggcuccauccgcaacggcaccuacgaccacgacgucuaccgcgacgaggcccucaacaaccgcuuccagaucaagggcgucgagcucaaguccggcuacaaggacuggauccucuggaucuccuucgccaucuccugcuuccuccucugcgucguccuccucggcuucaucaugugggccugccagaagggcaacauccgcugcaacaucugcaucuga

SEQ ID NO: 96263 - RNA, 1701 nt, Artificial Sequence
  derived and/or modified CDS sequence (opt2) from hemagglutinin__InfluenzaA__AAZ32949
augaagaccaucaucgcccucuccuacauccucugccucgucuucgcccagaagcuccccggcaacgacaacuccaccgccacccucugccucggccaccacgccguccccaacggcaccaucgucaagaccaucaccaacgaccagaucgaggucaccaacgccaccgagcucguccaguccuccuccaccggcggcaucugcgacuccccccaccagauccucgacggcgagaacugcacccucaucgacgcccuccucggcgacccccagugcgacggcuuccagaacaagaagugggaccucuucgucgagcgcuccgaggccuacuccaacugcuaccccuacgacguccccgacuacgccucccuccgcucccucaucgccuccuccggcacccucgaguucaccaacgaguccuucaacuggaccggcgucacccagaacggcaccuccuccgccugcaagcgccgcuccaacaaguccuucuucucccgccucaacuggcucacccaccucaaguacaaguaccccgcccucaacgucaccaugcccaacaacgagaaguucgacaagcucuacaucuggggcguccaccaccccggcaccgacuccgaccagaucucccucuacgcccaggccuccggccgcaucaccgucuccaccaagcgcucccagcagaccgucauccccaacaucggcucccgcccccgcguccgcgacaucuccucccgcaucuccaucuacuggaccaucgucaagcccggcgacauccuccucaucaacuccaccggcaaccucaucgccccccgcggcuacuucaagauccgcuccggcaaguccuccaucaugcgcuccgacgcccccaucggcaagugcaacuccgagugcaucacccccaacggcuccauccccaacgacaagcccuuccagaacaucaaccgcaucaccuacggcgccugcccccgcuacgucaagcagaacacccucaagcucgccaccggcaugcgcaacguccccgagaagcagacccgcggcaucuucggcgccaucgccggcuucaucgagaacggcugggagggcauggucgacggcugguacggcuuccgccaccagaacuccgagggcaccggccaggccgccgaccucaaguccacccaggccgccaucaaccagaucaacggcaagcucaaccgccucaucggcaagaccaacgagaaguuccaccagaucgagaaggaguucuccgaggucgagggccgcauccaggaccucgagaaguacgucgaggacaccaagaucgaccucugguccuacaacgccgagcuccucgucgcccucgagaaccagcacaccaucgaccucaccgacuccgagaugaacaagcucuucgagcgcaccaagaagcagcuccgcgagaacgccgaggacaugggcaacggcugcuucaagaucuaccacaagugcgacaacgccugcaucggcuccauccgcaacggcaccuacgaccacgacgucuaccgcgacgaggcccucaacaaccgcuuccagaucaagggcgucgagcucaaguccggcuacaaggacuggauccucuggaucuccuucgccaucuccugcuuccuccucugcgucguccuccucggcuucaucaugugggccugccagaagggcaacauccgcugcaacaucugcaucuga

SEQ ID NO: 96264 - RNA, 1701 nt, Artificial Sequence
  derived and/or modified CDS sequence (opt2) from hemagglutinin__InfluenzaA__AAZ32950
augaagaccaucaucgcccucuccuacauccucugccucgucuucgcccagaagcuccccggcaacgacaacuccaccgccacccucugccucggccaccacgccguccccaacggcaccaucgucaagaccaucaccaacgaccagaucgaggucaccaacgccaccgagcucguccaguccuccuccaccggcggcaucugcgacuccccccaccagauccucgacggcgagaacugcacccucaucgacgcccuccucggcgacccccagugcgacggcuuccagaacaagaagugggaccucuucgucgagcgcuccgaggccuacuccaacugcuaccccuacgacguccccgacuacgccucccuccgcucccucaucgccuccuccggcacccucgaguucaccaacgaguccuucaacuggaccggcgucacccagaacggcaccuccuccgccugcaagcgccgcuccaacaaguccuucuucucccgccucaacuggcucacccaccucaaguacaaguaccccgcccucaacgucaccaugcccaacaacgagaaguucgacaagcucuacaucuggggcguccaccaccccggcaccgacuccgaccagaucucccucuacgcccaggccuccggccgcaucaccgucuccaccaagcgcucccagcagaccgucauccccaacaucggcucccgcccccgcguccgcgacgucuccucccgcaucuccaucuacuggaccaucgucaagcccggcgacauccuccucaucaacuccaccggcaaccucaucgccccccgcggcuacuucaagauccgcuccggcaaguccuccaucaugcgcuccgacgcccccaucggcaagugcaacuccgagugcaucacccccaacggcuccauccccaacgacaagcccuuccagaacaucaaccgcaucaccuacggcgccugcccccgcuacgucaagcagaacacccucaagcucgccaccggcaugcgcaacguccccgagaagcagacccgcggcaucuucggcgccaucgccggcuucaucgagaacggcugggagggcauggucgacggcugguacggcuuccgccaccagaacuccgagggcaccggccaggccgccgaccucaaguccacccaggccgccaucaaccagaucaacggcaagcucaaccgccucaucggcaagaccaacgagaaguuccaccagaucgagaaggaguucuccgaggucgagggccgcauccaggaccucgagaaguacgucgaggacaccaagaucgaccucugguccuacaacgccgagcuccucgucgcccucgagaaccagcacaccaucgaccucaccgacuccgagaugaacaagcucuucgagcgcaccaaggagcagcuccgcgagaacgccgaggacaugggcaacggcugcuucaagaucuaccacaagugcgacaacgccugcaucggcuccauccgcaacggcaccuacgaccacgacgucuaccgcgacgaggcccucaacaaccgcuuccagaucaagggcgucgagcucaaguccggcuacaaggacuggauccucuggaucuccuucgccaucuccugcuuccuccucugcgucguccuccucggcuucaucaugugggccugccagaagggcaacauccgcugcaacaucugcaucuga

SEQ ID NO: 96265 - RNA, 1701 nt, Artificial Sequence
  derived and/or modified CDS sequence (opt2) from hemagglutinin__InfluenzaA__AAZ32951
augaagaccaucaucgcccucuccuacauccucugccucgucuucgcccagaagauccccggcaacgacaacuccaccgccacccucugccucggccaccacgccguccccaacggcacccucgucaagaccaucaccaacgaccagaucgaggucaccaacgccaccgagcucguccaguccuccuccaccggcggcaucugcgacuccccccaccagauccucgacggcgagaacugcacccucaucgacgcccuccucggcgacccccacugcgacggcuuccagaacaagaagugggaccucuucgucgagcgcuccaaggccuacuccaacugcuaccccuacgacguccccgacuacgccucccuccgcucccucgucgccuccuccggcacccucgaguucaacaacgaguccuucaacuggaccggcgucacccagaacggcaccuccuccgccugcaagcgccgcuccaacaaguccuucuucucccgccucaacuggcuccaccagcucaaguacaaguaccccgcccucaacgucgccaugcccaacaacgagaaguucgacaagcucuacaucuggggcguccaccaccccggcaccgacuccgaccagaucucccucuacgcccaggccuccggccgcaucaccgucuccaccaagcgcucccagcagaccgucauccccaacaucggcucccgcccccgcguccgcgacaucuccucccgcaucuccaucuacuggaccaucgucaagcccggcgacauccuccucaucaacuccaccggcaaccucaucgccccccgcggcuacuucaagauccgcuccggcaaguccuccaucaugcgcuccgacgcccccaucggcaagugcaacuccgagugcaucacccccaacggcuccauccccaacgacaagcccuuccagaacgucaaccgcaucaccuacggcgccugcccccgcuacgucaagcagaacacccucaagcucgccaccggcaugcgcaacguccccgagaagcagacccgcggcaucuucggcgccaucgccggcuucaucgagaacggcugggagggcauggucgacggcugguacggcuuccgccaccagaacuccgagggcaccggccaggccgccgaccucaaguccacccaggccgccaucaaccagaucaacggcaagcucaaccgccucaucggcaagaccaacgagaaguuccaccagaucgagaaggaguucuccgaggucgagggccgcauccaggaccucgagaaguacgucgaggacaccaagaucgaccucugguccuacaacgccgagcuccucgucgcccucgagaaccagcacaccaucgaccucaccgacuccgagaugaacaagcucuucgagcgcaccaagaagcagcuccgcgagaacgccgaggacaugggcaacggcugcuucaagaucuaccacaagugcgacaacgccugcaucggcuccauccgcaacggcaccuacgaccacgacgucuaccgcgacgaggcccucaacaaccgcuuccagaucaagggcgucgagcucaaguccggcuacaaggacuggauccucuggaucuccuucgccaucuccugcuuccuccucugcgucgcccuccucggcuucaucaugugggccugccagaagggcaacauccgcugcaacaucugcaucuga

SEQ ID NO: 96266 - RNA, 1701 nt, Artificial Sequence
  derived and/or modified CDS sequence (opt2) from hemagglutinin__InfluenzaA__AAZ32952
augaagaccaucaucgcccucuccuacauccucugccucgucuucgcccagaagauccccggcaacgacaacuccaccgccacccucugccucggccaccacgccguccccaacggcacccucgucaagaccaucaccaacgaccagaucgaggucaccaacgccaccgagcucguccaguccuccuccaccggcggcaucugcgacuccccccaccagauccucgacggcgagaacugcacccucaucgacgcccuccucggcgacccccacugcgacggcuuccagaacaagaagugggaccucuucgucgagcgcuccaaggccuacuccaacugcuaccccuacgacguccccgacuacgccucccuccgcucccucgucgccuccuccggcacccucgaguucaacaacgaguccuucaacuggaccggcgucacccagaacggcaccuccuccgccugcaagcgccgcuccaacaaguccuucuucucccgccucaacuggcuccaccagcucaaguacaaguaccccgcccucaacgucgccaugcccaacaacgagaaguucgacaagcucuacaucuggggcguccaccaccccggcaccgacuccgaccagaucucccucuacgcccaggccuccggccgcaucaccgucuccaccaagcgcucccagcagaccgucauccccaacaucggcucccgcccccgcguccgcgacgucuccucccgcaucuccaucuacuggaccaucgucaagcccggcgacauccuccucaucaacuccaccggcaaccucaucgccccccgcggcuacuucaagauccgcuccggcaaguccuccaucaugcgcuccgacgcccccaucggcaagugcaacuccgagugcaucacccccaacggcuccauccccaacgacaagcccuuccagaacgucaacaagaucaccuacggcgccugcccccgcuacgucaagcagaacacccucaagcucgccaccggcaugcgcaacguccccgagaagcagacccgcggcaucuucggcgccaucgccggcuucaucgagaacggcugggagggcauggucgacggcugguacggcuuccgccaccagaacuccgagggcaccggccaggccgccgaccucaaguccacccaggccgccaucaaccagaucaacggcaagcucaaccgccucaucggcaagaccaacgagaaguuccaccagaucgagaaggaguucuccgaggucgagggccgcauccaggaccucgagaaguacgucgaggacaccaagaucgaccucugguccuacaacgccgagcuccucgucgcccucgagaaccagcacaccaucgaccucaccgacuccgagaugaacaagcucuucgagcgcaccaagaagcagcuccgcgagaacgccgaggacaugggcaacggcugcuucaagaucuaccacaagugcgacaacgccugcaucggcuccauccgcaacggcaccuacgaccacgacgucuaccgcgacgaggcccucaacaaccgcuuccagaucaagggcgucgagcucaaguccggcuacaaggacuggauccucuggaucuccuucgccaucuccugcuuccuccucugcgucgcccuccucggcuucaucaugugggccugccagaagggcaacauccgcugcaacaucugcaucuga

SEQ ID NO: 96267 - RNA, 1701 nt, Artificial Sequence
  derived and/or modified CDS sequence (opt2) from hemagglutinin__InfluenzaA__AAZ32953
augaagaccaucaucgcccucuccuacauccucugccucgucuucgcccagaagauccccggcaacgacaacuccaccgccacccucugccucggccaccacgccguccccaacggcacccucgucaagaccaucaccaacgaccagaucgaggucaccaacgccaccgagcucguccaguccuccuccaccggcggcaucugcgacuccccccaccagauccucgacggcgagaacugcacccucaucgacgcccuccucggcgacccccacugcgacggcuuccagaacaagaagugggaccucuucgucgagcgcuccaaggccuacuccaacugcuaccccuacgacguccccgacuacgccucccuccgcucccucgucgccuccuccggcacccucgaguucaacaacgaguccuucaacuggaccggcgucacccagaacggcaccuccuccgccugcaagcgccgcuccaacaaguccuucuucucccgccucaacuggcuccaccagcucaaguacaaguaccccgcccucaacgucgccaugcccaacaacgagaaguucgacaagcucuacaucuggggcguccaccaccccggcaccgacuccgaccagaucucccucuacgcccaggccuccggccgcaucaccgucuccaccaagcgcucccagcagaccgucauccccaacaucggcucccgcccccgcguccgcgacgucuccucccgcaucuccaucuacuggaccaucgucaagcccggcgacauccuccucaucaacuccaccggcaaccucaucgccccccgcggcuacuucaagauccgcuccggcaaguccuccaucaugcgcuccgacgcccccaucggcaagugcaacuccgagugcaucacccccaacggcuccauccccaacgacaagcccuuccagaacgucaaccgcaucaccuacggcgccugcccccgcuacgucaagcagaacacccucaagcucgccaccggcaugcgcaacguccccgagaagcagacccgcggcaucuucggcgccaucgccggcuucaucgagaacggcugggagggcauggucgacggcugguacggcuuccgccaccagaacuccgagggcaccggccaggccgccgaccucaaguccacccaggccgccaucaaccagaucaacggcaagcucaaccgccucaucggcaagaccaacgagaaguuccaccagaucgagaaggaguucuccgaggucgagggccgcauccaggaccucgagaaguacgucgaggacaccaagaucgaccucugguccuacaacgccgagcuccucgucgcccucgagaaccagcacaccaucgaccucaccgacuccgagaugaacaagcucuucgagcgcaccaagaagcagcuccgcgagaacgccgaggacaugggcaacggcugcuucaagaucuaccacaagugcgacaacgccugcaucggcuccauccgcaacggcaccuacgaccacgacgucuaccgcgacgaggcccucaacaaccgcuuccagaucaagggcgucgagcucaaguccggcuacaaggacuggauccucuggaucuccuucgccaucuccugcuuccuccucugcgucgcccuccucggcuucaucaugugggccugccagaagggcaacauccgcugcaacaucugcaucuga

SEQ ID NO: 96268 - RNA, 1701 nt, Artificial Sequence
  derived and/or modified CDS sequence (opt2) from hemagglutinin__InfluenzaA__AAZ38462
augaagaccaucaucgcccucuccuacauccucugccucgucuucgcccagaagcuccccggcaacgacaacuccaccgccacccucugccucggccaccacgccguccccaacggcacccucgucaagaccaucaccuccgaccagaucgaggucaccaacgccaccgagcucguccaguccuccuccaccggccgcaucugcgacuccccccaccgcauccucgacggcgagaacugcacccucaucgacgcccuccucggcgacccccacugcgacggcuuccagaacaaggagugggaccucuucgucgagcgcuccaaggccuacuccaacugcuaccccuacgacguccccgacuacgccucccuccgcucccucgucgccuccuccggcacccucgaguucaacaacgaguccuucaacuggaccggcgucgcccagaacggcaccuccuucgccugcaagcgccgcuccaucaaguccuucuucucccgccucaacuggcuccaccagcucaaguacaaguaccccgcccucaacgucaccaugcccaacaacgacaaguucgacaagcucuacaucuggggcguccacuaccccggcaccgacuccgaccagaccucccucuacgcccaggccuccggccgcgucaccgucuccaccaagcgcucccagcagaccgucauccccaacaucggcucccgccccuggguccgcggcgucuccucccgcaucuccaucuacuggaccaucgucaagcccggcgacauccuccucaucaacuccaccggcaaccucaucgccccccgcggcuacuucaagauccgcuccggcaaguccuccaucaugcgcuccgacgcccccaucggcaagugcaacuccgagugcaucacccccaacggcuccauccccaacggcaagcccuuccagaacgucaaccgcaucaccuacggcgccugcccccgcuacgucaagcagaacacccucaagcucgccaccggcaugcgcaacguccccgagaagcagacccgcggcaucuucggcgccaucgccggcuucaucgagaacggcugggagggcauggucgacggcugguacggcuuccgccaccagaacuccgagggcaccggccaggccgccgaccucaaguccacccaggccgccaucaaccagaucaacggcaagcucaaccgccucaucgagaagaccaacgagaaguuccaccagaucgagaaggaguucaccgaggucgagggccgcauccaggaccucgagaaguacgucgaggacaccaagaucgaccucugguccuacaacgccgagcuccucgucgcccucgagaaccagcacaccaucgaccucaccgacuccgagaugaacaagcucuucgagcgcacccgccgccagcuccgcgagaacgccgaggacaugggcaacggcugcuucaagaucuaccacaagugcgacaacgccugcaucggcuccauccgcaacggcaccuacgaccacgacgucuaccgcgacgaggcccucaacaaccgcuuccagaucaagggcgucgagcucaaguccggcuacaaggacuggauccucuggaucuccuucgccaccuccugcuuccuccucugcgucguccuccucggcuucaucaugugggccugccagaagggcaacauccgcugcaacaucugcaucuga

SEQ ID NO: 96269 - RNA, 1701 nt, Artificial Sequence
  derived and/or modified CDS sequence (opt2) from hemagglutinin__InfluenzaA__AAZ38473
augaagaccaucaucgcccucuccuacauccucugccucgucuucgcccagaagcuccccggcaacgacaacuccaccgccacccucugccucggccaccacgccguccccaacggcacccucgucaagaccaucaccuccgaccagaucgaggucaccaacgccaccgagcucguccaguccuccuccaccggccgcaucugcgacuccccccaccgcauccucgacggcgagaacugcacccucaucgacgcccuccucggcgacccccacugcgacggcuuccagaacaaggagugggaccucuucgucgagcgcuccaaggccuacuccaacugcuaccccuacgacguccccgacuacgccucccuccgcucccucgucgccuccuccggcacccucgaguucaacaacgaguccuucaacuggaccggcgucgcccagaacggcaccuccuucaccugcaagcgccgcuccaucaaguccuucuucucccgccucaacuggcuccaccagcucaaguacaaguaccccgcccucaacgucaccaugcccaacaacgacaaguucgacaagcucuacaucuggggcguccaccaccccuccaccgacuccgaccagaccucccucuacgcccaggccuccggccgcgucaccgucuccaccaagcgcucccagcagaccgucauccccaacaucggcucccgccccuggguccgcggcgucuccucccgcaucuccaucuacuggaccaucgucaagcccggcgacauccuccucaucaacuccaccggcaaccucaucgccccccgcggcuacuucaagauccgcuccggcaaguccuccaucaugaaguccgacgcccccaucggcaagugcaacuccgagugcaucacccccaacggcuccauccccaacgacaagcccuuccagaacgucaaccgcaucaccuacggcgccugcccccgcuacgucaagcagaacacccucaagcucgccaccggcaugcgcaacguccccgagaagcagacccgcggcaucuucggcgccaucgccggcuucaucgagaacggcugggagggcauggucgacggcugguacggcuuccgccaccagaacuccgagggcaccggccaggccgccgaccucaaguccacccaggccgccaucaaccagaucaacggcaagcucaaccgccucaucgagaagaccaacgagaaguuccaccagaucgagaaggaguucaccgaggucgagggccgcauccaggaccucgagaaguacgucgaggacaccaagaucgaccucugguccuacaacgccgagcuccucgucgcccucgagaaccagcacaccaucgaccucaccgacuccgagaugaacaagcucuucgagcgcacccgcaagcagcuccgcgagaacgccgaggacaugggcaacggcugcuucaagaucuaccacaagugcgacaacgucugcaucggcuccauccgcaacggcaccuacgaccacgacgucuaccgcgacgaggcccucaacaaccgcuuccagaucaagggcgucgagcucaaguccggcuacaaggacuggauccucuggaucuccuucgccaccuccugcuuccuccucugcgucguccuccucggcuucaucaugugggccugccagaagggcaacauccgcugcaacaucugcaucuga

SEQ ID NO: 96270 - RNA, 1701 nt, Artificial Sequence; identical to SEQ ID NO: 96222
  derived and/or modified CDS sequence (opt2) from hemagglutinin__InfluenzaA__AAZ38484

SEQ ID NO: 96271 - RNA, 1701 nt, Artificial Sequence
  derived and/or modified CDS sequence (opt2) from hemagglutinin__InfluenzaA__AAZ38495
augaagaccaucaucgcccucuccuacauccucugccucgucuucgcccagaagcuccccggcaacgacaacuccaccgccacccucugccucggccaccacgccguccccaacggcacccucgucaagaccaucaccaacgaccagaucgaggucaccaacgccaccgagcucguccaguccuccuccaccggccgcaucugcgacuccccccaccagauccucgacggcgagaacugcacccucaucgacgcccuccucggcgacccccacugcgacggcuuccagaacaaggagugggaccucuucgucgagcgcuccaaggccuacuccaacugcuaccccuacgacguccccgacuacgccucccuccgcucccucgucgccuccuccggcacccucgaguucaacaacgaguccuucaacuggaccggcgucgcccagaacggcaccuccuccgccugcaagcgccgcuccaacaaguccuucuucucccgccucaacuggcuccaccagcucaaguacaaguaccccgcccucaacgucaccaugcccaacaacgagaaguucgacaagcucuacaucuggggcguccaccaccccuccaccgacuccgaccagaucucccucuacgcccaggccuccggccgcgucaccgucuccaccaagcgcucccagcagaccgucauccccaacaucggcucccgccccuggguccgcggcgucuccuccaagaucuccaucuacuggaccaucgucaagcccggcgacauccuccucaucaacuccaccggcaaccucaucgccccccgcggcuacuucaagauccgcuccggcaaguccuccaucaugcgcuccgacgcccccaucggcaagugcaacuccgagugcaucacccccaacggcuccauccccaacgacaagcccuuccagaacgucaaccgcaucaccuacggcgccugcccccgcuacgucaagcagaacacccucaagcucgccaccggcaugcgcaacguccccgagaagcagacccgcggcaucuucggcgccaucgccggcuucaucgagaacggcugggagggcauggucgacggcugguacggcuuccgccaccagaacuccgagggcaccggccaggccgccgaccucaaguccacccaggccgccaucaaccagaucaacggcaagcucaaccgccucaucgagaagaccaacgagaaguuccaccagaucgagaaggaguucuccgaggucgagggccgcauccaggaccucgagaaguacgucgaggacaccaagaucgaccucugguccuacaacgccgagcuccucgucgcccucgagaaccagcacaccaucgaccucaccgacuccgagaugaacaagcucuucgagcgcaccaagaagcagcuccgcgagaacgccgaggacaugggcaacggcugcuucaagaucuaccacaagugcgacaacgccugcaucggcuccauccgcaacggcaccuacgaccacgacgucuaccgcgacgaggcccucaacaaccgcuuccagaucaagggcgucgagcucaaguccggcuacaaggacuggauccucuggaucuccuucgccaucuccugcuuccuccucugcgucguccuccucggcuucaucaugugggccugccagaagggcaacauccgcugcaacaucugcaucuga

SEQ ID NO: 96272 - RNA, 1701 nt, Artificial Sequence
  derived and/or modified CDS sequence (opt2) from hemagglutinin__InfluenzaA__AAZ38517
augaagaccaucaucgcccucuccuacauccucugccucgucuucgcccagaagcuccccggcaacgacaacuccaccgccacccucugccucggccaccacgccguccccaacggcaccaucgucaagaccaucaccaacgaccagaucgaggucaccaacgccaccgagcucguccaguccuccuccaccggcggcaucugcgacuccccccaccagauccucgacggcgagaacugcacccucaucgacgcccuccucggcgacccccagugcgacggcuuccagaacaagaagugggaccucuucgucgagcgcuccaaggccuacuccaacugcuaccccuacgacguccccgacuacgccucccuccgcucccucgucgccuccuccggcacccucgaguucaacaacgaguccuucaacuggaccggcgucacccagaacggcaccuccuccgccugcaagcgccgcuccaacaacuccuucuucucccgccucaacuggcucacccaccucaaguucaaguaccccgcccucaacgucaccaugcccaacaacgagaaguucgacaagcucuacaucuggggcguccaccaccccggcaccgacaacgaccagaucucccucuacgcccaggccuccggccgcaucaccgucuccaccaagcgcucccagcagaccgucauccccaacaucggcucccgcccccgcguccgcgacauccccucccgcaucuccaucuacuggaccaucgucaagcccggcgacauccuccucaucaacuccaccggcaaccucaucgccccccgcggcuacuucaagauccgcuccggcaaguccuccaucaugcgcuccgacgcccccaucggcaagugcaacuccgagugcaucacccccaacggcuccauccccaacgacaagcccuuccagaacgucaaccgcaucaccuacggcgccugcccccgcuacgucaagcagaacacccucaagcucgccaccggcaugcgcaacguccccgagaagcagacccgcggcaucuucggcgccaucgccggcuucaucgagaacggcugggagggcauggucgacggcugguacggcuuccgccaccagaacuccgagggcaucggccaggccgccgaccucaaguccacccaggccgccaucaaccagaucaacggcaagcucaaccgccucaucggcaagaccaacgagaaguuccaccagaucgagaaggaguucuccgaggucgagggccgcauccaggaccucgagaaguacgucgaggacaccaagaucgaccucugguccuacaacgccgagcuccucgucgcccucgagaaccagcacaccaucgaccucaccgacuccgagaugaacaagcucuucgagcgcaccaagaagcagcuccgcgagaacgccgaggacaugggcaacggcugcuucaagaucuaccacaagugcaacaacgccugcaucggcuccauccgcaacggcaccuacgaccacgacgucuaccgcgacgaggcccucaacaaccgcuuccagaucaagggcgucgagcucaaguccggcuacaaggacuggauccucuggaucuccuucgccaucuccugcuuccuccucugcgucguccuccucggcuucaucaugugggccugccagaagggcaacauccgcugcaacaucugcaucuga

SEQ ID NO: 96273 - RNA, 1701 nt, Artificial Sequence
  derived and/or modified CDS sequence (opt2) from hemagglutinin__InfluenzaA__AAZ38539
augaagaccaucaucgcccucuccuacauccucugccucgucuucgcccagaagcuccccggcaacgacaacuccaccgccacccucugccucggccaccacgccguccccaacggcacccucgucaagaccaucaccaacgaccagaucgaggucaccaacgccaccgagcucguccaguccuccuccaccggccgcaucugcgacuccccccaccagauccucgacggcgagaacugcacccucaucgacgcccuccucggcgacccccacugcgacggcuuccagaacaaggagugggaccucuucgucgagcgcuccaaggccuacuccaacugcuaccccuacgacguccccgacuacgucucccuccgcucccucgucgccuccuccggcacccucgaguucaacaacgaguccuucaacuggaccggcgucgcccagaacggcaccuccuccgccugcaagcgccgcuccgacaaguccuucuucucccgccucaacuggcuccaccagcucaaguacaaguaccccgcccucaacgucaccaugcccaacaacgagaaguucgacaagcucuacaucuggggcguccaccaccccggcaccgacuccgaccagaucucccucuacgcccaggccuccggccgcgucaccgucuccaccaagcgcucccagcagaccgucauccccaacaucggcucccgccccuggguccgcggcgucuccuccaagaucuccaucuacuggaccaucgucaagcccggcgacaucuuccucaucaacuccaccggcaaccucaucgccccccgcggcuacuucaagauccgcuccggcaaguccuccaucaugcgcuccgacgcccccaucggcaagugcaacuccgagugcaucacccccaacggcuccauccccaacgacaagcccuuccagaacgucaaccgcaucaccuacggccccugcccccgcuacgucaagcagaacacccucaagcucgccaccggcaugcgcaacguccccgagaagcagacccgcggcaucuucggcgccaucgccggcuucaucgagaacggcugggagggcaugauggacggcugguacggcuuccgccaccagaacuccgagggcaccggccaggccgccgaccucaaguccacccaggccgccaucaaccagaucaacggcaagcucaaccgccucaucgagaagaccaacgagaaguuccaccagaucgagaaggaguucuccgaggucgagggccgcauccaggaccucgagaaguacgucgaggacaccaagaucgaccucugguccuacaacgccgagcuccucgucgcccucgagaaccagcacaccaucgaccucaccgacuccgagaugaacaagcucuucgagcgcaccaagaagcagcuccgcgagaacgccgaggacaugggcaacggcugcuucaagaucuaccacaagugcgacaacgccugcaucggcuccauccgcaacggcaccuacgaccacgacgucuaccgcgacgaggcccucaacaaccgcuuccagaucaagggcgucgagcucaaguccggcuacaaggacuggauccucuggaucuccuucgccaucuccugcuuccuccucugcaucguccuccucggcuucaucaugugggccugccagaagggcaacauccgcugcaacaucugcaucuga

SEQ ID NO: 96274 - RNA, 1701 nt, Artificial Sequence; identical to SEQ ID NO: 96222
  derived and/or modified CDS sequence (opt2) from hemagglutinin__InfluenzaA__AAZ38561

SEQ ID NO: 96275 - RNA, 1701 nt, Artificial Sequence
  derived and/or modified CDS sequence (opt2) from hemagglutinin__InfluenzaA__AAZ38583
augaagaccaucaucgcccucuccuacauccucugccucgucuucgcccagaagauccccggcaacgacaacuccaccgccacccucugccucggccaccacgccguccccaacggcaccaucgucaagaccaucaccaacgaccagaucgaggucaccaacgccaccgagcucguccaguccuccuccaccggcggcaucugcgacuccccccaccagauccucgacggcgagaacugcacccucaucgacgcccuccucggcgacccccagugcgacggcuuccagaacaagaagugggaccucuucgucgagcgcuccaaggccuacuccaacugcuaccccuacgacguccccgacuacgccucccuccgcucccucgucgccuccuccggcacccucgaguucaacaacgaguccuucaacuggaccggcgucacccagaacggcaccuccuccgccugcaagcgccgcuccaacaacuccuucuucucccgccucaacuggcucacccaccucaaguucaaguaccccgcccucaacgucaccaugcccaacaacgagaaguucgacaagcucuacaucuggggcguccaccaccccggcaccaacaacgaccagaucucccucuacgcccaggccuccggccgcaucaccgucuccaccaagcgcucccagcagaccgucauccccaacaucggcucccgcccccgcguccgcgacauccccucccgcaucuccaucuacuggaccaucgucaagcccggcgacauccuccucaucaacuccaccggcaaccucaucgccccccgcggcuacuucaagauccgcuccggcaaguccuccaucaugcgcuccgacgcccccaucggcaagugcaacuccgagugcaucacccccaacggcuccauccccaacgacaagcccuuccagaacgucaaccgcaucaccuacggcgccugcccccgcuacgucaagcagaacacccucaagcucgccaccggcaugcgcaacguccccgagaagcagacccgcggcaucuucggcgccaucgccggcuucaucgagaacggcugggagggcauggucgacggcugguacggcuuccgccaccagaacuccgagggcaucggccaggccgccgaccucaaguccacccaggccgccaucaaccagaucaacggcaagcucaaccgccucaucggcaagaccaacgagaaguuccaccagaucgagaaggaguucuccgaggucgagggccgcauccaggaccucgagaaguacgucgaggacaccaagaucgaccucugguccuacaacgccgagcuccucgucgcccucgagaaccagcacaccaucgaccucaccgacuccgagaugaacaagcucuucgagcgcaccaagaagcagcuccgcgagaacgccgaggacaugggcaacggcugcuucaagaucuaccacaagugcgacaacgccugcaucggcuccauccgcaacggcaccuacgaccacgacgucuaccgcgacgaggcccucaacaaccgcuuccagaucaagggcgucgagcucaaguccggcuacaaggacuggaucaucuggaucuccuucgccaucuccugcuuccuccucugcgucgcccuccucggcuucaucaugugggccugccagaagggcaacauccgcugcaacaucugcaucuga

SEQ ID NO: 96276 - RNA, 1701 nt, Artificial Sequence
  derived and/or modified CDS sequence (opt2) from hemagglutinin__InfluenzaA__AAZ38594
augaagaccaucaucgcccucuccuacauccucugccucgucuucgcccagaagcuccccggcaacgacaacuccaccgccacccucugccucggccaccacgccguccccaacggcaccaucgucaagaccaucaccaacgaccagaucgaggucaccaacgccaccgagcucguccaguccuccuccaccggcggcaucugcgacuccccccaccagauccucgacggcgagaacugcacccucaucgacgcccuccucggcgacccccagugcgacggcuuccagaacaagaagugggaccucuucgucgagcgcuccaaggccuacuccaacugcuaccccuacgacguccccgacuacgccucccuccgcucccucgucgccuccuccggcacccucgaguucaacaacgaguccuucaacuggaccggcgucacccagaacggcaccuccuccgccugcaagcgccgcuccaacuccuccuucuucucccgccucaacuggcucacccaccucaaguucaaguaccccgcccucaacgucaccaugcccaacaacgagaaguucgacaagcucuacaucuggggcguccaccaccccggcaccgacaacgaccagaucucccucuacgcccaggccuccggccgcaucaccgucuccaccaagcgcucccagcagaccgucauccccaacaucggcucccgcccccgcguccgcgacauccccucccgcaucuccaucuacuggaccaucgucaagcccggcgacauccuccucaucaacuccaccggcaaccucaucgccccccgcggcuacuucaagauccgcuccggcaaguccuccaucaugcgcuccgacgcccccaucggcaagugcaacuccgagugcaucacccccaacggcuccauccccaacgacaagcccuuccagaacgucaaccgcaucaccuacggcgccugcccccgcuacgucaagcagaacacccucaagcucgccaccggcaugcgcaacguccccgagaagcagacccgcggcaucuucggcgccaucgccggcuucaucgagaacggcugggagggcauggucgacggcugguacggcuuccgccaccagaacuccgagggcaucggccaggccgccgaccucaaguccacccaggccgccaucaaccagaucaacggcaagcucaaccgccucaucggcaagaccaacgagaaguuccaccagaucgagaaggaguucuccgaggucgagggccgcauccaggaccucgagaaguacgucgaggacaccaagaucgaccucugguccuacaacgccgagcuccucgucgcccucgagaaccagcacaccaucgaccucaccgacuccgagaugaacaagcucuucgagcgcaccaagaagcagcuccgcgagaacgccgaggacaugggcaacggcugcuucaagaucuaccacaagugcgacaacgccugcaucggcuccauccgcaacggcaccuacgaccacgacgucuaccgcgacgaggcccucaacaaccgcuuccagaucaagggcgucgagcucaaguccggcuacaaggacuggauccucuggaucuccuucgccaucuccugcuuccuccucugcgucgcccuccucggcuucaucaugugggccugccagaagggcaacauccgcugcaacaucugcaucuga

SEQ ID NO: 96277 - RNA, 1701 nt, Artificial Sequence
  derived and/or modified CDS sequence (opt2) from hemagglutinin__InfluenzaA__AAZ38605
augaagaccaucaucgcccucuccuacauccucugccucgucuucacccagaagcuccccggcaacgacaacuccaccgccacccucugccucggccaccacgccguccccaacggcaccaucgucaagaccaucaccaacgaccagaucgaggucaccaacgccaccgagcucguccaguccuccuccaccggcggcaucugcgacuccccccaccagauccucgacggcgagaacugcacccucaucgacgcccuccucggcgacccccagugcgacggcuuccagaacaagaagugggaccucuucgucgagcgcuccaaggccuacuccaacugcuaccccuacgacguccccgacuacgccucccuccgcucccucgucgccuccuccggcacccucgaguucaacaacgaguccuucaacuggaccggcgucacccagaacggcaccuccuccgccugcaagcgccgcuccaacaacuccuucuucucccgccucaacuggcucacccaccucaaguucaaguaccccgcccucaacgucaccaugcccaacaacgagaaguucgacaagcucuacaucuggggcguccaccaccccggcaccgacaacgaccagaucucccucuacgcccaggccuccggccgcaucaccgucuccaccaagcgcucccagcagaccgucauccccuccaucggcucccgcccccgcauccgcgacguccccucccgcaucuccaucuacuggaccaucgucaagcccggcgacauccuccucaucaacuccaccggcaaccucaucgccccccgcggcuacuucaagauccgcuccggcaaguccuccaucaugcgcuccgacgcccccaucggcaagugcaacuccgagugcaucacccccaacggcuccauccccaacgacaagcccuuccagaacgucaaccgcaucaccuacggcgccugcccccgcuacgucaagcagaacacccucaagcucgccaccggcaugcgcaacguccccgagaagcagacccgcggcaucuucggcgccaucgccggcuucaucgagaacggcugggagggcauggucgacggcugguacggcuuccgccaccagaacuccgagggcaccggccaggccgccgaccucaaguccacccaggccgccaucaaccagaucaacggcaagcucaaccgccucaucggcaagaccaacgagaaguuccaccagaucgagaaggaguucuccgaggucgagggccgcauccaggaccucgagaaguacgucgaggacaccaagaucgaccucugguccuacaacgccgagcuccucgucgcccucgagaaccagcacaccaucgaccucaccgacuccgagaugaacaagcucuucgagcgcaccaagaagcagcuccgcgagaacgccgaggacaugggcaacggcugcuucaagaucuaccacaagugcgacaacgccugcaucggcuccauccgcaacggcaccuacgaccacgacgucuaccgcgacgaggcccucaacaaccgcuuccagaucaagggcgucgagcucaaguccggcuacaaggacuggauccucuggaucuccuucgccaucuccugcuuccuccucugcgucgcccuccucggcuucaucaugugggccugccagaagggcaacauccgcugcaacaucugcaucuga

SEQ ID NO: 96278 - RNA, 1698 nt, Artificial Sequence
  derived and/or modified CDS sequence (opt2) from hemagglutinin__InfluenzaA__AAZ38627
augaaggccaagcuccucguccuccucugcaccuucaccgccaccuacgccgacaccaucugcaucggcuaccacgccaacaacuccaccgacaccgucgacaccguccucgagaagaacgucaccgucacccacuccgucaaccuccucgaggacucccacaacggcaagcucugccuccucaagggcaucgccccccuccagcucggcaacugcuccgucgccggcuggauccucggcaaccccgagugcgagcuccucaucuccaaggaguccugguccuacaucgucgagacccccaaccccgagaacggcaccugcuaccccggcuacuucgccgacuacgaggagcuccgcgagcagcucuccuccgucuccuccuucgagcgcuucgagaucuuccccaagggcuccuccuggcccaaccacaccgucaccggcgucuccgccuccugcucccacaacggcaaguccuccuucuaccgcaaccuccucuggcucaccggcaagaacggccucuaccccaaccucuccauguccuacgucaacaacaaggagaaggagguccucguccucuggggcguccaccacccccccaacaucggcgaccagcgcgcccucuaccacaccgagaacgccuacgucuccgucgucuccucccacuacucccgccgcuucacccccgagaucgccaagcgccccaagguccgcgaccaggagggccgcaucaacuacuacuggacccuccucgagcccggcgacaccaucaucuucgaggccaacggcaaccucaucgcccccugguacgccuucgcccucucccgcggcuucggcuccggcaucaucaccuccaacgcccccauggacgagugcgacgccaagugccagaccccccagggcgccaucaacuccucccuccccuuccagaacguccaccccgucaccaucggcgagugccccaaguacguccgcuccgccaagcuccgcauggccaccggccuccgcaacauccccuccauccagucccgcggccucuucggcgccaucgccggcuucaucgagggcggcuggaccggcauggucgacggcugguacggcuaccaccaccagaacgagcagggcuccggcuacgccgccgaccagaaguccacccagaacgccaucaacggcaucaccaacaaggucaacuccgucaucgagaagaugaacacccaguucaccgccgucggcaaggaguucaacaagcucgagcgccgcauggagaaccucaacaagaaggucgacgacggcuuccucgacaucuggaccuacaacgccgagcuccucguccuccucgagaacgagcgcacccucgacuuccacgacuccaacgucaagaaccucuacgagaaggucaagucccagcucaagaacaacgccaaggagaucggcaacggcugcuucgaguucuaccacaagugcaacaacgagugcauggaguccgucaagaacggcaccuacgacuaccccaaguacuccgaggaguccaagcucaaccgcgagaagaucgacggcgucaagcucgaguccaugggcgucuaccagauccucgccaucuacuccaccgucgccuccucccucguccuccucgucucccucggcgccaucuccuucuggaugugcuccaacggcucccuccagugccgcaucugcaucuga

SEQ ID NO: 96279 - RNA, 1701 nt, Artificial Sequence
  derived and/or modified CDS sequence (opt2) from hemagglutinin__InfluenzaA__AAZ38638
augaagaccaucaucgcccucuccuacauccucugccucgucuucgcccagaagcuccccggcaacgacaacuccaccgccacccucugccucggccaccacgccguccccaacggcaccaucgucaagaccaucaccaacgaccagaucgaggucaccaacgccaccgagcucguccaguccuccuccaccggcggcaucugcgacuccccccaccagauccucgacggcgagaacugcacccucaucgacgcccuccucggcgacccccagugcgacggcuuccagaacaagaagugggaccucuucgucgagcgcuccaaggccuacuccaacugcuaccccuacgacguccccgacuacgccucccuccgcucccucgucgccuccuccggcacccucgaguucaacaacgaguccuucaacuggaccggcgucacccagaacggcaccuccuccgccugcaagcgccgcuccaacaacuccuucuucucccgccucaacuggcucacccaccucaaguucaaguaccccgcccucaacgucaccaugcccaacaacgagaaguucgacaagcucuacaucuggggcguccaccaccccggcaccgacaacgaccagaucucccucuacgcccaggccuccggccgcaucaccgucuccaccaagcgcucccagcagaccgucauccccaacaucggcucccgcccccgcguccgcgacauccccucccgcaucuccaucuacuggaccaucgucaagcccggcgacauccuccucaucaacuccaccggcaaccucaucgccccccgcggcuacuucaagauccgcuccggcaaguccuccaucaugcgcuccgacgcccccaucggcaagugcaacuccgagugcaucacccccaacggcuccauccccaacgacaagcccuuccagaacgucaaccgcaucaccuacggcgccugcccccgcuacgucaagcagaacacccucaagcucgccaccggcaugcgcaacguccccgagaagcagacccgcggcaucuucggcgccaucgccggcuucaucgagaacggcugggagggcauggucgacggcugguacggcuuccgccaccagaacuccgagggcaucggccaggccgccgaccucaaguccacccaggccgccaucaaccagaucaacggcaagcucaaccgccucaucggcaagaccaacgagaaguuccaccagaucgagaaggaguucuccgaggucgagggccgcauccaggaccucgagaaguacgucgaggacaccaagaucgaccucugguccuacaacgccgagcuccucgucgcccucgagaaccagcacaccaucgaccucaccgacuccgagaugaacaagcucuucgagcgcaccaagaagcagcuccgcgagaacgccgaggacaugggcaacggcugcuucaagaucuaccacaagugcgacaacgccugcaucggcuccauccgcaacggcaccuacgaccacgacgucuaccgcgacgaggcccucaacaaccgcuuccagaucaagggcgucgagcucaaguccggcuacaaggacuggauccucuggaucuccuucgccaucuccugcuuccuccucugcgucgcccuccucggcuucaucaugugggccugccagaagggcaacauccgcugcaacaucugcaucuga

SEQ ID NO: 96280 - RNA, 1701 nt, Artificial Sequence; identical to SEQ ID NO: 96279
  derived and/or modified CDS sequence (opt2) from hemagglutinin__InfluenzaA__AAZ38650

SEQ ID NO: 96281 - RNA, 1701 nt, Artificial Sequence
  derived and/or modified CDS sequence (opt2) from hemagglutinin__InfluenzaA__AAZ43370
augaagaccaucaucgcccucuccuacaucuucugccucgucuucgcccagaagcuccccggcaacgacaacuccaccgccacccucugccucggccaccacgccguccccaacggcacccucgucaagaccaucaccaacgaccagaucgaggucaccaacgccaccgagcucguccaguccuccuccaccggccgcaucugcgacuccccccaccgcauccucgacggcaagaacugcacccucaucgacgcccuccucggcgacccccacugcgacggcuuccagaacgagaagugggaccucuucaucgagcgcuccaaggccuucuccaacugcuaccccuacgacguccccgacuacgccucccuccgcucccucgucgccuccuccggcacccucgaguucaucaacgagggcuucaacuggaccggcgucacccaguccggcggcuccuacgccugcaagcgcggcuccgucaaguccuucuucucccgccucaacuggcucuacgaguccgaguacaaguaccccgcccucaacgucaccaugcccaacaacggcaaguucgacaagcucuacaucuggggcguccaccaccccuccaccgagaaggagcagaccaaccucuacguccgcgccuccggccgcgucaccgucuccaccaagcgcucccagcagaccgucauccccaacaucggcucccgccccuggguccgcggccucuccucccgcaucuccaucuacuggaccaucgucaagcccggcgacauccuccucaucaacuccaccggcaaccucaucgccccccgcggcuacuucaagauccgcaccggcaaguccuccaucaugcgcuccgacgcccccaucggcaccugcuccuccgagugcaucacccccaacggcuccauccccaacgacaagcccuuccagaacgucaacaagaucaccuacggcgccugcccccgcuacgucaagcagaacacccucaagcucgccaccggcaugcgcaacguccccgagaagcagacccgcggcaucuucggcgccaucgccggcuucaucgagaacggcugggagggcauggucgacggcugguacggcuuccgccaccagaacuccgagggcaccggccaggccgccgaccucaaguccacccaggccgccaucgaccagaucaacggcaagcucaaccgccucaucgagaagaccaacgagaaguuccaccagaucgagaaggaguucuccgaggucgagggccgcauccaggaccucgagaaguacgucgaggacaccaagaucgaccucugguccuacaacgccgagcuccucgucgcccucgagaaccagcacaccaucgaccucaccgacuccgagaugaacaagcucuucgagaagacccgcaagcagcuccgcgagaacgccgaggacaugggcaacggcugcuucaagaucuaccacaagugcgacaacgccugcaucggcuccauccgcaacggcaccuacgaccacgacgucuaccgcgacgaggcccucaacaaccgcuuccagaucaagggcgucgagcucaaguccggcuacaaggacuggauccucuggaucuccuucgccaucuccugcuuccuccucugcgucguccuccucggcuucaucaugugggccugccagaagggcaacauccgcugcaacaucugcaucuga

SEQ ID NO: 96282 - RNA, 1701 nt, Artificial Sequence; identical to SEQ ID NO: 96154
  derived and/or modified CDS sequence (opt2) from hemagglutinin__InfluenzaA__AAZ43394

SEQ ID NO: 96283 - RNA, 1701 nt, Artificial Sequence
  derived and/or modified CDS sequence (opt2) from hemagglutinin__InfluenzaA__AAZ43405
augaagaccaucaucgcccucuccuacauccucugccucgucuucgcccagaagcuccccggcaacgacaacuccaccgccacccucugccucggccaccacgccguccccaacggcacccucgucaagaccaucaccaacgaccagaucgaggucaccaacgccaccgagcucguccaguccuccuccaccggccgcaucugcgacuccccccaccagauccucgacggcgagaacugcacccucaucgacgcccuccucggcgacccccacugcgacggcuuccagaacaaggagugggaccucuucgucgagcgcuccaaggccuacuccaacugcuaccccuacgacguccccgacuacgccucccuccgcucccucgucgccuccuccggcacccucgaguucaacaacgaguccuucaacuggaccggcgucgcccagaacggcaccuccuccgccugcaagcgccgcuccaacaaguccuucuucucccgccucaacuggcuccaccagcucaaguacaaguaccccgcccucaacgucaccaugcccaacaacgagaaguucgacaagcucuacaucuggggcguccaccaccccuccaccgacuccgaccagaucucccucuacgcccaggccuccggccgcgucaccgucuccaccaagcgcucccagcagaccgucauccccaacaucggcucccgccccuggguccgcggcgucuccucccgcaucuccaucuacuggaccaucgucaagcccggcgacauccuccucaucaacugcaccggcaaccucaucgccccccgcggcuacuucaagauccgcuccggcaaguccuccaucaugcgcuccgacgccuccaucggcaagugcaacuccgagugcaucacccccaacggcuccauccccaacgacaagcccuuccagaacgucaaccgcaucaccuacggcgccugcccccgcuacgucaagcagaacacccucaagcucgccaccggcaugcgcaacguccccgagaagcagacccgcggcaucuucggcgccaucgccggcuucaucgagaacggcugggagggcauggucgacggcugguacggcuuccgccaccagaacuccgagggcaccggccaggccgccgaccucaaguccacccaggccgccaucaaccagaucaacggcaagcucaaccgccucaucgagaagaccaacgagaaguuccaccagaucgagaaggaguucuccgaggucgagggccgcauccaggaccucgagaaguacgucgaggacaccaagaucgaccucugguccuacaacgccgagcuccucgucgcccucgagaaccagcacaccaucgaccucaccgacuccgagaugaacaagcucuucgagcgcaccaagaagcagcuccgcgagaacgccgaggacaugggcaacggcugcuucaagaucuaccacaagugcgacaacgccugcaucggcuccauccgcaacggcaccuacgaccacgacgucuaccgcgacgaggcccucaacaaccgcuuccagaucaagggcgucgagcucaaguccggcuacaaggacuggauccucuggaucuccuucgccaucuccugcuuccuccucugcgucguccuccucggcuucaucaugugggccugccagaagggcaacauccgcugcaacaucugcaucuga

SEQ ID NO: 96284 - RNA, 1701 nt, Artificial Sequence; identical to SEQ ID NO: 96083
  derived and/or modified CDS sequence (opt2) from hemagglutinin__InfluenzaA__AAZ74352

SEQ ID NO: 96285 - RNA, 1701 nt, Artificial Sequence; identical to SEQ ID NO: 96239
  derived and/or modified CDS sequence (opt2) from hemagglutinin__InfluenzaA__AAZ74363

SEQ ID NO: 96286 - RNA, 1698 nt, Artificial Sequence
  derived and/or modified CDS sequence (opt2) from hemagglutinin__InfluenzaA__AAZ74374
augaaggucaagcuccucauccuccucugcaccuucaccgccaccuacgccgacaccaucugcaucggcuaccacgccaacaacuccaccgacaccgucgacaccguccucgagaagaacgucaccgucacccacuccgucaaccuccucgaggacucccacaacggcaagcucugccuccucaagggcaucgccccccuccagcucggcaacugcuccgucgccggcuggauccucggcaaccccgagugcgagcuccucaucuccaaggaguccugguccuacaucgucgagacccccaaccccgagaacggcgccugcuaccccggcuacuucgccgacuacgaggagcuccgcgagcagcucuccuccgucuccuccuucgagcgcuucgagaucuuccccaaggaguccuccuggcccaaccacaccgucaccggcgucuccgccuccugcucccacaacggcaaguccuccuucuaccgcaaccuccucuggcucaccggcaagaacggccucuaccccaaccucuccaaguccuacgccaacaacaaggagaaggagguccucauccucuggggcguccaccacccccccaacaucggcgaccagcgcacccucuaccacaccgagaacgccuacgucuccgucgucuccucccacuacggccgccgcuucacccccgagaucaccaagcgccccaagguccgcgaccaggagggccgcaucaacuacuacuggacccuccucgagcccggcgacaccaucaucuucgaggccaacggcaaccucaucgcccccugguacgccuucgcccucucccgcggcuucggcuccggcaucaucaccuccaacgcccccauggacgagugcgacgccaagugccagaccccccagggcgccaucaacuccucccuccccuuccagaacguccaccccgucaccaucggcgagugccccaaguacguccgcuccgccaagcuccgcauggucaccggccuccgcaacauccccuccauccagucccgcggccucuucggcgccaucgccggcuucaucgagggcggcuggaccggcauggucgacggcugguacggcuaccaccaccagaacgagcagggcuccggcuacgccgccgaccagaaguccacccagaacgccaucaacggcaucaccaacaaggucaacuccgucaucgagaagaugaacacccaguucaccgccgucggcaaggaguucaacaagcucgagcgccgcauggagaaccucaacaagaaggucgacgacggcuuccucgacgucuggaccuacaacgccgagcuccucguccuccucgagaacgagcgcacccucgacuuccacgacuccaacgucaagaaccucuacgagaaggucaagucccagcucaagaacaacgccaaggagaucggcaacggcugcuucgaguucuaccacaagugcaacaacgagugcauggaguccgucaagaacggcaccuacgacuaccccaaguacuccgaggaguccaagcucaaccgcgagaagaucgacggcgucaagcucgacuccaugggcgucuaccagauccucgccaucuacuccaccgucgccuccucccucguccuccucgucucccucggcgccaucuccuucuggaugugcuccaacggcucccuccagugccgcaucugcaucuga

SEQ ID NO: 96287 - RNA, 1701 nt, Artificial Sequence
  derived and/or modified CDS sequence (opt2) from hemagglutinin__InfluenzaA__AAZ74397
augaacaccaucaucgcccucuccuacauccucugccucgucuucgcccagaagcuccccggcaacgacaacuccaccgccacccucugccucggccaccacgccguccccaacggcacccucgucaagaccaucaccuccgaccagaucgaggucaccaacgccaccgagcucguccaguccuccuccaccggccgcaucugcgacuccccccaccgcauccucgacggcgagaacugcacccucaucgacgcccuccucggcgacccccucugcgacggcuuccagaacaaggagugggaccucuucgucgagcgcuccaaggccuacuccaacugcuaccccuacgacguccccgacuacgccucccuccgcucccucgucgccuccuccggcacccucgaguucaacaacgaguccuucaacuggaccggcgucgcccagaacggcaccuccuucgccugcaagcgccgcuccaucaaguccuucuucucccgccucaacuggcuccaccagcucaaguacaaguaccccgcccucaacgucaccaugcccaacaacgacaaguucgacaagcucuacaucuggggcguccaccaccccggcaccgacuccgaccagaccucccucuacgcccaggccuccggccgcgucaccgucuccaccaagcgcucccagcagaccgucauccccaacaucggcucccgccccuggguccgcggcgucuccucccgcaucuccaucuacuggaccaucgucaagcccggcgacauccuccucaucaacuccaccggcaaccucaucgccccccgcggcuacuucaagauccgcuccggcaaguccuccaucaugcgcuccgacgcccccaucggcaagugcaacuccgagugcaucacccccaacggcuccauccccaacggcaagcccuuccagaacgucaaccgcaucaccuacggcgccugcccccgcuacgucaagcagaacacccucaagcucgccaccggcaugcgcaacguccccgagaagcagacccgcggcaucuucggcgccaucgccggcuucaucgagaacggcugggagggcauggucgacggcugguacggcuuccgccaccagaacuccgagggcaccggccaggccgccgaccucaaguccacccaggccgccaucaaccagaucaacggcaagcucaaccgccucaucgagaagaccaacgagaaguuccaccagaucgagaaggaguucaccgaggucgagggccgcauccaggaccucgagaaguacgucgaggacaccaagaucgaccucugguccuacaacgccgagcuccucgucgcccucgagaaccagcacaccaucgaccucaccgacuccgagaugaacaagcucuucgagcgcacccgcaagcagcuccgcgagaacgccgaggacaugggcaacggcugcuucaagaucuaccacaagugcgacaacgccugcaucggcuccauccgcaacggcaccuacgaccacgacgucuaccgcgacgaggcccucaacaaccgcuuccagaucaagggcgucgagcucaaguccggcuacaaggacuggauccucuggaucuccuucgccaccuccugcuuccuccucugcgucguccuccucggcuucaucaugugggccugccagaagggcaacauccgcugcaacaucugcaucuga

SEQ ID NO: 96288 - RNA, 1701 nt, Artificial Sequence
  derived and/or modified CDS sequence (opt2) from hemagglutinin__InfluenzaA__AAZ74408
augaagaccaucaucgcccucuccuacauccucugccucgucuucgcccagaagcuccccggcaacgacaacuccaccgccacccucugccucggccaccacgccguccccaacggcacccucgucaagaccaucaccaacgaccagaucgaggucaccaacgccaccgagcucguccaguccuccuccaccggccgcaucugcgacuccccccaccagauccucgacggcgagaacugcacccucaucgacgcccuccucggcgacccccacugcgacggcuuccagaacaaggagugggaccucuucgucgagcgcuccaaggccuacuccaacugcuaccccuacgacguccccgacuacgccucccuccgcucccucgucgccuccuccggcacccucgaguucaacaacgaguccuucaacuggaccggcgucgcccagaacggcaccuccuccgccugcaagcgccgcuccaacaaguccuucuucucccgccucaacuggcuccaccagcucaaguacaaguaccccgcccucaacgucaccaugcccaacaacgagaaguucgacaagcucuacaucuggggcguccaccaccccuccaccgacuccgaccagaucucccucuacgcccaggccuccggccgcgucaccgucuccaccaagcgcucccagcagaccgucauccccaacaucggcucccgccccuggguccgcggcgucuccucccgcaucuccaucuacuggaccaucgucaagcccggcgacauccuccucaucaacuccaccggcaaccucaucgccccccgcggcuacuucaagauccgcuccggcaaguccuccaucaugcgcuccgacgcccccaucggcaagugcaacuccgagugcaucacccccaacggcuccauccccaacgacaagcccuuccagaacgucaaccgcaucaccuacggcgccugcccccgcuacgucaagcagaacacccucaagcucgccaccggcaugcgcaacguccccgagaagcagacccgcggcaucuucggcgccaucgccggcuucaucgagaacggcugggagggcauggucgacggcugguacggcuuccgccaccagaacuccgagggcaccggccaggccgccgaccucaaguccacccaggccgccaucaaccagaucaacggcaagcucaaccgccucaucgagaagaccaacgagaaguuccaccagaucgagaaggaguucuccgaggucgagggccgcauccaggaccucgagaaguacgucgaggacaccaagaucgaccucugguccuacaacgccgagcuccucgucgcccucgagaaccagcacaccaucgaccucaccgacuccgagaugaacaagcucuucgagcgcaccaagaagcagcuccgcgagaacgccgaggacaugggcaacggcugcuucaagaucuaccacaagugcgacaacgccugcaucggcuccauccgcaacggcaccuacaaccacgacgucuaccgcgacgaggcccucaacaaccgcuuccagaucaagggcgucgagcucaaguccggcuacaaggacuggauccucuggaucuccuucgccaucuccugcuuccuccucugcgucguccuccucggcuucaucaugugggccugccagaagggcaacauccgcugcaacaucugcaucuga

SEQ ID NO: 96289 - RNA, 1701 nt, Artificial Sequence; identical to SEQ ID NO: 96222
  derived and/or modified CDS sequence (opt2) from hemagglutinin__InfluenzaA__AAZ74430

SEQ ID NO: 96290 - RNA, 1701 nt, Artificial Sequence; identical to SEQ ID NO: 96279
  derived and/or modified CDS sequence (opt2) from hemagglutinin__InfluenzaA__AAZ74441

SEQ ID NO: 96291 - RNA, 1701 nt, Artificial Sequence
  derived and/or modified CDS sequence (opt2) from hemagglutinin__InfluenzaA__AAZ74452
augaagaccaucaucgcccucuccuacauccucugccucgucuucgcccagaagcuccccggcaacgacaacuccaccgccacccucugccucggccaccacgccguccccaacggcaccaucgucaagaccaucaccaacgaccagaucgaggucaccaacgccaccgagcucguccaguccuccuccaccggcggcaucugcgacuccccccaccagauccucgacggcgagaacugcacccucaucgacgcccuccucggcgacccccagugcgacggcuuccagaacaagaagugggaccucuucaucgagcgcuccaaggccuacuccaacugcuaccccuacgacguccccgacuacgccucccuccgcucccucgucgccuccuccggcacccucgaguucaacaacgaguccuucaacuggaccggcgucacccagaacggcaccuccuccgccugcaagcgccgcuccaacaacuccuucuucucccgccucaacuggcucacccaccucaaguucaaguaccccgcccucaacgucaccaugcccaacaacgagaaguucgacaagcucuacaucuggggcguccaccaccccggcaccgacaacgaccagaucucccucuacgcccaggccuccggccgcaucaccgucuccaccaagcgcucccagcagaccgucauccccaacaucggcucccgcccccgcguccgcgacauccccucccgcaucuccaucuacuggaccaucgucaagcccggcgacauccuccucaucaacuccaccggcaaccucaucgccccccgcggcuacuucaagauccgcuccggcaaguccuccaucaugcgcuccgacgcccccaucggcaagugcaacuccgagugcaucacccccaacggcuccauccccaacgacaagcccuuccagaacgucaaccgcaucaccuacggcgccugcccccgcuacgucaagcagaacacccucaagcucgccaccggcaugcgcaacguccccgagaagcagacccgcggcaucuucggcgccaucgccggcuucaucgagaacggcugggagggcauggucgacggcugguacggcuuccgccaccagaacuccgagggcaucggccaggccgccgaccucaaguccacccaggccgccaucaaccagaucaacggcaagcucaaccgccucaucggcaagaccaacgagaaguuccaccagaucgagaaggaguucuccgaggucgagggccgcauccaggaccucgagaaguacgucgaggacaccaagaucgaccucugguccuacaacgccgagcuccucgucgcccucgagaaccagcacaccaucgaccucaccgacuccgagaugaacaagcucuucgagcgcaccaagaagcagcuccgcgagaacgccgaggacaugggcaacggcugcuucaagaucuaccacaagugcgacaacgccugcaucggcuccauccgcaacggcaccuacgaccacgacgucuaccgcgacgaggcccucaacaaccgcuuccagaucaagggcgucgagcucaaguccggcuacaaggacuggauccucuggaucuccuucgccaucuccugcuuccuccucugcgucgcccuccucggcuucaucaugugggccugccagaagggcaacauccgcugcaacaucugcaucuga

SEQ ID NO: 96292 - RNA, 1701 nt, Artificial Sequence
  derived and/or modified CDS sequence (opt2) from hemagglutinin__InfluenzaA__AAZ74463
augaagaccaucaucgcccucuccuacauccucugccucgucuucgcccagaagcuccccggcaacgacaacuccaccgccacccucugccucggccaccacgccguccccaacggcaccaucgucaagaccaucaccaacgaccagaucgaggucaccaacgccaccgagcucguccaguccuccuccaccggcggcaucugcgacuccccccaccagauccucgacggcgagaacugcacccucaucgacgcccuccucggcgacccccagugcgacggcuuccagaacaagaagugggaccucuucgucgagcgcuccaaggccuacuccaacugcuaccccuacgacguccccgacuacgccucccuccgcucccucgucgccuccuccggcacccucgaguucaacaacgaguccuucaacuggaccggcgucacccagaacggcaccuccuccgccugcaagcgccgcuccaacaacuccuucuucucccgccucaacuggcucacccaccucaaguucaaguaccccgcccucaacgucaccaugcccaacaacgagaaguucgacaagcucuacaucuggggcguccaccaccccggcaccgacaacgaccagaucucccucuacgcccaggccuccggccgcaucaccgucuccaccaagcgcucccagcagaccgucauccccaacaucggcucccgcccccgcguccgcgacauccccucccgcaucuccaucuacuggaccaucgucaagcccggcgacauccuccucaucaacuccaccggcaaccucaucgccccccgcggcuacuucaagauccgcuccggcaaguccuccaucaugcgcuccgacgcccccaucggcaagugcaacuccgagugcaucacccccaacggcuccauccccaacgacaagcccuuccagaacgucaaccgcaucaccuacggcgccugcccccgcuacgucaagcagaacacccucaagcucgccaccggcaugcgcaacguccccgagaagcagacccgcggcaucuucggcgccaucgccggcuucaucgagaacggcugggagggcauggucgacggcugguacggcuuccgccaccagaacuccgagggcaucggccaggccgccgaccucaaguccacccaggccgccaucaaccagaucaacggcaagcucaaccgccucaucggcaagaccaacgagaaguuccaccagaucgagaaggaguucuccgaggucgagggccgcauccaggaccucgagaaguacgucgaggacaccaagaucgaccucugguccuacaacgccgagcuccucgucgcccucgagaaccagcacaccaucgaccucaccgacuccgagaugaacaagcucuucgagcgcaccaagaagcagcuccgcgagaacgccgaggacaugggcaacggcugcuucaagaucuaccacaagugcgacaacgccugcaucggcuccauccgcaacggcaccuacgaccacgacgucuaccgcgacgaggcccucaacaaccgcuuccagaucaagggcgucgagcucaaguccggcuacaaggacuggauccucuggaucuccuucgccaucuccugcuuccuccucugcgucguccuccucggcuucaucaugugggccugccagaagggcaacauccgcugcaacaucugcaucuga

SEQ ID NO: 96293 - RNA, 1701 nt, Artificial Sequence
  derived and/or modified CDS sequence (opt2) from hemagglutinin__InfluenzaA__AAZ74474
augaagaccaucaucgcccucuccuacauccucugccucgucuucgcccagaagcuccccggcaacgacaacuccaccgccacccucugccucggccaccacgccguccccaacggcaccaucgucaagaccaucaccaacgaccagaucgaggucaccaacgccaccgagcucguccaguccuccuccaccggcggcaucugcgacuccccccaccagauccucgacggcgagaacugcacccucaucgacgcccuccucggcgacccccagugcgacggcuuccagaacaagaagugggaccucuucgucgagcgcuccaaggccuacuccaacugcuaccccuacgacguccccgacuacgccucccuccgcucccucgucgccuccuccggcacccucgaguucaacaacgaguccuucaacuggaccggcgucacccagaacggcaccuccuccgccugcaagaagcgcuccaacaacuccuucuucucccgccucaacuggcucacccaccucaaguucaaguaccccgcccucaacgucaccaugcccaacaacgagaaguucgacaagcucuacaucuggggcguccaccaccccggcaccgacaacgaccagaucucccucuacgcccaggccuccggccgcaucaccgucuccaccaagcgcucccagcagaccgucauccccaacaucggcucccgcccccgcguccgcgacauccccucccgcaucuccaucuacuggaccaucgucaagcccggcgacauccuccucaucaacuccaccggcaaccucaucgccccccgcggcuacuucaagauccgcuccggcaaguccuccaucaugcgcuccgacgcccccaucggcaagugcaacuccgagugcaucacccccaacggcuccauccccaacgacaagcccuuccagaacgucaaccgcaucaccuacggcgccugcccccgcuacgucaagcagaacacccucaagcucgccaccggcaugcgcaacguccccgagaagcagacccgcggcaucuucggcgccaucgccggcuucaucgagaacggcugggagggcauggucgacggcugguacggcuuccgccaccagaacuccgagggcaucggccaggccgccgaccucaaguccacccaggccgccaucaaccagaucaacggcaagcucaaccgccucaucggcaagaccaacgagaaguuccaccagaucgagaaggaguucuccgaggucgagggccgcauccaggaccucgagaaguacgucgaggacaccaagaucgaccucugguccuacaacgccgagcuccucgucgcccucgagaaccagcacaccaucgaccucaccgacuccgagaugaacaagcucuucgagcgcaccaagaagcagcuccgcgagaacgccgaggacaugggcaacggcugcuucaagaucuaccacaagugcgacaacgccugcaucggcuccauccgcaacggcaccuacgaccacgacgucuaccgcgacgaggcccucaacaaccgcuuccagaucaagggcgucgagcucaaguccggcuacaaggacuggauccucuggaucuccuucgccaucuccugcuuccuccucugcgucgcccuccucggcuucaucaugugggccugccagaagggcaacauccgcugcaacaucugcaucuga

SEQ ID NO: 96294 - RNA, 1701 nt, Artificial Sequence; identical to SEQ ID NO: 96291
  derived and/or modified CDS sequence (opt2) from hemagglutinin__InfluenzaA__AAZ74485

SEQ ID NO: 96295 - RNA, 1701 nt, Artificial Sequence; identical to SEQ ID NO: 96292
  derived and/or modified CDS sequence (opt2) from hemagglutinin__InfluenzaA__AAZ74496

SEQ ID NO: 96296 - RNA, 1701 nt, Artificial Sequence; identical to SEQ ID NO: 96291
  derived and/or modified CDS sequence (opt2) from hemagglutinin__InfluenzaA__AAZ74507

SEQ ID NO: 96297 - RNA, 1701 nt, Artificial Sequence; identical to SEQ ID NO: 96292
  derived and/or modified CDS sequence (opt2) from hemagglutinin__InfluenzaA__AAZ74518

SEQ ID NO: 96298 - RNA, 1701 nt, Artificial Sequence; identical to SEQ ID NO: 96291
  derived and/or modified CDS sequence (opt2) from hemagglutinin__InfluenzaA__AAZ74529

SEQ ID NO: 96299 - RNA, 1701 nt, Artificial Sequence
  derived and/or modified CDS sequence (opt2) from hemagglutinin__InfluenzaA__AAZ74551
augaagaccaucaucgcccucuccuacauccucugccucgucuucgcccagaagcuccccggcaacgacaacuccaccgccacccucugccucggccaccacgccguccccaacggcaccaucgucaagaccaucaccaacgaccagaucgaggucaccaacgccaccgagcucguccaguccuccuccaccggcggcaucugcgacuccccccaccagauccucgacggcgagaacugcacccucaucgacgcccuccucggcgacccccagugcgacggcuuccagaacaagaagugggaccucuucgucgagcgcuccaaggccuacuccaacugcuaccccuacgacguccccgacuacgccucccuccgcucccucgucgccuccuccggcacccucgaguucaacaacgaguccuucaacuggaccggcgucacccagaacggcaccuccuccgccugcaagcgccgcuccaacaacuccuucuucucccgccucaacuggcucacccaccucaaguucaaguaccccgcccucaacgucaccaugcccaacaacgagaaguucgacaagcucuacaucuggggcguccaccaccccggcaccgacaacgaccagaucucccucuacgcccaggccuccggccgcaucaccgucuccaccaagcgcucccagcagaccgucauccccaacaucggcucccgcccccgcguccgcgacauccccucccgcaucuccaucuacuggaccaucgucaagcccggcgacauccuccucaucaacuccaccggcaaccucaucgccccccgcggcuacuucaagauccgcuccggcaaguccuccaucaugcgcuccgacgcccccaucggcaagugcaacuccgagugcaucacccccaacggcuccauccccaacgacaagcccuuccagaacgucaaccgcaucaccuacggcgccugcccccgcuacgucaagcagaacacccucaagcucgccaccggcaugcgcaacguccccgagaagcagacccgcggcaucuucggcgccaucgccggcuucaucgagaacggcugggagggcauggucgacggcugguacggcuuccgccaccagaacuccgagggcaucggccaggccgccgaccucaaguccacccaggccgccaucaaccagaucaacggcaagcucaaccgccucaucggcaagaccaacgagaaguuccaccagaucgagaaggaguucuccgaggucgagggccgcauccaggaccucgagaaguacgucgaggacaccaagaucgaccucugguccuacaacgccgagcuccucgucgcccucgagaaccagcacacccucgaccucaccgacuccgagaugaacaagcucuucgagcgcaccaagaagcagcuccgcgagaacgccgaggacaugggcaacggcugcuucaagaucuaccacaagugcgacaacgccugcaucggcuccauccgcaacggcaccuacgaccacgacgucuaccgcgacgaggcccucaacaaccgcuuccagaucaagggcgucgagcucaaguccggcuacaaggacuggauccucuggaucuccuucgccaucuccugcuuccuccucugcgucgcccuccucggcuucaucaugugggccugccagaagggcaacauccgcugcaacaucugcaucuga

SEQ ID NO: 96300 - RNA, 1701 nt, Artificial Sequence; identical to SEQ ID NO: 96222
  derived and/or modified CDS sequence (opt2) from hemagglutinin__InfluenzaA__AAZ74562

SEQ ID NO: 96301 - RNA, 1701 nt, Artificial Sequence
  derived and/or modified CDS sequence (opt2) from hemagglutinin__InfluenzaA__AAZ74573
augaagaccaucaucgcccucuccuacauccucugccucgucuucgcccagaagcuccccggcaacgacaacuccaccgccacccucugccucggccaccacgccguccccaacggcaccaucgucaagaccaucaccaacgaccagaucgaggucaccaacgccaccgagcucguccaguccuccuccaccggcggcaucugcgacuccccccaccagauccucgacggcgagaacugcacccucaucgacgcccuccucggcgacccccagugcgacggcuuccagaacaagaagugggaccucuucaucgagcgcuccaaggccuacuccaacugcuaccccuacgacguccccgacuacgccucccuccgcucccucgucgccuccuccggcacccucgaguucaacaacgaguccuucaacuggaccggcgucacccagaacggcaccuccuccgccugcaagcgccgcuccaacaacuccuucuucucccgccucaacuggcucacccaccucaaguucaaguaccccgcccucaacgucaccaugcccaacaacgagaaguucgacaagcucuacaucuggggcguccaccaccccggcaccggcaacgaccagaucucccucuacgcccaggccuccggccgcaucaccgucuccaccaagcgcucccagcagaccgucauccccaacaucggcucccgcccccgcguccgcgacauccccucccgcaucuccaucuacuggaccaucgucaagcccggcgacauccuccucaucaacuccaccggcaaccucaucgccccccgcggcuacuucaagauccgcuccggcaaguccuccaucaugcgcuccgacgcccccaucggcaagugcaacuccgagugcaucacccccaacggcuccauccccaacgacaagcccuuccagaacgucaaccgcaucaccuacggcgccugcccccgcuacgucaagcagaacacccucaagcucgccaccggcaugcgcaacguccccgagaagcagacccgcggcaucuucggcgccaucgccggcuucaucgagaacggcugggagggcauggucgacggcugguacggcuuccgccaccagaacuccgagggcaucggccaggccgccgaccucaaguccacccaggccgccaucaaccagaucaacggcaagcucaaccgccucaucggcaagaccaacgagaaguuccaccagaucgagaaggaguucuccgaggucgagggccgcauccaggaccucgagaaguacgucgaggacaccaagaucgaccucugguccuacaacgccgagcuccucgucgcccucgagaaccagcacaccaucgaccucaccgacuccgagaugaacaagcucuucgagcgcaccaagaagcagcuccgcgagaacgccgaggacaugggcaacggcugcuucaagaucuaccacaagugcgacaacgccugcaucggcuccauccgcaacggcaccuacgaccacgacgucuaccgcgacgaggcccucaacaaccgcuuccagaucaagggcgucgagcucaaguccggcuacaaggacuggauccucuggaucuccuucgccaucuccugcuuccuccucugcgucgcccuccucggcuucaucaugugggccugccagaagggcaacauccgcugcaacaucugcaucuga

SEQ ID NO: 96302 - RNA, 1701 nt, Artificial Sequence
  derived and/or modified CDS sequence (opt2) from hemagglutinin__InfluenzaA__AAZ74584
augaagaccaucaucgcccucuccuacauccucugccucgucuucgcccagaagcuccccggcaacgacaacuccaccgccacccucugccucggccaccacgccguccccaacggcacccucgucaagaccaucgccaacgaccagaucgaggucaccaacgccaccgagcucguccaguccuccuccaccggccgcaucugcgacuccccccaccagauccucgacggcgagaacugcacccucaucgacgcccuccucggcgacccccacugcgacggcuuccagaacaaggagugggaccucuucgucgagcgcuccaaggccuacuccaacugcuaccccuacgacguccccgacuacgccucccuccgcucccucgucgccuccuccggcacccucgaguucaacaacgaguccuucaacuggaccggcgucgcccagaacggcaccuccuccgccugcaagcgccgcuccaacaaguccuucuucucccgccucaacuggcuccaccagcucaaguacaaguaccccgcccagaacgucaccaugcccaacaacgagaaguucgacaagcucuacaucuggggcguccaccaccccuccaccgacuccgaccagaucucccucuacgcccaggccuccggccgcgucaccgucuccaccaagcgcucccagcagaccgucauccccaacaucggcucccgccccuggguccgcggcgucuccucccgcaucuccaucuacuggaccaucgucaagcccggcgacauccuccucaucaacuccaccggcaaccucaucgccccccgcggcuacuucaagauccgcuccggcaaguccuccaucaugcgcuccgacgcccccaucggcaagugcaacuccgagugcaucacccccaacggcuccauccccaacgacaagcccuuccagaacgucaaccgcaucaccuacggcgccugcccccgcuacgucaagcagaacacccucaagcucgccaccggcaugcgcaacguccccgagaagcagacccgcggcaucuucggcgccaucgccggcuucaucgagaacggcugggagggcauggucgacggcugguacggcuuccgccaccagaacuccgagggcaccggccaggccgccgaccucaaguccacccaggccgccaucaaccagaucaacggcaagcucaaccgccucaucgagaagaccaacgagaaguuccaccagaucgagaaggaguucuccgaggucgagggccgcauccaggaccucgagaaguacgucgaggacaccaagaucgaccucugguccuacaacgccgagcuccucgucgcccucgagaaccagcacaccaucgaccucaccgacuccgagaugaacaagcucuucgagcgcaccaagaagcagcuccgcgagaacgccgaggacaugggcaacggcugcuucaagaucuaccacaagugcgacaacgccugcaucggcuccauccgcaacggcaccuacgaccacgacgucuaccgcgacgaggcccucaacaaccgcuuccagaucaagggcgucgagcucaaguccggcuacaaggacuggauccucuggaucuccuucgccaucuccugcuuccuccucugcgucgcccuccucggcuucaucaugugggccugccagaagggcaacauccgcugcaacaucugcaucuga

SEQ ID NO: 96303 - RNA, 1701 nt, Artificial Sequence; identical to SEQ ID NO: 96279
  derived and/or modified CDS sequence (opt2) from hemagglutinin__InfluenzaA__AAZ74595

SEQ ID NO: 96304 - RNA, 1701 nt, Artificial Sequence
  derived and/or modified CDS sequence (opt2) from hemagglutinin__InfluenzaA__AAZ74617
augaagaccaucaucgcccucuccuacauccucugccucgucuucgcccagaagcuccccgucaacgacaacuccaccgccacccucugccucggccaccacgccguccccaacggcacccucgucaagaccaucaccaacgaccacaucgaggucaccaacgccaccgagcucguccaguccuccuccaccggccgcaucugcgacuccccccaccagauccucgacggcgagaacugcacccucaucgacgcccuccucggcgacccccacugcgacggcuuccagaacaaggagugggaccucuucgucgagcgcuccaccgccuacuccaacugcuaccccuacgacguccccgacuacgccucccuccgcucccucgucgccuccuccggcacccucgaguucaacaacgaguccuucaacuggaccggcgucgcccagaacggcaccuccuccgccugcaagcgccgcuccaucaaguccuucuucucccgccucaacuggcuccaccagcucaaguacaaguaccccgcccucaacgucaccaugcccaacaacgagaaguucgacaagcucuacaucuggggcguccaccaccccuccaccgacuccgaccagaucucccucuacgcccaggccuccggccgcgucaccgucuccaccaagcgcucccagcagaccgucauccccaacaucggcucccgccccuggguccgcggcgucuccuccaagaucuccaucuacuggaccaucgucaagcccggcgacauccuccucaucaacuccaccggcaaccucaucgccccccgcggcuacuucaagauccgcuccggcaaguccuccaucaugcgcuccaacgcccccaucggcaagugcaacuccgagugcaucacccccaacggcuccauccccaacgacaagcccuuccagaacgucaaccgcaucaccuacggcgccugcccccgcuacgucaagcagaacacccucaagcucgccaccggcaugcgcaacguccccgagaagcagacccgcggcaucuucggcgccaucgccggcuucaucgagaacggcugggagggcauggucgacggcugguacggcuuccgccaccagaacuccgagggcaccggccaggccgccgaccucaaguccacccaggccgccaucaaccagaucaacggcaagcucaaccgccucaucgagaagaccaacgagaaguuccaccagaucgagaaggaguucuccgaggucgagggccgcauccaggaccucgagaaguacgucgaggacaccaagaucgaccucugguccuacaacgccgagcuccucgucgcccucgagaaccagcacaccaucgaccucaccgacuccgagaugaacaagcucuucgagcgcacccgcaagcagcuccgcgagaacgccgaggacaugggcaacggcugcuucaagaucuaccacaagugcgacaacgccugcaucggcuccauccgcaacggcaccuacgaccacgacgucuaccgcgacgaggcccucaacaaccgcuuccagaucaagggcgucgagcucaaguccggcuacaaggacuggauccucuggaucuccuucgccaucuccugcuuccuccucugcgucguccuccucggcuucaucaugugggccugccagaagggcaacauccgcugcaacaucugcaucuga

SEQ ID NO: 96305 - RNA, 1701 nt, Artificial Sequence; identical to SEQ ID NO: 96083
  derived and/or modified CDS sequence (opt2) from hemagglutinin__InfluenzaA__AAZ79505

SEQ ID NO: 96306 - RNA, 1701 nt, Artificial Sequence
  derived and/or modified CDS sequence (opt2) from hemagglutinin__InfluenzaA__AAZ79516
augaagaccaucaucgcccucuccuacauccucugccucgucuucgcccagaagcuccccggcaacgacaacuccaccgccacccucugccucggccaccacgccguccccaacggcacccucgucaagaccaucaccaacgaccagaucgaggucaccaacgccaccgagcucguccaguccuccuccaccggccgcaucugcgacuccccccaccagauccucgacggcgagaacugcacccucaucgacgcccuccucggcgacccccacugcgacggcuuccagaacaaggagugggaccucuucgucgagcgcuccaaggccuacuccaacugcuaccccuacgacguccccgacuacgccucccuccgcucccucgucgccuccuccggcacccucgaguucaacaacgaguccuucaacuggaccggcgucgcccagaacggcaccuccuccgccugcaagcgccgcuccaacaaguccuucuucucccgccucaacuggcuccaccagcucaaguacaaguaccccgcccucaacgucaccaugcccaacaacgagaaguucgacaagcucuacaucuggggcguccaccaccccuccaccgacuccgaccagaucucccucuacgcccaggccuccggccgcgucaccgucuccaccaagcgcucccagcagaccgucauccccaacaucggcucccgccccuggguccgcggcgucuccucccgcaucuccaucuacuggaccaucgucaagcccggcgacauccuccucaucaacuccaccggcaaccucaucgccccccgcggcuacuucaagauccgcuccggcaaguccuccaucaugcgcuccgacgcccccaucggcaagugcaacuccgagugcaucacccccaacggcuccauccccaacgacaagcccuuccagaacgucaaccgcaucaccuacggcgccugcccccgcuacgucaagcagaacacccucaagcucgccaccggcaugcgcaacguccccgagaagcagacccgcggcaucuucggcgccaucgccggcuucaucgagaacggcugggagggcauggucgacggcugguacggcuuccgccaccagaacuccgagggcaccggccaggccgccgaccucaaguccacccaggccgccaucaaccagaucaacggcaagcucaaccgccucaucgagaagaccaacgagaaguuccaccagaucgagaaggaguucuccgaggucgagggccgcauccaggaccucgagaaguacgucgaggacaccaagaucgaccucugguccuacaacgccgagcuccucgucgcccucgagaaccagcacaccaucgaccucaccgacuccgagaugaacaagcucuucgagcgcaccaagaagcagcuccgcgagaacgccgaggacaugggcaacggcugccucaagaucuaccacaagugcgacaacgccugcaucggcuccauccgcaacggcaccuacgaccacgacgucuaccgcgacgaggcccucaacaaccgcuuccagaucaagggcgucgagcucaaguccggcuacaaggacuggauccucuggaucuccuucgccaucuccugcuuccuccucugcgucguccuccucggcuucaucaugugggccugccagaagggcaacauccgcugcaacaucugcaucuga

SEQ ID NO: 96307 - RNA, 1701 nt, Artificial Sequence
  derived and/or modified CDS sequence (opt2) from hemagglutinin__InfluenzaA__AAZ79527
augaagaccaucaucgcccucuccuacauccucugccucgucuucgcccagaagcuccccggcaacgacaacuccaccgccacccucugccucggccaccacgccguccccaacggcaccaucgucaagaccaucaccaacgaccagaucgaggucaccaacgccaccgagcucguccaguccuccuccaccggcggcaucugcgacuccccccaccagauccucgacggcgagaacugcacccucaucgacgcccuccucggcgacccccagugcgacggcuuccagaacaagaagugggaccucuucgucgagcgcuccaaggccuacuccaacugcuaccccuacgacguccccgacuacgccucccuccgcucccucgucgccuccuccggcacccucgaguucaacaacgaguccuucgacuggaccggcgucacccagaacggcaccuccuccgccugcaagcgccgcuccaacaaguccuucuucucccgccucaacuggcucacccaccucaaguacaaguaccccgcccucaacgucaccaugcccaacaacgagaaguucgacaagcucuacaucuggggcguccaccaccccggcaccgacuccgaccagaucucccucuacgcccaggccuccggccgcaucaccgucuccaccaagcgcucccagcagaccgucauccccaacaucggcucccgcccccgcguccgcgacgucuccucccgcaucuccaucuacuggaccaucgucaagcccggcgacauccuccucaucaacuccaccggcaaccucaucgccccccgcggcuacuucaagauccgcuccggcaaguccuccaucaugcgcuccgacgcccccaucggcaagugcaacuccgagugcaucacccccaacggcuccauccccaacgacaagcccuuccagaacgucaaccgcaucaccuacggcgccugcccccgcuacgucaagcagaacacccucaagcucgccaccggcaugcgcaacguccccgagcgccagacccgcggcaucuucggcgccaucgccggcuucaucgagaacggcugggagggcauggucgacggcugguacggcuuccgccaccagaacuccgagggcaccggccaggccgccgaccucaaguccacccaggccgccaucaaccagaucaacggcaagcucaaccgccucaucggcaagaccaacgagaaguuccaccagaucgagaaggaguucuccgaggucgagggccgcauccaggaccucgagcgcuacgucgaggacaccaagaucgaccucugguccuacaacgccgagcuccucgucgcccucgagaaccagcacaccaucgaccucaccgacuccgagaugaacaagcucuucgagcgcaccaagaagcagcuccgcgagaacgccgaggacaugggcaacggcugcuucaagaucuaccacaagugcgacaacgccugcaucggcuccauccgcaacggcaccuacgaccacgacgucuaccgcgacgaggcccucaacaaccgcuuccagaucaagggcgucgagcucaaguccggcuacaaggacuggauccucuggaucuccuucgccaucuccugcuuccuccucugcgucgcccuccucggcuucaucaugugggccugccagaagggcaacauccgcugcaacaucugcaucuga

SEQ ID NO: 96308 - RNA, 1698 nt, Artificial Sequence
  derived and/or modified CDS sequence (opt2) from hemagglutinin__InfluenzaA__AAZ79549
augaaggucaagcuccucauccuccucugcaccuucaccgccaccuacgccgacaccaucugcaucggcuaccacgccaacaacuccaccgacaccgucgacaccguccucgagaagaacgucaccgucacccacuccgucaaccuccucgaggacucccacaacggcaagcucugccuccucaagggcaucgccccccuccagcucggcaacugcuccgucgccggcuggauccucggcaaccccgagugcgagcuccucaucuccaaggaguccugguccuacaucgucgagacccccaaccccgagaacggcgccugcuaccccggcuacuucgccgacuacgaggagcuccgcgagcagcucuccuccgucuccuccuucgagcgcuucgagaucuuccccaaggaguccuccuggcccaaccacaccgucaccggcgucuccgccuccugcucccacaacggcaaguccuccuucuaccgcaaccuccucuggcucaccggcaagaacggccucuaccccaaccucuccaaguccuacgccaacaacaaggagaaggagguccucauccucuggggcguccaccacccccccaacaucggcaaccagcgcacccucuaccacaccgagaacgccuacgucuccgucgucuccucccacuacucccgccgcuucacccccgagaucaccaagcgccccaagguccgcgaccaggagggccgcaucaacuacuacuggacccuccucgagcccggcgacaccaucaucuucgaggccaacggcaaccucaucgcccccugguacgccuucgcccucucccgcggcuucggcuccggcaucaucaccuccaacgcccccauggacgagugcgacgccaagugccagaccccccagggcgccaucaacuccucccuccccuuccagaacguccaccccgucaccaucggcgagugccccaaguacguccgcuccgccaagcuccgcauggucaccggccuccgcaacauccccuccauccagucccgcggccucuucggcgccaucgccggcuucaucgagggcggcuggaccggcauggucgacggcugguacggcuaccaccaccagaacgagcagggcuccggcuacgccgccgaccagaaguccacccagaacgccaucaacggcaucaccaacaaggucaacuccgucaucgagaagaugaacacccaguucaccgccgucggcaaggaguucaacaagcucgagcgccgcauggagaaccucaacaagaaggucgacgacggcuuccucgacaucuggaccuacaacgccgagcuccucguccuccucgagaacgagcgcacccucgacuuccacgacuccaacgucaagaaccucuacgagaaggucaagucccagcucaagaacaacgccaaggagaucggcaacggcugcuucgaguucuaccacaagugcaacaacgagugcauggaguccgucaagaacggcaccuacgacuaccccaaguacuccgaggaguccaagcucaaccgcgagaagaucgacggcgucaagcucgacuccaugggcgucuaccagauccucgccaucuacuccaccgucgccuccucccucguccuccucgucucccucggcgccaucuccuucuggaugugcuccaacggcucccuccagugccgcaucugcaucuga

SEQ ID NO: 96309 - RNA, 1701 nt, Artificial Sequence
  derived and/or modified CDS sequence (opt2) from hemagglutinin__InfluenzaA__AAZ79560
augaagaccaucaucgcccucuccuacauccucugccucgucuucgcccagaagcuccccggcaacgacaacuccaccgccacccucugccucggccaccacgccguccccaacggcacccucgucaagaccaucaccaacgaccagaucgaggucaccaacgccaccgagcucguccaguccuccuccaccggccgcaucugcgacuccccccaccagauccucgacggcgagaacugcacccucaucgacgcccuccucggcgacccccacugcgacggcuuccagaacaaggagugggaccucuucgucgagcgcuccaaggccuacuccaacugcuaccccuacgacguccccgacuacgccucccucaagucccucgucgccuccuccggcacccucgaguucaacaacgaguccuucaacuggaccggcgucgcccagaacggcaccuccuccgccugcaagcgccgcuccaacaaguccuucuucucccgccucaacuggcuccaccagcucaaguacaaguaccccgcccucaacgucaccaugcccaacaacgagaaguucgacaagcucuacaucuggggcguccaccaccccuccaccgacuccgaccagaucucccucuacgcccaggccuccggccgcgucaccgucuccaccaagcgcucccagcagaccgucauccccaacaucggcucccgccccuggguccgcggcgucuccucccgcaucuccaucuacuggaccaucgucaagcccggcgacauccuccucaucaacuccaccggcaaccucaucgccccccgcggcuacuucaagauccgcuccggcaaguccuccaucaugcgcuccaacgcccccaucggcaagugcaacuccgagugcaucacccccaacggcuccauccccaacgacaagcccuuccagaacgucaaccgcaucaccuacggcgccugcccccgcuacgucaagcagaacacccucaagcucgccaccggcaugcgcaacguccccgagaagcagacccgcggcaucuucggcgccaucgccggcuucaucgagaacggcugggagggcauggucgacggcugguacggcuuccgccaccagaacuccgagggcaccggccaggccgccgaccucaaguccacccaggccgccaucaaccagaucaacggcaagcucaaccgccucaucgagaagaccaacgagaaguuccaccagaucgagaaggaguucuccgaggucgagggccgcauccaggaccucgagaaguacgucgaggacaccaagaucgaccucugguccuacaacgccgagcuccucgucgcccucgagaaccagcacaccaucgaccucaccgacuccgagaugaacaagcucuucgagcgcaccaagaagcagcuccgcgagaacgccgaggacaugggcaacggcugcuucaagaucuaccacaagugcgacaacgccugcaucggcuccauccgcaacggcaccuacgaccacgacgucuaccgcgacgaggcccucaacaaccgcuuccagaucaagggcgucgagcucaaguccggcuacaaggacuggauccucuggaucuccuucgccaucuccugcuuccuccucugcgucguccuccucggcuucaucaugugggccugccagaagggcaacauccgcugcaacaucugcaucuga

SEQ ID NO: 96310 - RNA, 1701 nt, Artificial Sequence
  derived and/or modified CDS sequence (opt2) from hemagglutinin__InfluenzaA__AAZ79571
augaagaccaucaucgcccucuccuacauccucugccucgucuucgcccagaagcuccccggcaacgacaacuccaccgccacccucugccucggccaccacgccguccccaacggcacccucgucaagaccaucaccaacgaccagaucgaggucaccaacgccaccgagcucguccaguccuccuccaccggccgcaucugcgacuccccccaccagauccucgacggcgagaacugcacccucaucgacgcccuccucggcgacccccgcugcgacggcuuccagaacaaggagugggaccucuucgucgagcgcuccaaggccuacuccaacugcuaccccuacgacguccccgacuacgccucccuccgcucccucgucgccuccuccggcacccucgaguucaacaacgaguccuucaacuggaccggcgucgcccagaacggcaccuccuccgccugcaagcgccgcuccaacaaguccuucuucucccgccucaacuggcuccaccagcucaaguacaaguaccccgcccucaacgucaccaugcccaacaacgagaaguucgacaagcucuacaucuggggcguccaccaccccuccaccgacuccgaccagaucucccucuacgcccaggccuccggccgcgucaccgucuccaccaagcgcucccagcagaccgucauccccaacaucggcucccgccccuggguccgcggcgucuccucccgcaucuccaucuacuggaccaucgucaagcccggcgacauccuccucaucaacuccaccggcaaccucaucgccccccgcggcuacuucaagauccgcuccggcaaguccuccaucaugcgcuccgacgcccccaucggcaagugcaacuccgagugcaucacccccaacggcuccauccccaacgacaagcccuuccagaacgucaaccgcaucaccuacggcgccugcccccgcuacgucaagcagaacacccucaagcucgccaccggcaugcgcaacguccccgagaagcagacccgcggcaucuucggcgccaucgccggcuucaucgagaacggcugggagggcauggucgacggcugguacggcuuccgccaccagaacuccgagggcaccggccaggccgccgaccucaaguccacccaggccgccaucaaccagaucaacggcaagcucaaccgccucaucgagaagaccaacgagaaguuccaccagaucgagaaggaguucuccgaggucgagggccgcauccaggaccucgagaaguacgucgaggacaccaagaucgaccucugguccuacaacgccgagcuccucgucgcccucgagaaccagcacaccaucgaccucaccgacuccgagaugaacaagcucuucgagcgcaccaagaagcagcuccgcgagaacgccgaggacaugggcaacggcugcuucaagaucuaccacaagugcgacaacgccugcaucggcuccauccgcaacggcaccuacgaccacgacgucuaccgcgacgaggcccucaacaaccgcuuccagaucaagggcgucgagcucaaguccggcuacaaggacuggauccucuggaucuccuucgccaucuccugcuuccuccucugcgucguccuccucggcuucaucaugugggccugccagaagggcaacauccgcugcaacaucugcaucuga

SEQ ID NO: 96311 - RNA, 1701 nt, Artificial Sequence
  derived and/or modified CDS sequence (opt2) from hemagglutinin__InfluenzaA__AAZ79582
augaagaccaucaucgcccucuccuacauccucugccucgucuucgcccagaagcuccccggcaacgacaacuccaccgccacccucugccucggccaccacgccguccccaacggcacccucgucaagaccaucaccaacgaccagaucgaggucaccaacgccaccgagcucguccaguccuccuccaccggccgcaucugcgacuccccccaccagauccucgacggcgagaacugcacccucaucgacgcccuccucggcgacccccacugcgacggcuuccagaacaaggagugggaccucuucgucgagcgcuccaaggccuacuccaacugcuaccccuacgacguccccgacuacgccucccuccgcucccucgucgccuccuccggcacccucgaguucaacaacgaguccuucaacuggaccggcgucgcccagaacggcaccuccuccgccugcaagcgccgcuccaacaaguccuucuucucccgccucaacuggcuccaccagcucaaguacaaguaccccgcccucaacgucaccaugcccaacaacgagaaguucgacaagcucuacaucuggggcguccaccaccccuccaccgacuccgaccagaucucccucuacgcccaggccuccggccgcgucaccgucuccaccaagcgcucccagcagaccgucauccccaacaucggcuccggccccuggguccgcggcgucuccucccgcaucuccaucuacuggaccaucgucaagcccggcgacauccuccucaucaacuccaccggcaaccucaucgccccccgcggcuacuucaagauccgcuccggcaaguccuccaucaugcgcuccgacgcccccaucggcaagugcaacuccgagugcaucacccccaacggcuccauccccaacgacaagcccuuccagaacgucaaccgcaucaccuacggcgccugcccccgcuacgucaagcagaacacccucaagcucgccaccggcaugcgcaacguccccgagaagcagacccgcggcaucuucggcgccaucgccggcuucaucgagaacggcugggagggcauggucgacggcugguacggcuuccgccaccagaacuccgagggcaccggccaggccgccgaccucaaguccacccaggccgccaucaaccagaucaacggcaagcucaaccgccucaucgagaagaccaacgagaaguuccaccagaucgagaaggaguucuccgaggucgagggccgcauccaggaccucgagaaguacgucgaggacaccaagaucgaccucugguccuacaacgccgagcuccucgucgcccucgagaaccagcacaccaucgaccucaccgacuccgagaugaacaagcucuucgagcgcaccaagaagcagcuccgcgagaacgccgaggacaugggcaacggcugcuucaagaucuaccacaagugcgacaacgccugcaucggcuccauccgcaacggcaccuacgaccacgacgucuaccgcgacgaggcccucaacaaccgcuuccagaucaagggcgucgagcucaaguccggcuacaaggacuggauccucuggaucuccuucgccaucuccugcuuccuccucugcgucguccuccucggcuucaucaugugggccugccagaagggcaacauccgcugcaacaucugcaucuga

SEQ ID NO: 96312 - RNA, 1698 nt, Artificial Sequence
  derived and/or modified CDS sequence (opt2) from hemagglutinin__InfluenzaA__AAZ79604
augaaggccaagcuccucguccuccucugcaccuucaccgccaccuacgccgacaccaucugcaucggcuaccacgccaacaacuccaccgacaccgucgacaccguccucgagaagaacgucaccgucacccacuccgucaaccuccucgaggacucccacaacggcaagcucugccuccucaagggcaucgccccccuccagcucggcaacugcuccgucgccggcuggauccucggcaaccccgagugcgagcuccucaucuccaaggaguccugguccuacaucgucgagacccccaaccccgagaacggcaccugcuaccccggcuacuucgccgacuacgaggagcuccgcgagcagcucuccuccgucuccuccuucgagcgcuucgagaucuuccccaagggcuccuccuggcccaaccacaccgucaccggcgucuccgccuccugcucccacaacggcaaguccuccuucuaccgcaaccuccucuggcucaccggcaagaacggccucuaccccaaccucuccauguccuacgucaacaacaaggagaaggagguccucguccucuggggcguccaccacccccccaacaucggcgaccagcgcgcccucuaccacaccgagaacgccuacgucuccgucgucuccucccacuacucccgccgcuucacccccgagaucgccaagcgccccaagguccgcgaccaggagggccgcaucaacuacuacuggacccuccucgagcccggcgacaccaucaucuucgaggccaacggcaaccucaucgcccccugguacgccuucgcccucucccgcggcuucggcuccggcaucaucaccuccaacgcccccauggacgagugcgacgccaagugccagaccccccagggcgccaucaacuccucccuccccuuccagaacguccaccccgucaccaucggcgagugccccaaguacguccgcuccgccaagcuccgcauggucaccggccuccgcaacauccccuccauccagucccgcggccucuucggcgccaucgccggcuucaucgagggcggcuggaccggcauggucgacggcugguacggcuaccaccaccagaacgagcagggcuccggcuacgccgccgaccagaaguccacccagaacgccaucaaccgcaucaccaacaaggucaacuccgucaucgagaagaugaacacccaguucaccgccgucggcaaggaguucaacaagcucgagcgccgcauggagaaccucaacaagaaggucgacgacggcuuccucgacaucuggaccuacaacgccgagcuccucguccuccucgagaacgagcgcacccucgacuuccacgacuccaacgucaagaaccucuacgagaaggucaagucccagcucaagaacaacgccaaggagaucggcaacggcugcuucgaguucuaccacaagugcaacaacgagugcauggaguccgucaagaacggcaccuacgacuaccccaaguacuccgaggaguccaagcucaaccgcgagaagaucgacggcgucaagcucgaguccaugggcgucuaccagauccucgccaucuacuccaccgucgccuccucccucguccuccucgucucccucggcgccaucuccuucuggaugugcuccaacggcucccuccagugccgcaucugcaucuga

SEQ ID NO: 96313 - RNA, 1701 nt, Artificial Sequence
  derived and/or modified CDS sequence (opt2) from hemagglutinin__InfluenzaA__AAZ79615
augaagaccaucaucgcccucuccuacauccucugccucgucuucgcccagaagauccccggcaacgacaacuccaccgccacccucugcgucggccaccacgccguccccaacggcaccaucgucaagaccaucaccaacgaccagaucgaggucaccaacgccaccgagcucguccaguccuccuccaccggcggcaucugcgacuccccccaccagauccucgacggcgagaacugcacccucaucgacgcccuccucggcgacccccagugcgacggcuuccagaacaagaagugggaccucuucgucgagcgcuccaaggccuacuccaacugcuaccccuacgacguccccgacuacgccucccuccgcucccucgucgccuccuccggcacccucgaguucaacaacgaguccuucaacuggaccggcgucacccagaacggcaccuccuccgccugcaagcgccgcuccaacaacuccuucuucucccgccucaacuggcucacccaccucaaguucaaguaccccgcccucaacgucaccaugcccaacaacgagaaguucgacaagcucuacaucuggggcguccaccaccccggcaccgacaacgaccagaucucccucuacgcccaggccuccggccgcaucaccgucuccaccaagcgcucccagcagaccgucauccccaacaucggcucccgcccccgcguccgcgacauccccucccgcaucuccaucuacuggaccaucgucaagcccggcgacauccuccucaucaacuccaccggcaaccucaucgccccccgcggcuacuucaagauccgcuccggcaaguccuccaucaugcgcuccgacgcccccaucggcaagugcaacuccgagugcaucacccccaacggcuccauccccaacgacaagcccuuccagaacgucaaccgcaucaccuacggcgccugcccccgcuacgucaagcagaacacccucaagcucgccaccggcaugcgcaacguccccgagaagcagacccgcggcaucuucggcgccaucgccggcuucaucgagaacggcugggagggcauggucgacggcugguacggcuuccgccaccagaacuccgagggcaucggccaggccgccgaccucaaguccacccaggccgccaucaaccagaucaacggcaagcucaaccgccucaucggcaagaccaacgagaaguuccaccagaucgagaaggaguucuccgaggucgagggccgcauccaggaccucgagaaguacgucgaggacaccaagaucgaccucugguccuacaacgccgagcuccucgucgcccucgagaaccagcacaccaucgaccucaccgacuccgagaugaacaagcucuucgagcgcaccaagaagcagcuccgcgagaacgccgaggacaugggcaacggcugcuucaagaucuaccacaagugcgacaacgccugcaucggcuccauccgcaacggcaccuacgaccacgacgucuaccgcgacgaggcccucaacaaccgcuuccagaucaagggcgucgagcucaaguccggcuacaaggacuggauccucuggaucuccuucgccaucuccugcuuccuccucugcgucguccuccucggcuucaucaugugggccugccagaagggcaacauccgcugcaacaucugcaucuga

SEQ ID NO: 96314 - RNA, 1701 nt, Artificial Sequence
  derived and/or modified CDS sequence (opt2) from hemagglutinin__InfluenzaA__AAZ79627
augaagaccaucaucgcccucuccuacauccucugccucgucuucgcccagaagcuccccggcaacgacaacuccaccgccacccucugccucggccaccacgccguccccaacggcaccaucgucaagaccaucaccaacgaccagaucgaggucaccaacgccaccgagcucguccaguccuccuccaccggcggcaucugcgacuccccccaccagauccucgacggcgagaacugcacccucaucgacgcccuccucggcgacccccagugcgacggcuuccagaacaagaagugggaccucuucgucgagcgcuccaaggccuacuccaacugcuaccccuacgacguccccgacuacgccucccuccgcucccucgucgccuccuccggcacccucgaguucaacaacgaguccuucaacuggaccggcgucacccagaacggcaccuccuccgccugcaagcgccgcuccaacuccuccuucuucucccgccucaacuggcucacccaccucaaguucaaguaccccgcccucaaggucaccaugcccaacaacgagaaguucgacaagcucuacaucuggggcguccaccaccccggcaccgacaacgaccagaucucccucuacgcccaggccuccggccgcaucaccgucuccaccaagcgcucccagcagaccgucauccccaacaucggcucccgcccccgcguccgcgacauccccucccgcaucuccaucuacuggaccaucgucaagcccggcgacauccuccucaucaacuccaccggcaaccucaucgccccccgcggcuacuucaagauccgcuccggcaaguccuccaucaugcgcuccgacgcccccaucggcaagugcaacuccgagugcaucacccccaacggcuccauccccaacgacaagcccuuccagaacgucaaccgcaucaccuacggcgccugcccccgcuacgucaagcagaacacccucaagcucgccaccggcaugcgcaacguccccgagaagcagacccgcggcaucuucggcgccaucgccggcuucaucgagaacggcugggagggcauggucgacggcugguacggcuuccgccaccagaacuccgagggcaucggccaggccgccgaccucaaguccacccaggccgccaucaaccagaucaacggcaagcucaaccgccucaucggcaagaccaacgagaaguuccaccagaucgagaaggaguucuccgaggucgagggccgcauccaggaccucgagaaguacgucgaggacaccaagaucgaccucugguccuacaacgccgagcuccucgucgcccucgagaaccagcacaccaucgaccucaccgacuccgagaugaacaagcucuucgagcgcaccaagaagcagcuccgcgagaacgccgaggacaugggcaacggcugcuucaagaucuaccacaagugcgacaacgccugcaucggcuccauccgcaacggcaccuacgaccacgacgucuaccgcgacgaggcccucaacaaccgcuuccagaucaagggcgucgagcucaaguccggcuacaaggacuggauccucuggaucuccuucgccaucuccugcuuccuccucugcgucgcccuccucggcuucaucaugugggccugccagaagggcaacauccgcugcaacaucugcaucuga

SEQ ID NO: 96315 - RNA, 1701 nt, Artificial Sequence; identical to SEQ ID NO: 96292
  derived and/or modified CDS sequence (opt2) from hemagglutinin__InfluenzaA__AAZ79941

SEQ ID NO: 96316 - RNA, 1701 nt, Artificial Sequence; identical to SEQ ID NO: 96291
  derived and/or modified CDS sequence (opt2) from hemagglutinin__InfluenzaA__AAZ79944

SEQ ID NO: 96317 - RNA, 1701 nt, Artificial Sequence
  derived and/or modified CDS sequence (opt2) from hemagglutinin__InfluenzaA__AAZ79963
augaagaccaucaucgcccucuccuacauccucugccucgucuucgcccagaagcuccccggcaacgacaacuccaccgccacccucugccucggccaccacgccguccccaacggcaccaucgucaagaccaucaccaacgaccagaucgaggucaccaacgccaccgagcucguccaguccuccuccaccggcggcaucugcgacuccccccaccagauccucgacggcgagaacugcacccucaucgacgcccuccucggcgacccccagugcgacggcuuccagaacaagaagugggaccucuucgucgagcgcuccaaggccuacuccaacugcuaccccuacgacguccccgacuacgccucccuccgcucccucgucgccuccuccggcacccucgaguucaacaacgaguccuucaacuggaccggcgucacccagaacggcaccuccuccgccugcaagcgccgcuccaacaacuccuucuucucccgccucaacuggcucacccaccucaaguucaaguaccccgcccucaacgucaccaugcccaacaacgagaaguucgacaagcucuacaucuggggcguccaccaccccggcaccgacaacgaccagaucucccucuacgcccaggccuccggccgcaucaccgucuccaccaagcgcucccagcagaccgucauccccuccaucggcucccgcccccgcauccgcgacguccccucccgcaucuccaucuacuggaccaucgucaagcccggcgacauccuccucaucaacuccaccggcaaccucaucgccccccgcggcuacuucaagauccgcuccggcaaguccuccaucaugcgcuccgacgcccccaucggcaagugcaacuccgagugcaucacccccaacggcuccauccccaacgacaagcccuuccagaacgucaaccgcaucaccuacggcgccugcccccgcuacgucaagcagaacacccucaagcucgccaccggcaugcgcaacguccccgagaagcagacccgcggcaucuucggcgccaucgccggcuucaucgagaacggcugggagggcauggucgacggcugguacggcuuccgccaccagaacuccgagggcaccggccaggccgccgaccucaaguccacccaggccgccaucaaccagaucaacggcaagcucaaccgccucaucggcaagaccaacgagaaguuccaccagaucgagaaggaguucuccgaggucgagggccgcauccaggaccucgagaaguacgucgaggacaccaagaucgaccucugguccuacaacgccgagcuccucgucgcccucgagaaccagcacaccaucgaccucaccgacuccgagaugaacaagcucuucgagcgcaccaagaagcagcuccgcgagaacgccgaggacaugggcaacggcugcuucaagaucuaccacaagugcgacaacgccugcaucggcuccauccgcaacggcaccuacgaccacgacgucuaccgcgacgaggcccucaacaaccgcuuccagaucaagggcgucgagcucaaguccggcuacaaggacuggauccucuggaucuccuucgccaucuccugcuuccuccucugcgucgcccuccucggcuucaucaugugggccugccagaagggcaacauccgcugcaacaucugcaucuga

SEQ ID NO: 96318 - RNA, 1701 nt, Artificial Sequence
  derived and/or modified CDS sequence (opt2) from hemagglutinin__InfluenzaA__AAZ79974
augaagaccaucaucgcccucuccuacauccucugccucgucuucgcccagaagcuccccggcaacgacaacuccaccgccacccucugccucggccaccacgccguccccaacggcaccaucgucaagaccaucaccaacgaccagaucgaggucaccaacgccaccgagcucguccaguccuccuccaccggcggcaucugcgacuccccccaccagauccucgacggcgagaacugcacccucaucgacgcccuccucggcgacccccagugcgacggcuuccagaacaagaagugggaccucuucgucgagcgcuccaaggccuacuccaacugcuaccccuacgacguccccgacuacgccucccuccgcucccucgucgccuccuccggcacccucgaguucaacaacgaguccuucaacuggaccggcgucacccagaacggcaccuccuccgccugcaagcgccgcuccaacaacuccuucuucucccgccucaacuggcucacccaccucaaguucaaguaccccgcccucaacgucaccaugcccaacaacgagaaguucgacaagcucuacaucuggggcguccaccaccccggcaccaacaacgaccagaucucccucuacgcccaggccuccggccgcaucaccgucuccaccaagcgcucccagcagaccgucauccccaacaucggcucccgcccccgcguccgcgacauccccucccgcaucuccaucuacuggaccaucgucaagcccggcgacauccuccucaucaacuccaccggcaaccucaucgccccccgcggcuacuucaagauccgcuccggcaaguccuccaucaugcgcuccgacgcccccaucggcaagugcaacuccgagugcaucacccccaacggcuccauccccaacgacaagcccuuccagaacgucaaccgcaucaccuacggcgccugcccccgcuacgucaagcagaacacccucaagcucgccaccggcaugcgcaacguccccgagaagcagacccgcggcaucuucggcgccaucgccggcuucaucgagaacggcugggagggcauggucgacggcugguacggcuuccgccaccagaacuccgagggcaucggccaggccgccgaccucaaguccacccaggccgccaucaaccagaucaacggcaagcucaaccgccucaucggcaagaccaacgagaaguuccaccagaucgagaaggaguucuccgaggucgagggccgcauccaggaccucgagaaguacgucgaggacaccaagaucgaccucugguccuacaacgccgagcuccucgucgcccucgagaaccagcacaccaucgaccucaccgacuccgagaugaacaagcucuucgagcgcaccaagaagcagcuccgcgagaacgccgaggacaugggcaacggcugcuucaagaucuaccacaagugcgacaacgccugcaucggcuccauccgcaacggcaccuacgaccacgacgucuaccgcgacgaggcccucaacaaccgcuuccagaucaagggcgucgagcucaaguccggcuacaaggacuggauccucuggaucuccuucgccaucuccugcuuccuccucugcgucgcccuccucggcuucaucaugugggccugccagaagggcaacauccgcugcaacaucugcaucuga

SEQ ID NO: 96319 - RNA, 1701 nt, Artificial Sequence; identical to SEQ ID NO: 96291
  derived and/or modified CDS sequence (opt2) from hemagglutinin__InfluenzaA__AAZ79996

SEQ ID NO: 96320 - RNA, 1701 nt, Artificial Sequence
  derived and/or modified CDS sequence (opt2) from hemagglutinin__InfluenzaA__AAZ80007
augaagaccaucaucgcccucucccacaucuucugccucguccucggccaguaccuccccggcaacgacaacuccaccgccacccucugccucggccaccacgccguccccaacggcacccucgucaagaccaucaccaacgaccagaucgaggucaccaacgccaccgagcucguccaguccuccuccaccggcaagaucugcaacaacccccaccgcauccucgacggcaucgacugcacccucaucgacgcccuccucggcgacccccacugcgacggcuuccagaacgagaccugggaccucuucgucgagcgcuccaaggccuucuccaacugcuaccccuacgacguccccgacuacgccucccuccgcucccucgucgccuccuccggcacccucgaguucaucaccgagggcuucaccuggaccggcgucacccagaacggcggcuccaacgccugcaagcgcggccccggcuccggcuucuucucccgccucaacuggcucaccaaguccgaguccaccuaccccguccucaacgucaccaugcccaacaacgacaacuucgacaagcucuacaucuggggcguccaccaccccuccaccaaccaggagcagaccucccucuacguccaggccuccggccgcgucaccgucuccacccgccgcucccagcagaccaucauccccaacaucggcucccgccccuggguccgcggccucuccucccgcaucuccaucuacuggaccaucgucaagcccggcgacguccucgucaucaacuccaacggcaaccucaucgccccccgcggcuacuucaagaugcgcaccggcaaguccuccaucaugcgcuccgacgcccccaucgacaccugcaucuccgagugcaucacccccaacggcuccauccccaacgacaagcccuuccagaacgucaacaagaucaccuacggcgccugccccaaguacgucaagcagaacacccucaagcucgccaccggcaugcgcaacguccccgagaagcagacccgcggccucuucggcgccaucgccggcuucaucgagaacggcugggagggcaugaucgacggcugguacggcuuccgccaccagaacuccgagggcaccggccaggccgccgaccucaaguccacccaggccgccaucgaccagaucaacggcaagcucaaccgcgucaucgagaagaccaacgagaaguuccaccagaucgagaaggaguucuccgaggucgagggccgcauccaggaccucgagaaguacgucgaggacaccaagaucgaccucugguccuacaacgccgagcuccucgucgcccucgagaaccagcacaccaucgaccucaccgacuccgagaugaacaagcucuucgagaagacccgccgccagcuccgcgagaacgccgaggacaugggcaacggcugcuucaagaucuaccacaagugcgacaacgccugcaucgaguccauccgcaacggcaccuacgaccacgacgucuaccgcgacgaggcccucaacaaccgcuuccagaucaagggcgucgagcucaaguccggcuacaaggacuggauccucuggaucuccuucgccaucuccugcuuccuccucugcgucguccuccucggcuucaucaugugggccugccagcgcggcaacauccgcugcaacaucugcaucuga

SEQ ID NO: 96321 - RNA, 1701 nt, Artificial Sequence; identical to SEQ ID NO: 96292
  derived and/or modified CDS sequence (opt2) from hemagglutinin__InfluenzaA__AAZ80017

SEQ ID NO: 96322 - RNA, 1701 nt, Artificial Sequence
  derived and/or modified CDS sequence (opt2) from hemagglutinin__InfluenzaA__AAZ80030
augaagaccaucaucgcccucuccuacauccucugccucgucuucgcccaggagcuccccggcaacgacaacuccaccgccacccucugccucggccaccacgccguccccaacggcaccaucgucaagaccaucaccaacgaccagaucgaggucaccaacgccaccgagcucguccaguccuccuccaccggcggcaucugcgacuccccccaccagauccucgacggcgagaacugcacccucaucgacgcccuccucggcgacccccagugcgacggcuuccagaacaagaagugggaccucuucgucgagcgcuccaaggccuacuccaacugcuaccccuacgacguccccgacuacgccucccuccgcucccucgucgccuccuccggcacccucgaguucaacaacgaguccuucaacuggaccggcgucacccagaacggcaccuccuccgccugcaagcgccgcuccaacaacuccuucuucucccgccucaacuggcucacccaccucaaguucaaguaccccgcccucaacgucaccaugcccaacaacgagaaguucgacaagcucuacaucuggggcguccaccaccccggcaccgacaacgaccagaccucccucuacgcccaggccuccggccgcaucaccgucuccaccaagcgcucccagcagaccgucauccccaacaucggcucccgcccccgcguccgcgacauccccucccgcaucuccaucuacuggaccaucgucaagcccggcgacauccuccucaucaacuccaccggcaaccucaucgccccccgcggcuacuucaagauccgcuccggcaaguccuccaucaugcgcuccgacgcccccaucggcaagugcaacuccgagugcaucacccccaacggcuccauccccaacgacaagcccuuccagaacgucaaccgcaucaccuacggcgccugcccccgcuacgucaagcagaacacccucaagcucgccaccggcaugcgcaacguccccgagaagcagacccgcggcaucuucggcgccaucgccggcuucaucgagaacggcugggagggcauggucgacggcugguacggcuuccgccaccagaacuccgagggcaucggccaggccgccgaccucaaguccacccaggccgccaucaaccagaucaacggcaagcucaaccgccucaucggcaagaccaacgagaaguuccaccagaucgagaaggaguucuccgaggucgagggccgcauccaggaccucgagaaguacgucgaggacaccaagaucgaccucugguccuacaacgccgagcuccucgucgcccucgagaaccagcacaccaucgaccucaccgacuccgagaugaacaagcucuucgagcgcaccaagaagcagcuccgcgagaacgccgaggacaugggcaacggcugcuucaagaucuaccacaagugcgacaacgccugcaucggcuccauccgcaacggcaccuacgaccacgacgucuaccgcgacgaggcccucaacaaccgcuuccagaucaagggcgucgagcucaaguccggcuacaaggacuggauccucuggaucuccuucgccaucuccugcuuccuccucugcgucgcccuccucggcuucaucaugugggccugccagaagggcaacauccgcugcaacaucugcaucuga

SEQ ID NO: 96323 - RNA, 1701 nt, Artificial Sequence
  derived and/or modified CDS sequence (opt2) from hemagglutinin__InfluenzaA__AAZ83242
augaagaccaucaucgcccucuccuacauccucugccucgucuucgcccagaagcuccccggcaacgacaacuccaccgccacccucugccucggccaccacgccguccccaacggcaccaucgucaagaccaucaccaacgaccagaucgaggucaccaacgccaccgagcucguccaguccuccuccaccggcgagaucugcgacuccccccaccagauccucgacggcgagaacugcacccucaucgacgcccuccucggcgacccccagugcgacggcuuccagaacaagaagugggaccucuucgucgagcgcaacaaggccuacuccaacugcuaccccuacgacguccccgacuacgccucccuccgcucccucgucgccuccuccggcacccucgaguucaacaacgaguccuucaacuggaccggcgucacccagaacggcaccuccuccgccugcaagcgccgcuccaacaaguccuucuucucccgccucaacuggcucacccaccucaaguacaaguaccccgcccucaacgucaccaugcccaacaacgagaaguucgacaagcucuacaucuggggcguccaccaccccggcaccgacuccgaccagaucaaccucuacgcccaggccuccggccgcaucaccgucuccaccaagcgcucccagcagaccgucauccccaacaucggcuaccgcccccgcguccgcgacguccccucccgcaucuccaucuacuggaccaucgucaagcccggcgacauccuccucaucaacuccaccggcaaccucaucgccccccgcggcuacuucaagauccgcuccggcaaguccuccaucaugcgcuccgacgcccccaucggcaagugcaacuccgagugcaucacccccaacggcuccauccccaacgacaagcccuuccagaacgucaaccgcaucaccuacggcgccugcccccgcuacgucaagcagaacacccucaagcucgccaccggcaugcgcaacguccccgagaagcagacccgcggcaucuucggcgccaucgccggcuucaucgagaacggcugggagggcauggucgacggcugguacggcuuccgccaccagaacuccgagggcaccggccaggccgccgaccucaaguccacccaggccgccaucaaccagaucaacggcaagcucaaccgccucaucggcaagaccaacgagaaguuccaccagaucgagaaggaguucuccgaggucgagggccgcauccaggaccucgagaaguacgucgaggacaccaagaucgaccucugguccuacaacgccgagcuccucgucgcccucgagaaccagcacaccaucgaccucaccgacuccgagaugaacaagcucuucgagcgcaccaagaagcagcuccgcgagaacgccgaggacaugggcaacggcugcuucaagaucuaccacaagugcgacaacgccugcaucggcuccauccgcaacggcaccuacgaccacgacgucuaccgcgacgaggcccucaacaaccgcuuccagaucaagggcgucgagcucaaguccggcuacaaggacuggauccucuggaucuccuucgccaucuccugcuuccuccucugcgucgcccuccucggcuucaucaugugggccugccagaagggcaacauccgcugcaacaucugcaucuga

SEQ ID NO: 96324 - RNA, 1701 nt, Artificial Sequence
  derived and/or modified CDS sequence (opt2) from hemagglutinin__InfluenzaA__AAZ83266
augaagaccaucaucgcccucuccuacauccucugccucgucuucgcccagaagcuccccggcaacgacaacuccaccgccacccucugccucggccaccacgccguccccaacggcacccucgucaagaccaucaccaacgaccagaucgaggucaccaacgccaacgagcucguccaguccuccuccaccggccgcaucugcgacuccccccaccagauccucgacggcgagaacugcacccucaucgacgcccuccucggcgacccccgcugcgacggcuuccagaacaaggagugggaccucuucgucgagcgcuccaaggccuacuccaacugcuaccccuacgacguccccgacuacgccucccuccgcucccucgucgccuccuccggcacccucgaguucaacaacgaguccuucaacuggaccggcgucgcccagaacggcaccuccuccgccugcaagcgccgcuccaacaaguccuucuucucccgccucaacuggcuccaccagcucaaguacaaguaccccgcccucaacgucaccaugcccaacaacgagaaguucgacaagcucuacaucuggggcguccaccaccccuccaccgacuccgaccagaucucccucuacgcccaggccuccggccgcgucaccgucuccaccaagcgcucccagcagaccgucauccccaacaucggcucccgccccuggguccgcggcgucuccucccgcaucuccaucuacuggaccaucgucaagcccggcgacauccuccucaucaacuccaccggcaaccucaucgccccccgcggcuacuucaagauccgcuccggcaaguccuccaucaugcgcuccgacgcccccaucggcaagugcaacuccgagugcaucacccccaacggcuccauccccaacgacaagcccuuccagaacgucaaccgcaucaccuacggcgccugcccccgcuacgucaagcagaacacccucaagcucgccaccggcaugcgcaacguccccgagaagcagacccgcggcaucuucggcgccaucgccggcuucaucgagaacggcugggagggcauggucgacggcugguacggcuuccgccaccagaacuccgagggcaccggccaggccgccgaccucaaguccacccaggccgccaucaaccagaucaacggcaagcucaaccgccucaucgagaagaccaacgagaaguuccaccagaucgagaaggaguucuccgaggucgagggccgcauccaggaccucgagaaguacgucgaggacaccaagaucgaccucugguccuacaacgccgagcuccucgucgcccucgagaaccagcacaccaucgaccucaccgacuccgagaugaacaagcucuucgagcgcaccaagaagcagcuccgcgagaacgccgaggacaugggcaacggcugcuucaagaucuaccacaagugcgacaacgccugcaucggcuccauccgcaacggcaccuacgaccacgacgucuaccgcgacgaggcccucaacaaccgcuuccagaucaagggcgucgagcucaaguccggcuacaaggacuggauccucuggaucuccuucgccaucuccugcuuccuccucugcgucguccuccucggcuucaucaugugggccugccagaagggcaacauccgcugcaacaucugcaucuga

SEQ ID NO: 96325 - RNA, 1701 nt, Artificial Sequence; identical to SEQ ID NO: 96222
  derived and/or modified CDS sequence (opt2) from hemagglutinin__InfluenzaA__AAZ83277

SEQ ID NO: 96326 - RNA, 1701 nt, Artificial Sequence; identical to SEQ ID NO: 96108
  derived and/or modified CDS sequence (opt2) from hemagglutinin__InfluenzaA__AAZ83288

SEQ ID NO: 96327 - RNA, 1701 nt, Artificial Sequence
  derived and/or modified CDS sequence (opt2) from hemagglutinin__InfluenzaA__AAZ83312
augaagaccaucaucgcccucuccuacauccucugccucgucuucgcccagaagcuccccggcaacgacaacuccaccgccacccucugccucggccaccacgccguccccaacggcacccucgucaagaccaucaccaacgaccagaucgaggucaccaacgccaccgagcucguccaguccuccuccaccggccgcaucugcgacuccccccaccagauccucgacggcgagaacugcacccucaucgacgcccuccucggcgacccccacugcgacggcuuccagaacaaggagugggaccucuucgucgagcgcuccaaggccuacuccaacugcuaccccuacgacguccccgacuacgccucccuccgcucccucgucgccuccuccggcacccucgaguucaacaacgaguccuucaacuggaccggcgucgcccagaacggcaccuccuccgccugcaagcgccgcuccaucaaguccuucuucucccgccucaacuggcuccaccagcucaaguacaaguaccccgcccucaacgucaccaugcccaacaacgacaaguucgacaagcucuacaucuggggcguccaccaccccuccaccgacuccgaccagaccucccucuacgcccaggccuccggccgcgucaccgucuccaccaagcgcucccagcagaccgucauccccaacaucggcucccgccccuggguccgcggcgucuccucccgcaucuccaucuacuggaccaucgucaagcccggcgacauccuccucaucaacuccaccggcaaccucaucgccccccgcggcuacuucaagauccgcuccggcaaguccuccaucauccgcuccgacgcccccaucggcaagugcaacuccgagugcaucacccccaacggcuccauccccaacgacaagcccuuccagaacgucaaccgcaucaccuacggcgccugcccccgcuacgucaagcagaacacccucaagcucgccaccggcaugcgcaacguccccgagaagcagacccgcggcaucuucggcgccaucgccggcuucaucgagaacggcugggagggcauggucgacggcugguacggcuuccgccaccagaacuccgagggcaccggccaggccgccgaccucaaguccacccaggccgccaucaaccagaucaacggcaagcucaaccgccucaucgagaagaccaacgagaaguuccaccagaucgagaaggaguucuccgaggucgagggccgcauccaggaccucgagaaguacgucgaggacaccaagaucgaccucugguccuacaacgccgagcuccucgucgcccucgagaaccagcacaccaucgaccucaccgacuccgagaugaacaagcucuucgagcgcacccgcaagcagcuccgcgagaacgccgaggacaugggcaacggcugcuucaagaucuaccacaagugcgacaacgccugcaucggcuccauccgcaacggcaccuacgaccacgacgucuaccgcgacgaggcccucaacaaccgcuuccagaucaagggcgucgagcucaaguccggcuacaaggacuggauccucuggaucuccuucgccaucuccugcuuccuccucugcgucguccuccucggcuucaucaugugggccugccagaagggcaacauccgcugcaacaucugcaucuga

SEQ ID NO: 96328 - RNA, 1701 nt, Artificial Sequence
  derived and/or modified CDS sequence (opt2) from hemagglutinin__InfluenzaA__AAZ83323
augaagaccaucaucgcccucuccuacauccucugccucgucuucgcccagaagcuccccggcaacgacaacuccaccgccacccucugccucggccaccacgccguccccaacggcacccucgucaagaccaucaccaacgaccagaucgaggucaccaacgccaccgagcucguccaguccuccuccaccggccgcaucugcgacuccccccaccgcauccucgacggcgagaacugcacccucaucgacgcccuccucggcgacccccacugcgacggcuuccagaacaaggagugggaccucuucgucgagcgcuccaaggccuacuccaacugcuaccccuacgacguccaggacuacgccucccuccgcucccucgucgccuccuccggcacccucgaguucaacaacgaguccuucaacuggaccggcgucgcccagaacggcaccuccuacgccugcaagcgccgcuccaucaaguccuucuucucccgccucaacuggcuccaccagcucaaguacaaguaccccgcccucaacgucaccaugcccaacaacgacaaguucgacaagcucuacaucuggggcguccaccaccccuccaccgacuccgaccagaccucccucuacgcccaggccuccggccgcgucaccgucuccaccaagcgcucccagcagaccgucaucuccaacaucggcucccgccccuggguccgcggcgucuccucccgcaucuccaucuacuggaccaucgucaagcccggcgacauccuccucaucaccuccaccggcaaccucaucgccccccgcggcuacuucaagauccgcuccggcaaguccuccaucaugcgcuccgacgcccccaucggcaagugcaacuccgagugcaucacccccaacggcuccauccccaacgacaagcccuuccagaacgucaaccgcaucaccuacggcgccugcccccgcuacgucaagcagaacacccucaagcucgccaccggcaugcgcaacguccccgagaagcagacccgcggcaucuucggcgccaucgccggcuucaucgagaacggcugggagggcauggucgacggcugguacggcuuccgccaccagaacuccgagggcaccggccaggccgccgaccucaaguccacccaggccgccaucaaccagaucaacggcaagcucaaccgccucaucgagaagaccaacgagaaguuccaccagaucgagaaggaguucuccgaggucgagggccgcauccaggaccucgagaaguacgucgaggacaccaagaucgaccucugguccuacaacgccgagcuccucgucgcccucgagaaccagcacaccaucgaccucaccgacuccgagaugaacaagcucuucgagcgcacccgcaagcagcuccgcgagaacgccgaggacaugggcaacggcugcuucaagaucuaccacaagugcgacaacgccugcaucggcuccauccgcaacggcaccuacgaccacgacgucuaccgcgacgaggcccucaacaaccgcuuccagaucaagggcgucgagcucaaguccggcuacaaggacuggauccucuggaucuccuucgccaucuccugcuuccuccucugcgucguccuccucggcuucaucaugugggccugccagaagggcaacauccgcugcaacaucugcaucuga

SEQ ID NO: 96329 - RNA, 1701 nt, Artificial Sequence; identical to SEQ ID NO: 96318
  derived and/or modified CDS sequence (opt2) from hemagglutinin__InfluenzaA__AAZ83371

SEQ ID NO: 96330 - RNA, 1701 nt, Artificial Sequence; identical to SEQ ID NO: 96291
  derived and/or modified CDS sequence (opt2) from hemagglutinin__InfluenzaA__AAZ83688

SEQ ID NO: 96331 - RNA, 1698 nt, Artificial Sequence
  derived and/or modified CDS sequence (opt2) from hemagglutinin__InfluenzaA__ABA06510
augaaggucaagcuccucauccuccucugcaccuucaccgccaccuacgccgacaccaucugcaucggcuaccacgccaacaacuccaccgacaccgucgacaccguccucgagaagaacgucaccgucacccacuccgucaaccuccucgaggacucccacaacggcaagcucugccuccucaagggcaucgccccccuccagcucggcaacugcuccgucgccggcuggauccucggcaaccccgagugcgagcuccucaucgccaaggaguccugguccuacaucgucgagacccccaaccccgagaacggcgccugcuaccccggcuacuucgccgacuacgaggagcuccgcgagcagcucuccuccgucuccuccuucgagcgcuucgagaucuuccccaaggaguccuccuggcccaaccacaccgucaccggcgucuccgccuccugcucccacaacggcaaguccuccuucuaccgcaaccuccucuggcucaccggcaagaacggccucuaccccaaccucuccaaguccuacgccaacaacaaggagaaggagguccucauccucuggggcguccaccacccccccaacaucggcgaccagcgcacccucuaccacaccgagaacgccuacgucuccgucgucuccucccacuacucccgccgcuucacccccgagaucaccaagcgccccaagguccgcgaccaggagggccgcaucaacuacuacuggacccuccucgagcccggcgacaccaucaucuucgaggccaacggcaaccucaucgcccccugguacgccuucgcccucucccgcggcuucggcuccggcaucaucaccuccaacgcccccauggacgagugcgacgccaagugccagaccccccagggcgccaucaacuccucccuccccuuccagaacguccaccccgucaccaucggcgagugccccaaguacguccgcuccgccaagcuccgcauggucaccggccuccgcaacauccccuccauccagucccgcggccucuucggcgccaucgccggcuucaucgagggcggcuggaccggcauggucgacggcugguacggcuaccaccaccagaacgagcagggcuccggcuacgccgccgaccagaaguccacccagaacgccaucaacggcaucaccaacaaggucaacuccgucaucgagaagaugaacacccaguucaccgccgucggcaaggaguucaacaagcucgagcgccgcauggagaaccucaacaagaaggucgacgacggcuuccucgacaucuggaccuacaacgccgagcuccucguccuccucgagaacgagcgcacccucgacuuccacgacuccaacgucaagaaccucuacgagaaggucaagucccagcucaagaacaacgccaaggagaucggcaacggcugcuucgaguucuaccacaagugcaacaacgagugcauggaguccgucaagaacggcaccuacgacuaccccaaguacuccgaggaguccaagcucaaccgcgagaagaucgacggcgucaagcucgacuccaugggcgucuaccagauccucgccaucuacuccaccgucgccuccucccucguccuccucgucucccucggcgccaucuccuucuggaugugcuccaacggcucccuccagugccgcaucugcaucuga

SEQ ID NO: 96332 - RNA, 1698 nt, Artificial Sequence
  derived and/or modified CDS sequence (opt2) from hemagglutinin__InfluenzaA__ABA08464
augaaggccaagcuccucguccuccucugcaccuucaccgccaccuacgccgacaccaucugcaucggcuaccacgccaacaacuccaccgacaccgucgacaccguccucgagaagaacgucaccgucacccacuccgucaaccuccucgaggacucccacaacggcaagcucugccuccucaagggcaucgccccccuccagcucggcaacugcuccgucgccggcuggauccucggcaaccccgagugcgagcuccucaucuccaaggaguccugguccuacaucgucgagacccccaaccccgagaacggcaccugcuaccccggcuacuucgccgacuacgaggagcuccgcgagcagcucuccuccgucuccuccuucgagcgcuucgagaucuuccccaagggcuccuccuggcccaaccacaccgucaccggcgucuccgccuccugcucccacaacggcaaguccuccuucuaccgcaaccuccucuggcucaccggcaagaacggccucuaccccaaccucuccauguccuacgucaacaacaaggagaaggagguccucguccucuggggcguccaccacccccccaacaucggcgaccagcgcgcccucuaccacaccgagaacgccuacgucuccgucgucuccucccacuacucccgccgcuucacccccgagaucgccaagcgccccaagguccgcgaccaggagggccgcaucaacuacuacuggacccuccucgagcccggcgacaccaucaucuucgaggccaacggcaaccucaucgcccccugguacgccuucgcccucucccgcggcuucggcuccggcaucaucaccuccaacgcccccauggacgagugcgacgccaagugccagaccccccagggcgccaucaacuccucccuccccuuccagaacguccaccccgucaccaucggcgagugccccaaguacguccgcuccgccaagcuccgcauggucaccggccuccgcaacauccccuccauccagucccgcggccucuucggcgccaucgccggcuucaucgagggcggcuggaccggcauggucgacggcugguacggcuaccaccaccagaacgagcagggcuccggcuacgccgccgaccagaaguccacccagaacgccaucaacggcaucaccaacaaggucaacuccgucaucgagaagaugaacacccaguucaccgccgucggcaaggaguucaacaagcucgagcgccgcauggagaaccucaacaagaaggucgacgacggcuuccucgacaucuggaccuacaacgccgagcuccucguccuccucgagaacgagcgcacccucgacuuccacgacuccaacgucaagaaccucuacgagaaggucaagucccagcucaagaacaacgccaaggagaucggcaacggcugcuucgaguucuaccacaagugcaacaacgagugcauggaguccgucaagaacggcaccuacgacuaccccaaguacuccgaggaguccaagcucaaccgcgagaagaucgacggcgucaagcucgaguccaugggcgucuaccagauccucgccaucuacuccaccgucgccuccucccucguccuccucgucucccucggcgccaucuccuucuggaugugcuccaacggcucccuccagugccgcaucugcaucuga

SEQ ID NO: 96333 - RNA, 1698 nt, Artificial Sequence; identical to SEQ ID NO: 96332
  derived and/or modified CDS sequence (opt2) from hemagglutinin__InfluenzaA__ABA08486

SEQ ID NO: 96334 - RNA, 1698 nt, Artificial Sequence
  derived and/or modified CDS sequence (opt2) from hemagglutinin__InfluenzaA__ABA08508
augaaggucaagcuccucauccuccucugcaccuucaccgccaccuacgccgacaccaucugcaucggcuaccacgccaacaacuccaccgacaccgucgacaccguccucgagaagaacgucaccgucacccacuccgucaaccuccucgaggacucccacaacggcaagcucugccuccucaagggcaucgccccccuccagcucggcaacugcuccgucgccggcuggauccucggcaaccccgagugcgagcuccucaucuccaaggaguccugguccuacaucgucgagacccccaaccccgagaacggcgccugcuaccccggcuacuucgccgacuacgaggagcuccgcgagcagcucuccuccgucuccuccuucgagcgcuucgagaucuuccccaaggaguccuccuggcccaaccacaccgucaccggcgucuccgccuccugcucccacaacggcaaguccuccuucuaccgcaaccuccucuggcucaccggcaagaacggccucuaccccaaccucuccaaguccuacgccaacaacaagaagaaggagguccucauccucuggggcguccaccacccccccaacaucggcguccagcgcacccucuacuacaccgagaacgccuacgucuccgucgucuccucccacuacucccgccgcuucacccccgagaucaccaagcgccccaagguccgcgaccaggagggccgcaucaacuacuacuggacccuccucgagcccggcgacaccaucaucuucgaggccaacggcaaccucaucgcccccugguacgccuucgcccucucccgcggcuucggcuccggcaucaucaccuccaacgcccccauggacgagugcgacgccaagugccagaccccccagggcgccaucaacuccucccuccccuuccagaacguccaccccgucaccaucggcgagugccccaaguacguccgcuccgccaagcuccgcauggucaccggccuccgcaacauccccuccauccagucccgcggccucuucggcgccaucgccggcuucaucgagggcggcuggaccggcauggucgacggcugguacggcuaccaccaccagaacgagcagggcuccggcuacgccgccgaccagaaguccacccagaacgccaucaacggcaucaccaacaaggucaacuccgucaucgagaagaugaacacccaguucaccgccgucggcaaggaguucaacaagcucgagcgccgcauggagaaccucaacaagaaggucgacgacggcuuccucgacaucuggaccuacaacgccgagcuccucguccuccucgagaacgagcgcacccucgacuuccacgacuccaacgucaagaaccucuacgagaaggucaagucccagcucaagaacaacgccaaggagaucggcaacggcugcuucgaguucuaccacaagugcaacaacgagugcauggaguccgucaagaacggcaccuacgacuaccccaaguacuccgaggaguccaagcucaaccgcgagaagaucgacggcgucaagcucgacuccaugggcgucuaccagauccucgccaucuacuccaccgucgccuccucccucguccuccucgucucccucggcgccaucuccuucuggaugugcuccaacggcucccuccagugccgcaucugcaucuga

SEQ ID NO: 96335 - RNA, 1698 nt, Artificial Sequence
  derived and/or modified CDS sequence (opt2) from hemagglutinin__InfluenzaA__ABA12707
augaaggucaagcuccucguccuccucugcaccuucaccgccaccuacgccgacaccaucugcaucggcuaccacgccaacaacuccaccgacaccgucgacaccguccucgagaagaacgucaccgucacccacuccgucaaccuccucgaggacucccacaacggcaagcucugccuccucaagggcaucgccccccuccagcucggcaacugcuccgucgccggcuggauccucggcaaccccgagugcgagcuccucaucuccaaggaguccugguccuacaucgucgagacccccaaccccgagaacggcaccugcuaccccggcuacuucgccgacuacgaggagcuccgcgagcagcucuccuccgucuccuccuucgagcgcuucgagaucuuccccaaggaguccuccuggcccaaccacaccgucaccggcgucuccgccuccugcucccacaacggcaaguccuccuucuaccgcaaccuccucuggcucaccggcaagaacggccucuaccccaaccucuccaaguccuacgccaacaacaaggagaaggagguccucguccucuggggcguccaccacccccccaacaucggcgaccagcgcgcccucuaccacaccgagaacgccuacgucuccgucgucuccucccacuacucccgccgcuucacccccgagaucgccaagcgccccaagguccgcgaccaggagggccgcaucaacuacuacuggacccuccucgagcccggcgacaccaucaucuucgaggccaacggcaaccucaucgccccccgcuacgccuucgcccucucccgcggcuucggcuccggcaucaucaccuccaacgcccccauggacgagugcgacgccaagugccagaccccccagggcgccaucaacuccucccuccccuuccagaacguccaccccgucaccaucggcgagugccccaaguacguccgcuccgccaagcuccgcauggucaccggccuccgcaacauccccuccauccagucccgcggccucuucggcgccaucgccggcuucaucgagggcggcuggaccggcauggucgacggcugguacggcuaccaccaccagaacgagcagggcuccggcuacgccgccgaccagaaguccacccagaacgccaucaacggcaucaccaacaaggucaacuccgucaucgagaagaugaacacccaguucaccgccgucggcaaggaguucaacaagcucgagcgccgcauggagaaccucaacaagaaggucgacgacggcuuccucgacaucuggaccuacaacgccgagcuccucguccuccucgagaacgagcgcacccucgacuuccacgacuccaacgucaagaaccucuacgagaaggucaagucccagcucaagaacaacgccaaggagaucggcaacggcugcuucgaguucuaccacaagugcaacgacgagugcauggaguccgucaagaacggcaccuacgacuaccccaaguacuccgaggaguccaagcucaaccgcgagaagaucgacggcgucaagcucgaguccaugggcgucuaccagauccucgccaucuacuccaccgucgccuccucccucguccuccucgucucccucggcgccaucuccuucuggaugugcuccaacggcucccuccagugccgcaucugcaucuga

SEQ ID NO: 96336 - RNA, 1698 nt, Artificial Sequence
  derived and/or modified CDS sequence (opt2) from hemagglutinin__InfluenzaA__ABA12715
augaaggccaagcuccucguccuccucugcaccuucaccgccaccuacgccgacaccaucugcaucggcuaccacgccaacaacuccaccgacaccgucgacaccguccucgagaagaacgucaccgucacccacuccgucaaccuccucgaggacucccacaacggcaagcucugccuccucaagggcaucgccccccuccagcucggcaacugcuccgucgccggcuggauccucggcaaccccgagugcgagcuccucaucuccaaggaguccugguccuacaucgucgagacccccaaccccgagaacggcaccugcuaccccggcuacuucgccgacuacgaggagcuccgcgagcagcucuccuccgucuccuccuucgagcgcuucgagaucuuccccaagggcuccuccuggcccaaccacaccgucaccggcgucuccgccuccugcucccacaacggcaaguccuccuucuaccgcaaccuccucuggcucaccggcaagaacggccucuaccccaaccucuccauguccuacgucaacaacaaggagaaggagguccucguccucuggggcguccaccacccccccaacaucggcgaccagcgcgcccucuaccacaccgagaacgccuacgucuccgucgucuccucccacuacucccgccgcuucacccccgagaucgccaagcgccccaagguccgcgaccaggagggccgcaucaacuacuacuggacccuccucgagcccggcgacaccaucaucuucgaggccaacggcaaccucaucgcccccugguacgccuucgcccucucccgcggcuucggcuccggcaucaucaccuccaacgcccccauggacgagugcgacgccaagugccagaccccccagggcgccaucaacuccucccuccccuuccagaacguccaccccgucaccaucggcgagugccccaaguacguccgcuccaccaagcuccgcauggucaccggccuccgcaacauccccuccauccagucccgcggccucuucggcgccaucgccggcuucaucgagggcggcuggaccggcauggucgacggcugguacggcuaccaccaccagaacgagcagggcuccggcuacgccgccgaccagaaguccacccagaacgccaucaacggcaucaccaacaaggucaacuccgucaucgagaagaugaacacccaguucaccgccgucggcaaggaguucaacaagcucgagcgccgcauggagaaccucaacaagaaggucgacgacggcuuccucgacaucuggaccuacaacgccgagcuccucguccuccucgagaacgagcgcacccucgacuuccacgacuccaacgucaagaaccucuacgagaaggucaagucccagcucaagaacaacgccaaggagaucggcaacggcugcuucgaguucuaccacaagugcgacaacgagugcauggaguccgucaagaacggcaccuacgacuaccccaaguacuccgaggaguccaagcucaaccgcgagaagaucgacggcgucaagcucgaguccaugggcgucuaccagauccucgccaucuacuccaccgucgccuccucccucgucuuccucgucucccucggcgccaucuccuucuggaugugcuccaacggcucccuccagugccgcaucugcaucuga

SEQ ID NO: 96337 - RNA, 1698 nt, Artificial Sequence
  derived and/or modified CDS sequence (opt2) from hemagglutinin__InfluenzaA__ABA12729
augaaggucaagcuccucguccuccucugcaccuucaccgccaccuacgccgacaccaucugcaucggcuaccacgccaacaacuccaccgacaccgucgacaccguccucgagaagaacgucaccgucacccacuccgucaaccuccucgaggacucccacaacggcaagcucugccuccucaagggcaucgccccccuccagcucggcaacugcuccgucgccggcuggauccucggcaaccccgagugcgagcuccucaucuccaaggaguccugguccuacaucgucgagacccccaaccccgagaacggcaccugcuaccccggcuacuucgccgacuacgaggagcuccgcgagcagcucuccuccgucuccuccuucgagcgcuucgagaucuuccccaaggaguccuccuggcccaaccacaccgucaccggcgucuccgccuccugcucccacaacggcaaguccuccuucuaccgcaaccuccucuggcucaccggcaagaacggccucuaccccaaccucuccaaguccuacgccaacaacaaggagaaggagguccucguccucuggggcguccaccacccccccaacaucggcgaccagcgcgcccucuaccacaccgagaacgccuacaucuccgucgucuccucccacuacucccgccgcuucacccccgagaucgccaagcgccccaagguccgcgaccaggagggccgcaucaacuacuacuggacccuccucgagcccggcgacaccaucaucuucgaggccaacggcaaccucaucgccccccgcuacgccuucgcccucucccgcggcuucggcuccggcaucaucaccuccaacgcccccauggacgagugcgacgccaagugccagaccccccagggcgccaucaacuccucccuccccuuccagaacguccaccccgucaccaucggcgagugccccaaguacguccgcuccgccaagcuccgcauggucaccggccuccgcaacauccccuccauccagucccgcggccucuucggcgccaucgccggcuucaucgagggcggcuggaccggcauggucgacggcugguacggcuaccaccaccagaacgagcagggcuccggcuacgccgccgaccagaaguccacccagaacgccaucaacggcaucaccaacaaggucaacuccgucaucgagaagaugaacacccaguucaccgccgucggcaaggaguucaacaagcucgagcgccgcauggagaaccucaacaagaaggucgacgacggcuuccucgacaucuggaccuacaacgccgagcuccucguccuccucgagaacgagcgcacccucgacuuccacgacuccaacgucaagaaccucuacgagaaggucaagucccagcucaagaacaacgccaaggagaucggcaacggcugcuucgaguucuaccacaagugcaacgacgagugcauggaguccgucaagaacggcaccuacgacuacccccgcuacuccgaggaguccaagcucaaccgcgagaagaucgacggcgucaagcucgaguccaugggcgucuaccagauccucgccaucuacuccaccgucgccuccucccucguccuccucgucucccucggcgccaucuccuucuggaugugcuccaacggcucccuccagugccgcaucugcaucuga

SEQ ID NO: 96338 - RNA, 1701 nt, Artificial Sequence; identical to SEQ ID NO: 96322
  derived and/or modified CDS sequence (opt2) from hemagglutinin__InfluenzaA__ABA12740

SEQ ID NO: 96339 - RNA, 1701 nt, Artificial Sequence; identical to SEQ ID NO: 96291
  derived and/or modified CDS sequence (opt2) from hemagglutinin__InfluenzaA__ABA12751

SEQ ID NO: 96340 - RNA, 1701 nt, Artificial Sequence
  derived and/or modified CDS sequence (opt2) from hemagglutinin__InfluenzaA__ABA12762
augaagaccaucaucgcccucuccuacauccucugccucgucuucgcccagaaguuccccggcaacgacaacuccaccgccacccucugccucggccaccacgccguccccaacggcaccaucgucaagaccaucaccaacgaccagaucgaggucaccaacgccaccgagcucguccaguccuccuccaccggcggcaucugcgacuccccccaccagauccucgacggcgagaacugcacccucaucgacgcccuccucggcgacccccagugcgacggcuuccagaacaagaagugggaccucuucgucgagcgcuccaaggccuacuccaacugcuaccccuacgacguccccgacuacgccucccuccgcucccucgucgccuccuccggcacccucgaguucaacaacgaguccuucaacuggaccggcgucacccagaacggcaccuccuccgccugcaagcgccgcuccaacaacuccuucuucucccgccucaacuggcucacccaccucaaguucaaguaccccgcccucaacgucaccaugcccaacaacgagaaguucgacaagcucuacaucuggggcguccaccaccccggcaccgacaacgaccagaucucccucuacgcccaggccuccggccgcaucaccgucuccaccaagcgcucccagcagaccgucauccccaacaucggcucccgcccccgcguccgcgacauccccucccgcaucuccaucuacuggaccaucgucaagcccggcgacauccuccucaucaacuccaccggcaaccucaucgccccccgcggcuacuucaagauccgcuccggcaaguccuccaucaugcgcuccgacgcccccaucggcaagugcaacuccgagugcaucacccccaacggcuccauccccaacgacaagcccuuccagaacgucaaccgcaucaccuacggcgccugcccccgcuacgucaagcagaacacccucaagcucgccaccggcaugcgcaacguccccgagaagcagacccgcggcaucuucggcgccaucgccggcuucaucgagaacggcugggagggcauggucgacggcugguacggcuuccgccaccagaacuccgagggcaucggccaggccgccgaccucaaguccacccaggccgccaucaaccagaucaacggcaagcucaaccgccucaucggcaagaccaacgagaaguuccaccagaucgagaaggaguucuccgaggucgagggccgcauccaggaccucgagaaguacgucgaggacaccaagaucgaccucugguccuacaacgccgagcuccucgucgcccucgagaaccagcacaccaucgaccucaccgacuccgagaugaacaagcucuucgagcgcaccaagaagcagcuccgcgagaacgccgaggacaugggcaacggcugcuucaagaucuaccacaagugcgacaacgccugcaucggcuccauccgcaacggcaccuacgaccacgacgucuaccgcgacgaggcccucaacaaccgcuuccagaucaagggcgucgagcucaaguccggcuacaaggacuggauccucuggaucuccuucgccaucuccugcuuccuccucugcgucguccuccucggcuucaucaugugggccugccagaagggcaacauccgcugcaacaucugcaucuga

SEQ ID NO: 96341 - RNA, 1701 nt, Artificial Sequence
  derived and/or modified CDS sequence (opt2) from hemagglutinin__InfluenzaA__ABA12773
augaagaccaucaucgcccucuccuacaucuucugccucguccucggccaggacuuccccggcaacgacaacuccaccgccacccucugccucggccaccacgccguccccaacggcacccucgucaagaccaucaccaacgaccagaucgaggucaccaacgccaccgagcucguccaguccuccuccaccggcaagaucugcaacaacccccaccgcauccucgacggcaucgacugcacccucaucgacgcccuccucggcgacccccacugcgacggcuuccagaacgagaccugggaccucuucgucgagcgcuccaaggccuucuccaacugcuaccccuacgacguccccgacuacgccucccuccgcucccucgucgccuccuccggcacccucgaguucaucaacgagggcuucaccuggaccggcgucacccagaacggcggcuccaacgccugcaagcgcggccccgacuccggcuucuucucccgccucaacuggcucuacaaguccggcuccaccuaccccguccucaacgucaccaugcccaacaacgacaacuucgacaagcucuacaucuggggcguccaccaccccuccaccgaccaggagcagaccucccucuacguccaggccuccggccgcgucaccgucuccaccaagcgcucccagcagaccaucauccccaacaucggcucccgccccuggguccgcggccucuccucccgcaucuccaucuacuggaccaucgucaagcccggcgacauccucgucaucaacuccaacggcaaccucaucgccccccgcggcuacuucaagaugcgcaccggcaaguccuccaucaugcgcuccgacgcccccaucggcaccugcaucuccgagugcaucacccccaacggcuccauccccaacgacaagcccuuccagaacgucaacaagaucaccuacggcgccugccccaaguacgucaagcagaacacccucaagcucgccaccggcaugcgcaacguccccgagaagcagacccgcggccucuucggcgccaucgccggcuucaucgagaacggcugggagggcaugaucgacggcugguacggcuuccgccaccagaacuccgagggcaccggccaggccgccgaccucaaguccacccaggccgccaucgaccagaucaacggcaagcucaaccgcgucaucgagaagaccaacgagaaguuccaccagaucgagaaggaguucuccgaggucgagggccgcauccaggaccucgagaaguacgucgaggacaccaagaucgaccucugguccuacaacgccgagcuccucgucgcccucgagaaccagcacaccaucgaccucaccgacuccgagaugaacaagcucuucgagaagacccgccgccagcuccgcgagaacgccgaggacaugggcaacggcugcuucaagaucuaccacaagugcgacaacgccugcaucggcuccauccgcaacggcaccuacgaccacgacgucuaccgcgacgaggcccucaacaaccgcuuccagaucaagggcgucgagcucaaguccggcuacaaggacuggauccucuggaucuccuucgccaucuccugcuuccuccucugcgucguccuccucggcuucaucaugugggccugccagaagggcaacauccgcugcaacaucugcaucuga

SEQ ID NO: 96342 - RNA, 1701 nt, Artificial Sequence
  derived and/or modified CDS sequence (opt2) from hemagglutinin__InfluenzaA__ABA12780
augaagaccaucaucgcccucuccuacauccucugccucgucuucgcccagaagcuccccggcaacgacaacuccaccgccacccucugccucggccaccacgccguccccaacggcaccaucgucaagaccaucaccaacgaccagaucgaggucaccaacgccaccgagcucguccaguccuccuccaccggcggcaucugcgacuccccccaccagauccucgacggcgagaacugcacccucaucgacgcccuccucggcgacccccagugcgacggcuuccagaacaagaagugggaccucuucgucgagcgcuccaaggccuacuccaacugcuaccccuacgacguccccgacuacgccucccuccgcucccucgucgccuccuccggcacccucgaguucaacaacgaguccuucaacuggaccggcgucacccagaacggcaccuccuccgccugcaagcgccgcuccaacaacuccuucuucucccgccucaacuggcucacccaccucaaguucaaguaccccgcccucaacgucaccaugcccaacaacgagaaguucgacaagcucuacaucuggggcguccaccaccccggcaccaacaacgaccagaucucccucuacgcccaggccuccggccgcaucaccgucuccaccaagcgcucccagcagaccgucauccccaacaucgagucccgcccccgcguccgcgacauccccucccgcaucuccaucuacuggaccaucgucaagcccggcgacauccuccucaucaacuccaccggcaaccucaucgccccccgcggcuacuucaagauccgcuccggcaaguccuccaucaugcgcuccgacgcccccaucggcaagugcaacuccgagugcaucacccccaacggcuccauccccaacgacaagcccuuccagaacgucaaccgcaucaccuacggcgccugcccccgcuacgucaagcagaacacccucaagcucgccaccggcaugcgcaacguccccgagaagcagacccgcggcaucuucggcgccaucgccggcuucaucgagaacggcugggagggcauggucgacggcugguacggcuuccgccaccagaacuccgagggcaucggccaggccgccgaccucaaguccacccaggccgccaucaaccagaucaacggcaagcucaaccgccucaucggcaagaccaacgagaaguuccaccagaucgagaaggaguucuccgaggucgagggccgcauccaggaccucgagaaguacgucgaggacaccaagaucgaccucugguccuacaacgccgagcuccucgucgcccucgagaaccagcacaccaucgaccucaccgacuccgagaugaacaagcucuucgagcgcaccaagaagcagcuccgcgagaacgccgaggacaugggcaacggcugcuucaagaucuaccacaagugcgacaacgccugcaucggcuccauccgcaacggcaccuacgaccacgacgucuaccgcgacgaggcccucaacaaccgcuuccagaucaagggcgucgagcucaaguccggcuacaaggacuggauccucuggaucuccuucgccaucuccugcuuccuccucugcgucgcccuccucggcuucaucaugugggccugccagaagggcaacauccgcugcaacaucugcaucuga

SEQ ID NO: 96343 - RNA, 1701 nt, Artificial Sequence
  derived and/or modified CDS sequence (opt2) from hemagglutinin__InfluenzaA__ABA16214
augaagaccaucaucgcccucuccuacaucuccugccucgucuucgcccagaagcuccccggcaacgacaacuccaccgccacccucugccucggccaccacgccguccccaacggcacccucgucaagaccaucaccaacgaccagaucgaggucaccaacgccaccgagcucguccaguccuccuccaccggccgcaucugcgacuccccccaccgcauccucgacggcaagaacugcacccucaucgacgcccuccucggcgacccccacugcgacggcuuccagaacgagaagugggaccucuucgucgagcgcuccaaggccuucuccaacugcuaccccuacgacguccccgacuacgccucccuccgcucccucgucgccuccuccggcacccucgaguucaucaacgagggcuucaacuggaccggcgucacccaguccggcggcuccuacgccugcaagcgcggcuccgucaaguccuucuucucccgccucaacuggcucuacgaguccgaguccaaguaccccgcccucaacgucaccaugcccaacaacggcaaguucgacaagcucuacaucuggggcguccaccaccccuccaccgacaaggagcagaccaaccucuacguccgcgccuccggccgcgucaccgucuccaccaagcgcucccagcagaccgucauccccaacaucggcccccgccccuggguccgcggccucuccucccgcaucuccaucuacuggaccaucgucaagcccggcgacauccuccucaucaacuccaccggcaaccucaucgccccccgcggcuacuucaagauccgcaccggcaaguccuccaucaugcgcuccgacgcccccaucggcaccugcuccuccggcugcaucacccccaacggcuccauccccaacgacaagcccuuccagaacgucaacaagaucaccuacggcgccugcccccgcuacgucaagcagaacacccucaagcucgccaccggcaugcgcaacguccccgagaagcagacccgcggcaucuucggcgccaucgccggcuucaucgagaacggcugggagggcauggucgacggcugguacggcuuccgccaccagaacuccgagggcaccggccaggccgccgaccucaaguccacccaggccgccaucgaccagaucaacggcaagcucaaccgccucaucgagaagaccaacgagaaguuccaccagaucgagaaggaguucuccgaggucgagggccgcauccaggaccucgagaaguacgucgaggacaccaagaucgaccucugguccuacaacgccgagcuccucgucgcccucgagaaccagcacaccaucgacaugaccgacuccgagaugaacaagcucuucgagaagacccgcaagcagcuccgcgagaacgccgaggacaugggcaacggcugcuucaagaucuaccacaagugcgacaacgccugcaucggcuccauccgcaacggcaccuacgaccacgacgucuaccgcgacgaggcccucaacaaccgcuuccagaucaagggcgucgagcucaaguccggcuacaaggacuggauccucuggaucuccuucgccaucuccugcuuccuccucugcgucguccuccucggcuucaucaugugggccugccagaagggcaacauccgcugcaacaucugcaucuga

SEQ ID NO: 96344 - RNA, 1701 nt, Artificial Sequence; identical to SEQ ID NO: 96292
  derived and/or modified CDS sequence (opt2) from hemagglutinin__InfluenzaA__ABA18026

SEQ ID NO: 96345 - RNA, 1698 nt, Artificial Sequence
  derived and/or modified CDS sequence (opt2) from hemagglutinin__InfluenzaA__ABA18037
augaaggccaagcuccucguccuccucugcaccuucaccgccaccuacgccgacaccaucugcaucggcuaccacgccaacaacuccaccgacaccgucgacaccguccucgagaagaacgucaccgucacccacuccgucaaccuccucgaggacucccacaacggcaagcucugccuccucaagggcaucgccccccuccagcucggcaacugcuccgucgccggcuggauccucggcaaccccgagugcgagcuccucaucuccaaggaguccugguccuacaucgucgagacccccaaccccgagaacggcaccugcuaccccggcuacuucgccgacuacgaggagcucaaggagcagcucuccuccgucuccuccuucgagcgcuucgagaucuuccccaagggcuccuccuggcccaaccacaccgucaccggcgucuccgccuccugcucccacaacggcaaguccuccuucuaccgcaaccuccucuggcucaccggcaagaacggccucuaccccaaccucuccauguccuacgucaacaacaaggagaaggagguccucguccucuggggcguccaccacccccccaacaucggcgaccagcgcgcccucuaccacaccgagaacgccuacgucuccgucgucuccucccacuacucccgccgcuucacccccgagaucgccaagcgccccaagguccgcgaccaggagggccgcaucaacuacuacuggacccuccucgagcccggcgacaccaucaucuucgaggccaacggcaaccucaucgcccccugguacgccuucgcccucucccgcggcuucggcuccggcaucaucaccuccaacgcccccauggacgagugcgacgccaagugccagaccccccagggcgccaucaacuccucccuccccuuccagaacguccaccccgucaccaucggcgagugccccaaguacguccgcuccgccaagcuccgcauggucaccggccuccgcaacauccccuccauccagucccgcggccucuucggcgccaucgccggcuucaucgagggcggcuggaccggcauggucgacggcugguacggcuaccaccaccagaacgagcagggcuccggcuacgccgccgaccagaaguccacccagaacgccaucaacggcaucaccaacaaggucaacuccgucaucgagaagaugaacacccaguucaccgccgucggcaaggaguucaacaagcucgagcgccgcauggagaaccucaacaagaaggucgacgacggcuuccucgacaucuggaccuacaacgccgagcuccucguccuccucgagaacgagcgcacccucgacuuccacgacuccaacgucaagaaccucuacgagaaggucaagucccagcucaagaacaacgccaaggagaucggcaacggcugcuucgaguucuaccacaagugcaacaacgagugcauggaguccgucaagaacggcaccuacgacuaccccaaguacuccgaggaguccaagcucaaccgcgagaagaucgacggcgucaagcucgaguccaugggcgucuaccagauccucgccaucuacuccaccgucgccuccucccucguccuccucgucucccucggcgccaucuccuucuggaugugcuccaacggcucccuccagugccgcaucugcaucuga

SEQ ID NO: 96346 - RNA, 1701 nt, Artificial Sequence; identical to SEQ ID NO: 96291
  derived and/or modified CDS sequence (opt2) from hemagglutinin__InfluenzaA__ABA18048

SEQ ID NO: 96347 - RNA, 1701 nt, Artificial Sequence
  derived and/or modified CDS sequence (opt2) from hemagglutinin__InfluenzaA__ABA18123
augaagaccaucaucgcccucuccuacauccucugccucgucuucgcccagaagcuccccggcaacgacaacuccaccgccacccucugccucggccaccacgccguccccaacggcacccucgucaagaccaucaccaacgaccagaucgaggucaccaacgccaccgagcucguccaguccuccuccaccggccgcaucugcgacuccccccaccagauccucgacggcgagaacugcacccucaucgacgcccuccucggcgacccccacugcgacggcuuccagaacaaggagugggaccucuucgucgagcgcuccaaggccuacuccaacugcuaccccuacgacguccccgacuacgucucccuccgcucccucgucgccuccuccggcacccucgaguucaacaacgaguccuucaacuggaccggcgucgcccagaacggcaccuccuccgccugcaagcgccgcuccaacaaguccuucuucucccgccucaacuggcuccaccagcucaaguacaaguaccccgcccucaacgucaccaugcccaacaacgagaaguucgacaagcucuacaucuggggcguccaccaccccggcaccgacuccgaccagaucucccucuacgcccaggccuccggccgcgucaccgucuccaccaagcgcucccagcagaccgucauccccaacaucggcuccggccccuggguccgcggcgucuccucccgcaucuccaucuacuggaccaucgucaagcccggcgacauccuccucaucaacuccaccggcaaccucaucgccccccgcggcuacuucaagauccgcuccggcaaguccuccaucaugcgcuccgacgcccccaucggcaagugcaacuccgagugcaucacccccaacggcuccauccccaacgacaagcccuuccagaacgucaaccgcaucaccuacggcgccugcccccgcuacgucaagcagaacacccucaagcucgccaccggcaugcgcaacguccccgagaagcagacccgcggcaucuucggcgccaucgccggcuucaucgagaacggcugggagggcaugauggacggcugguacggcuuccgccaccagaacuccgagggcaccggccaggccgccgaccucaaguccacccaggccgccaucaaccagaucaacggcaagcucaaccgccucaucgagaagaccaacgagaaguuccaccagaucgagaaggaguucuccgaggucgagggccgcauccaggaccucgagaaguacgucgaggacaccaagaucgaccucugguccuacaacgccgagcuccucgucgcccucgagaaccagcacaccaucgaccucaccgacuccgagaugaacaagcucuucgagcgcaccaagaagcagcuccgcgagaacgccgaggacaugggcaacggcugcuucaagaucuaccacaagugcgacaacgccugcaucggcuccauccgcaacggcaccuacgaccacgacgucuaccgcgacgaggcccucaacaaccgcuuccagaucaagggcgucgagcucaaguccggcuacaaggacuggauccucuggaucuccuucgccaucuccugcuuccuccucugcaucguccuccucggcuucaucaugugggccugccagaagggcaacauccgcugcaacaucugcaucuga

SEQ ID NO: 96348 - RNA, 1701 nt, Artificial Sequence; identical to SEQ ID NO: 96291
  derived and/or modified CDS sequence (opt2) from hemagglutinin__InfluenzaA__ABA18134

SEQ ID NO: 96349 - RNA, 1698 nt, Artificial Sequence; identical to SEQ ID NO: 96335
  derived and/or modified CDS sequence (opt2) from hemagglutinin__InfluenzaA__ABA18145

SEQ ID NO: 96350 - RNA, 1701 nt, Artificial Sequence; identical to SEQ ID NO: 96292
  derived and/or modified CDS sequence (opt2) from hemagglutinin__InfluenzaA__ABA18156

SEQ ID NO: 96351 - RNA, 1701 nt, Artificial Sequence
  derived and/or modified CDS sequence (opt2) from hemagglutinin__InfluenzaA__ABA26700
augaagaccaucaucgcccucuccuacauccucugccucgucuucgcccagaagcuccccggcaacgacaacuccaccgccacccucugccucggccaccacgccguccccaacggcaccaucgucaagaccaucaccaacgaccagaucgaggucaccaacgccaccgagcucguccaguccuccuccaccggcggcaucugcaacuccccccaccagauccucgacggcgagaacugcacccucaucgacgcccuccucggcgacccccagugcgacggcuuccagaacaagaagugggaccucuucgucgagcgcuccaaggccuacuccaacugcuaccccuacgacguccccgacuacgccucccuccgcucccucgucgccuccuccggcacccucgaguucaacaacgaguccuucaacuggaccggcgucacccagaacggcaccuccuccgccugcaagcgccgcuccaacaacuccuucuucucccgccucaacuggcucacccaccucaaguucaaguaccccgcccucaacgucaccaugcccaacaacgagaaguucgacaagcucuacaucuggggcguccaccaccccggcaccgacaacgaccagaucucccucuacgcccaggcccccggccgcaucaccgucuccaccaagcgcucccagcagaccgucauccccaacaucggcucccgcccccgcguccgcgacauccccucccgcaucuccaucuacuggaccaucgucaagcccggcgacauccuccucaucaacuccaccggcaaccucaucgccccccgcggcuacuucaagauccgcuccggcaaguccuccaucaugcgcuccgacgcccccaucggcaagugcaacuccgagugcaucacccccaacggcuccauccccaacgacaagcccuuccagaacgucaaccgcaucaccuacggcgccugcccccgcuacgucaagcagaacacccucaagcucgccaccggcaugcgcaacguccccgagaagcagacccgcggcaucuucggcgccaucgccggcuucaucgagaacggcugggagggcauggucgacggcugguacggcuuccgccaccagaacuccgagggcaucggccaggccgccgaccucaaguccacccaggccgccaucaaccagaucaacggcaagcucaaccgccucaucggcaagaccaacgagaaguuccaccagaucgagaaggaguucuccgaggucgagggccgcauccaggaccucgagaaguacgucgaggacaccaagaucgaccucugguccuacaacgccgagcuccucgucgcccucgagaaccagcacaccaucgaccucaccgacuccgagaugaacaagcucuucgagcgcaccaagaagcagcuccgcgagaacgccgaggacaugggcaacggcugcuucaagaucuaccacaagugcgacaacgccugcaucggcuccauccgcaacggcaccuacgaccacgacgucuaccgcgacgaggcccucaacaaccgcuuccagaucaagggcgucgagcucaaguccggcuacaaggacuggauccucuggaucuccuucgccaucuccugcuuccuccucugcgucgcccuccucggcuucaucaugugggccugccagaagggcaacauccgcugcaacaucugcaucuga

SEQ ID NO: 96352 - RNA, 1701 nt, Artificial Sequence
  derived and/or modified CDS sequence (opt2) from hemagglutinin__InfluenzaA__ABA26711
augaagaccaucaucgcccucuccuacauccucugccucgucuucgcccagaagcuccccggcaacgacaacuccaccgccacccucugccucggccaccacgccguccccaacggcaccaucgucaagaccaucaccaacgaccagaucgaggucaccaacgccaccgagcucguccaguccuccuccaccggcggcaucugcgacuccccccaccagauccucgacggcgagaacugcacccucaucgacgcccuccucggcgacccccagugcgacggcuuccagaacaagaagugggaccucuucgucgagcgcuccaaggccuacuccaacugcuaccccuacgacguccccgacuacgccucccuccgcucccucgucgccuccuccggcacccucgaguucaacaacgaguccuucaacuggaccggcgucacccagaacggcaccuccuccgccugcaagcgccgcuccaacaacuccuucuucucccgccucaacuggcucacccaccucaaguucaaguaccccgcccucaacgucaccaugcccaacaacgagaaguucgacaagcucuacaucuggggcguccaccaccccggcaccgacaacgaccagaucucccucuacgcccaggccuccggccgcaucaccgucuccaccaagcgcucccagcagaccgucauccccaacaucggcucccgcccccgcguccgcgacauccccucccgcaucuccaucuacuggaccaucgucaagcccggcgacauccuccucaucaacuccaccggcaaccucaucgccccccgcggcuacuucaagauccgcuccggcaaguccuccaucaugcgcuccgacgcccccaucggcaagugcaaguccgagugcaucacccccaacggcuccauccccaacgacaagcccuuccagaacgucaaccgcaucaccuacggcgccugcccccgcuacgucaagcagaacacccucaagcucgccaccggcaugcgcaacguccccgagaagcagacccgcggcaucuucggcgccaucgccggcuucaucgagaacggcugggagggcauggucgacggcugguacggcuuccgccaccagaacuccgagggcaucggccaggccgccgaccucaaguccacccaggccgccaucaaccagaucaacggcaagcucaaccgccucaucggcaagaccaacgagaaguuccaccagaucgagaaggaguucuccgaggucgagggccgcauccaggaccucgagaaguacgucgaggacaccaagaucgaccucugguccuacaacgccgagcuccucgucgcccucgagaaccagcacaccaucgaccucaccgacuccgagaugaacaagcucuucgagcgcaccaagaagcagcuccgcgagaacgccgaggacaugggcaacggcugcuucaagaucuaccacaagugcgacaacgccugcaucggcuccauccgcaacggcaccuacgaccacgacgucuaccgcgacgaggcccucaacaaccgcuuccagaucaagggcgucgagcucaaguccggcuacaaggacuggauccucuggaucuccuucgccaucuccugcuuccuccucugcgucgcccuccucggcuucaucaugugggccugccagaagggcaacauccgcugcaacaucugcaucuga

SEQ ID NO: 96353 - RNA, 1701 nt, Artificial Sequence
  derived and/or modified CDS sequence (opt2) from hemagglutinin__InfluenzaA__ABA26722
augaagaccaucaucgcccucuccuacauccucugccucgucuucgcccagaagcuccccggcaacgacaacuccaccgccacccucugccucggccaccacgccguccccaacggcaccaucgucaagaccaucaccaacgaccagaucgaggucaccaacgccaccgagcucguccaguccucccccaccggcggcaucugcgacuccccccaccagauccucgacggcgagaacugcacccucaucgacgcccuccucggcgacccccagugcgacggcuuccagaacaagaagugggaccucuucgucgagcgcuccaaggcccacuccaacugcuaccccuacgacguccccgacuacgccucccuccgcucccucgucgccuccuccggcacccucgaguucaacaacgaguccuucaacuggaccggcgucacccagaacggcaccuccuccgccugcaagcgccgcuccaacaaguccuucuucucccgccucaacuggcucacccaccucaaguucaaguaccccgcccucaacgucaccaugcccaacaacgagaaguucgacaagcucuacaucuggggcguccaccaccccggcaccgacaacgaccagaucucccucuacgcccaggccuccggccgcaucaccgucuccaccaagcgcucccagcagaccgucauccccaacaucggcucccgcccccgcguccgcgacguccccucccgcaucuccaucuacuggaccaucgucaagcccggcgacauccuccucaucaacuccaccggcaaccucaucgccccccgcggcuacuucaagauccgcuccggcaaguccuccaucaugcgcuccgacgcccccaucggcaagugcaacuccggcugcaucacccccaacggcuccauccccaacgacaagcccuuccagaacgucaaccgcaucaccuacggcgccugcccccgcuacgucaagcagaacacccucaagcucgccaccggcaugcgcaacguccccgagaagcagacccgcggcaucuucggcgccaucgccggcuucaucgagaacggcugggagggcauggucgacggcugguacggcuuccgccaccagaacuccgagggcaccggccaggccgccgaccucaaguccacccaggccgccaucaaccagaucaacggcaagcucaaccgccucaucggcaagaccaacgagaaguuccaccagaucgagaaggaguucuccgaggucgagggccgcauccaggaccucgagaaguacgucgaggacaccaagaucgaccucugguccuacaacgccgagcuccucgucgcccucgagaaccagcacaccaucgaccucaccgacuccgagaugaacaagcucuucgagcgcaccaagaagcagcuccgcgagaacgccgaggacaugggcaacggcugcuucaagaucuaccacaagugcgacaacgccugcaucggcuccauccgcaacggcaccuacgaccacgacgucuaccgcgacgaggcccucaacaaccgcuuccagaucaagggcgucgagcucaaguccggcuacaaggacuggauccucuggaucuccuucgccaucuccugcuuccuccucugcgucgcccuccucggcuucaucaugugggccugccagaagggcaacauccgcugcaacaucugcaucuga

SEQ ID NO: 96354 - RNA, 1701 nt, Artificial Sequence; identical to SEQ ID NO: 96279
  derived and/or modified CDS sequence (opt2) from hemagglutinin__InfluenzaA__ABA26733

SEQ ID NO: 96355 - RNA, 1701 nt, Artificial Sequence; identical to SEQ ID NO: 96279
  derived and/or modified CDS sequence (opt2) from hemagglutinin__InfluenzaA__ABA26755

SEQ ID NO: 96356 - RNA, 1701 nt, Artificial Sequence; identical to SEQ ID NO: 96318
  derived and/or modified CDS sequence (opt2) from hemagglutinin__InfluenzaA__ABA26766

SEQ ID NO: 96357 - RNA, 1701 nt, Artificial Sequence; identical to SEQ ID NO: 96318
  derived and/or modified CDS sequence (opt2) from hemagglutinin__InfluenzaA__ABA26788

SEQ ID NO: 96358 - RNA, 1701 nt, Artificial Sequence; identical to SEQ ID NO: 96318
  derived and/or modified CDS sequence (opt2) from hemagglutinin__InfluenzaA__ABA26799

SEQ ID NO: 96359 - RNA, 1698 nt, Artificial Sequence
  derived and/or modified CDS sequence (opt2) from hemagglutinin__InfluenzaA__ABA42247
augaaggucaagcuccucguccuccucugcaccuucaccgccaccuacgccgacaccaucugcaucggcuaccacgccaacaacuccaccgacaccgucgacaccguccucgagaagaacgucaccgucacccacuccgucaaccuccucgaggacucccacaacggcaagcucugccuccucaagggcaucgccccccuccagcucggcaacugcuccgucgccggcuggauccucggcaaccccgagugcgagcuccucaucuccaaggaguccugguccuacaucgucgagacccccaaccccgagaacggcaccugcuaccccggcuacuucgccgacuacgaggagcuccgcgagcagcucuccuccgucuccuccuucgagcgcuucgagaucuuccccaaggaguccuccuggcccaaccacaccgucaccggcgucuccgccuccugcucccacaacggcaaguccuccuucuacaagaaccuccucuggcucaccggcaagaacggccucuaccccaaccucuccaaguccuacgccaacaacaaggagaaggagguccucguccucuggggcguccaccacccccccaacaucggcgaccagcgcgcccucuaccacaccgagaacgccuacgucuccgucgucuccucccacuacucccgccgcuucacccccgagaucgccaagcgccccaagguccgcgaccaggagggccgcaucaacuacuacuggacccuccucgagcccggcgacaccaucaucuucgaggccaacggcaaccucaucgccccccgcuacgccuucgcccucucccgcggcuucggcuccggcaucaucaccuccaacgcccccauggacgagugcgacgccaagugccagaccccccagggcgccaucaacuccucccuccccuuccagaacguccaccccgucaccaucggcgagugccccaaguacguccgcuccgccaagcuccgcauggucaccggccuccgcaacauccccuccauccagucccgcggccucuucggcgccaucgccggcuucaucgagggcggcuggaccggcauggucgacggcugguacggcuaccaccaccagaacgagcagggcuccggcuacgccgccgaccagaaguccacccagaacgccaucaacggcaucaccaacaaggucaacuccgucaucgagaagaugaacacccaguucaccgccgucggcaaggaguucaacaagcucgagcgccgcauggagaaccucaacaagaaggucgacgacggcuuccucgacaucuggaccuacaacgccgagcuccucguccuccucgagaacgagcgcacccucgacuuccacgacuccaacgucaagaaccucuacgagaaggucaagucccagcucaagaacaacgccaaggagaucggcaacggcugcuucgaguucuaccacaagugcaacgacgagugcauggaguccgucaagaacggcaccuacgacuaccccaaguacuccgaggaguccaagcucaaccgcgagaagaucgacggcgucaagcucgaguccaugggcgucuaccagauccucgccaucuacuccaccgucgccuccucccucguccuccucgucucccucggcgccaucuccuucuggaugugcuccaacggcucccuccagugccgcaucugcaucuga

SEQ ID NO: 96360 - RNA, 1698 nt, Artificial Sequence; identical to SEQ ID NO: 96332
  derived and/or modified CDS sequence (opt2) from hemagglutinin__InfluenzaA__ABA42258

SEQ ID NO: 96361 - RNA, 1701 nt, Artificial Sequence; identical to SEQ ID NO: 96291
  derived and/or modified CDS sequence (opt2) from hemagglutinin__InfluenzaA__ABA42269

SEQ ID NO: 96362 - RNA, 1698 nt, Artificial Sequence
  derived and/or modified CDS sequence (opt2) from hemagglutinin__InfluenzaA__ABA42280
augaaggucaagcuccucauccuccucugcaccuucaccgccaccuacgccgacaccaucugcaucggcuaccacgccaacaacuccaccgacaccgucgacaccguccucgagaagaacgucaccgucacccacuccgucaaccuccucgaggacucccacaacggcaagcucugccuccucaagggcaucgccccccuccagcucggcaacugcuccgucgccggcuggauccucggcaaccccgagugcgagcuccucaucuccaaggaguccugguccuacaucgucgagacccccaaccccgagaacggcgccugcuaccccggcuacuucgccgacuacgaggagcuccgcgagcagcucuccuccgucuccuccuucgagcgcuucgagaucuuccccaaggaguccuccuggcccaaccacaccgucaccggcgucuccgccuccugcucccacaacggcaaguccuccuucuaccgcaaccuccucuggcucaccggcaagaacggccucuaccccaaccucuccaaguccuacgccaacaacaaggagaaggagguccucauccucuggggcguccaccacccccccaacaucggcgaccagcgcacccucuaccacaccgagaacgccuacgucuccgucgucuccucccacuacucccgccgcuucacccccgagaucaccaagcgccccaagguccgcgaccaggagggccgcaucaacuacuacuggacccuccucgagcccggcgacaccaucaucuucgaggccaacggcaaccucaucgcccccugguacgccuucgcccucucccgcggcuucggcuccggcaucaucaccuccaacgcccccauggacgagugcgacgccaagugccagaccccccagggcgccaucaacuccucccuccccuuccagaacguccaccccgucaccaucggcgagugccccaaguacguccgcuccgccaagcuccgcauggucaccggccuccgcaacauccccuccauccagucccgcggccucuucggcgccaucgccggcuucaucgagggcggcuggaccggcauggucgacggcugguacggcuaccaccaccagaacgagcagggcuccggcuacgccgccgaccagaaguccacccagaacgccaucaacggcaucaccaacaaggucaacuccgucaucgagaagaugaacacccaguucaccgccgucggcaaggaguucaacaagcucgagcgccgcauggagaaccucaacaagaaggucgacgacggcuuccucgacaucuggaccuacaacgccgagcuccucguccuccucgagaacgagcgcacccucgacuuccacgacuccaacgucaagaaccucuacgagaaggucaagucccagcucaagaacaacgccaaggagaucggcaacggcugcuucgaguucuaccacaagugcaacaacgagugcauggaguccgucaagaacggcaccuacgacuaccccaaguacuccgaggaguccaagcucaaccgcgagaagaucgacggcgucaagcucgacuccaugggcgucuaccagauccucgccaucuacuccaccgucgccuccucccucguccuccucgucucccucggcgccaucuccuucuggaugugcuccaacggcucccuccagugccgcaucugcaucuga

SEQ ID NO: 96363 - RNA, 1701 nt, Artificial Sequence
  derived and/or modified CDS sequence (opt2) from hemagglutinin__InfluenzaA__ABA42291
augaagaccaucaucgcccucuccuacauccucugccucgucuucgcccagaagcuccccggcaacgacaacuccaccgccacccucugccucggccaccacgccguccccaacggcaccaucgucaagaccaucaccaacgaccagaucgaggucaccaacgccaccgagcucguccaguccuccuccaccggcggcaucugcgacuccccccaccagauccucgacggcgagaacugcacccucaucgacgcccuccucggcgacccccagugcgacggcuuccagaacaagaagugggaccucuucgucgagcgcuccaaggccuacuccaacugcuaccccuacgacguccccgacuacgccucccuccgcucccucgucgccuccuccggcacccucgaguucaacaacgaguccuucaacuggaccggcgucacccagaacggcaccuccuccgccugcaagcgccgcuccaacaacuccuucuucucccgccucaacuggcucacccaccucaaguucaaguaccccgcccucaacgucaccaugcccaacaacgagaaguucgacaagcucuacaucuggggcguccaccaccccggcaccgacaacgaccagaucucccucuacgcccaggccuccggccgcaucaccgucuccaccaagcgcucccagcagaccgucauccccaacaucggcucccgcccccgcguccgcgacauccccucccgcaucuccaucuacuggaccaucgucaagcccggcgacauccuccucaucaacuccaccggcaaccucaucgccccccgcggcuacuucaagauccgcuccggcaaguccuccaucaugcgcuccgacgcccccaucggcaagugcaaguccgagugcaucacccccaacggcuccauccccaacgacaagcccuuccagaacgucaaccgcaucaccuacggcgccugcccccgcuacgucaagcagaacacccucaagcucgccaccggcaugcgcaacguccccgagaagcagacccgcggcaucuucggcgccaucgccggcuucaucgagaacggcugggagggcauggucgacggcugguacggcuuccgccaccagaacuccgagggcaucggccaggccgccgaccucaaguccacccaggccgccaucaaccagaucaacggcaagcucaaccgccucaucggcaagaccaacgagaaguuccaccagaucgagaaggaguucuccgaggucgagggccgcauccaggaccucgagaaguacgucgaggacaccaagaccgaccucugguccuacaacgccgagcuccucgucgcccucgagaaccagcacaccaucgaccucaccgacuccgagaugaacaagcucuucgagcgcaccaagaagcagcuccgcgagaacgccgaggacaugggcaacggcugcuucaagaucuaccacaagugcgacaacgccugcaucggcuccauccgcaacggcaccuacgaccacgacgucuaccgcgacgaggcccucaacaaccgcuuccagaucaagggcgucgagcucaaguccggcuacaaggacuggauccucuggaucuccuucgccaucuccugcuuccuccucugcgucgcccuccucggcuucaucaugugggccugccagaagggcaacauccgcugcaacaucugcaucuga

SEQ ID NO: 96364 - RNA, 1701 nt, Artificial Sequence; identical to SEQ ID NO: 96087
  derived and/or modified CDS sequence (opt2) from hemagglutinin__InfluenzaA__ABA42302

SEQ ID NO: 96365 - RNA, 1701 nt, Artificial Sequence; identical to SEQ ID NO: 96141
  derived and/or modified CDS sequence (opt2) from hemagglutinin__InfluenzaA__ABA42313

SEQ ID NO: 96366 - RNA, 1701 nt, Artificial Sequence; identical to SEQ ID NO: 96087
  derived and/or modified CDS sequence (opt2) from hemagglutinin__InfluenzaA__ABA42346

SEQ ID NO: 96367 - RNA, 1701 nt, Artificial Sequence; identical to SEQ ID NO: 96141
  derived and/or modified CDS sequence (opt2) from hemagglutinin__InfluenzaA__ABA42357

SEQ ID NO: 96368 - RNA, 1701 nt, Artificial Sequence
  derived and/or modified CDS sequence (opt2) from hemagglutinin__InfluenzaA__ABA42379
augaagaccaucaucgcccucuccuacauccucugccucgucuucgcccagaagcuccccggcaacgacaacuccaccgccacccucugccucggccaccacgccguccccaacggcacccucgucaagaccaucaccaacgaccagaucgaggucaccaacgccaccgagcucguccaguccuccuccaccggccgcaucugcgacuccccccaccagauccucgacggcgagaacugcacccucaucgacgcccuccucggcgacccccacugcgacggcuuccagaacaaggagugggaccucuucgucgagcgcuccaaggccuacuccaacugcuaccccuacgacguccccgacuacgucucccuccgcucccucgucgccuccuccggcacccucgaguucaacaacgaguccuucaacuggaccggcgucgcccagaacggcaccuccuccgccugcaagcgccgcuccgacaaguccuucuucucccgccucaacuggcuccaccagcucaaguacaaguaccccgcccucaacgucaccaugcccaacaacgagaaguucgacaagcucuacaucuggggcguccaccaccccggcaccgacuccgaccagaucucccucuacgcccaggccuccggccgcgucaccgucuccaccaagcgcucccagcagaccgucauccccaacaucggcucccgccccuggguccgcggcgucuccuccaagaucuccaucuacuggaccaucgucaagcccggcgacauccuccucaucaacuccaccggcaaccucaucgccccccgcggcuacuucaagauccgcuccggcaaguccuccaucaugcgcuccgacgcccccaucggcaagugcaacuccgagugcaucacccccaacggcuccauccccaacgacaagcccuuccagaacgucaaccgcaucaccuacggccccugcccccgcuacgucaagcagaacacccucaagcucgccaccggcaugcgcaacguccccgagaagcagacccgcggcaucuucggcgccaucgccggcuucaucgagaacggcugggagggcaugauggacggcugguacggcuuccgccaccagaacuccgagggcaccggccaggccgccgaccucaaguccacccaggccgccaucaaccagaucaacggcaagcucaaccgccucaucgagaagaccaacgagaaguuccaccagaucgagaaggaguucuccgaggucgagggccgcauccaggaccucgagaaguacgucgaggacaccaagaucgaccucugguccuacaacgccgagcuccucgucgcccucgagaaccagcacaccaucgaccucaccgacuccgagaugaacaagcucuucgagcgcaccaagaagcagcuccgcgagaacgccgaggacaugggcaacggcugcuucaagaucuaccacaagugcgacaacgccugcaucggcuccauccgcaacggcaccuacgaccacgacgucuaccgcgacgaggcccucaacaaccgcuuccagaucaagggcgucgagcucaaguccggcuacaaggacuggauccucuggaucuccuucgccaucuccugcuucguccucugcaucguccuccucggcuucaucaugugggccugccagaagggcaacauccgcugcaacaucugcaucuga

SEQ ID NO: 96369 - RNA, 1701 nt, Artificial Sequence; identical to SEQ ID NO: 96116
  derived and/or modified CDS sequence (opt2) from hemagglutinin__InfluenzaA__ABA42390

SEQ ID NO: 96370 - RNA, 1701 nt, Artificial Sequence
  derived and/or modified CDS sequence (opt2) from hemagglutinin__InfluenzaA__ABA42401
augaagaccaucaucgcccucuccuacauccucugccucgucuucgcccagaagcuccccggcaacgacaacuccaccgccacccucugccucggccaccacgccguccccaacggcacccucgucaagaccaucaccaacgaccagaucgaggucaccaacgccaccgagcucguccaguccuccuccaccucccgcaucugcgacuccccccaccagauccucgacggcgagaacugcacccucaucgacgcccuccucggcgacccccacugcgacggcuuccagaacaaggagugggaccucuucgucgagcgcuccaaggccuacuccaacugcuaccccuacgacguccccgacuacgucucccuccgcucccucgucgccuccuccggcacccucgaguucaacaacgaguccuucaacuggaccggcgucgcccagaacggcaccuccuccgccugcaagcgccgcuccgacaaguccuucuucucccgccucaacuggcuccaccagcucaaguacaaguaccccgcccucaacgucaccaugcccaacaacgagaaguucgacaagcucuacaucuggggcguccaccaccccggcaccgacuccgaccagaucucccucuacgcccaguccuccggccgcgucaccgucuccaccaagcgcucccagcagaccgucauccccaacaucggcuccggccccuggguccgcggcgucuccucccgcaucuccaucuacuggaccaucgucaagcccggcgacauccuccucaucaacuccaccggcaaccucaucgccccccgcggcuacuucaagauccgcuccggcaaguccuccaucaugcgcuccgacgcccccaucggcaagugcaacuccaagugcaucacccccaacggcuccauccccaacgacaagcccuuccagaacgucaaccgcaucaccuacggcgccugcccccgcuacgucaagcagaacacccucaagcucgccaccggcaugcgcaacguccccgagaagcagacccgcggcaucuucggcgccaucgccggcuucaucgagaacggcugggagggcaugauggacggcugguacggcuuccgccaccagaacuccgagggcaccggccaggccgccgaccucaaguccacccaggccgccaucaaccagaucaacggcaagcucaaccgccucaucgagaagaccaacgagaaguuccaccagaucgagaaggaguucuccgaggucgagggccgcauccaggaccucgagaaguacgucgaggacaccaagaucgaccucugguccuacaacgccgagcuccucgucgcccucgagaaccagcacaccaucgaccucaccgacuccgagaugaacaagcucuucgagcgcaccaagaagcagcuccgcgagaacgccgaggacaugggcaacggcugcuucaagaucuaccacaagugcgacaacgccugcaucggcuccauccgcaacggcaccuacgaccacgacgucuaccgcgacgaggcccucaacaaccgcuuccagaucaagggcgucgagcucaaguccggcuacaaggacuggauccucuggaucuccuucgccaucuccugcuuccuccucugcaucguccuccucggcuucaucaugugggccugccagaagggcaacauccgcugcaacaucugcaucuga

SEQ ID NO: 96371 - RNA, 1701 nt, Artificial Sequence
  derived and/or modified CDS sequence (opt2) from hemagglutinin__InfluenzaA__ABA42412
augaagaccaucaucgcccucuccuacauccucugccucgucuucgcccagaagcuccccggcaacgacaacuccaccgccacccucugccucggccaccacgccguccccaacggcacccucgucaagaccaucaccaacgaccagaucgaggucaccaacgccaccgagcucguccaguccuccuccaccggccgcaucugcgacuccccccaccagauccucgacggcgagaacugcacccucaucgacgcccuccucggcgacccccacugcgacggcuuccagaacaaggagugggaccucuucgucgagcgcuccaaggccuacuccaacugcuaccccuacgacguccccgacuacgucucccuccgcucccucgucgccuccuccggcacccucgaguucaacaacgaguccuucaacuggaccggcgucgcccagaacggcaccuccuccgccugcaagcgccgcuccgacaaguccuucuucucccgccucaacuggcuccaccagcucaaguacaaguaccccgcccucaacgucaccaugcccaacaacgagaaguucgacaagcucuacaucuggggcguccaccaccccggcaccgacuccgaccagaucucccucuacgcccaggccuccggccgcgucaccgucuccaccaagcgcucccagcagaccgucauccccaacaucggcucccgccccuggguccgcggcgucuccuccaagaucuccaucuacuggaccaucgucaagcccggcgacauccuccucaucaacuccaccggcaaccucaucgccccccgcggcuacuucaagauccgcuccggcaaguccuccaucaugcgcuccgacgcccccaucggcaagugcaacuccgagugcaucacccccuccggcuccauccccaacgacaagcccuuccagaacgucaaccgcaucaccuacggccccugcccccgcuacgucaagcagaacacccucaagcucgccaccggcaugcgcaacguccccgagaagcagacccgcggcaucuucggcgccaucgccggcuucaucgagaacggcugggagggcaugauggacggcugguacggcuuccgccaccagaacuccgagggcaccggccaggccgccgaccucaaguccacccaggccgccaucaaccagaucaacggcaagcucaaccgccucaucgagaagaccaacgagaaguuccaccagaucgagaaggaguucuccgaggucgagggccgcauccaggaccucgagaaguacgucgaggacaccaagaucgaccucugguccuacaacgccgagcuccucgucgcccucgagaaccagcacaccaucgaccucaccgacuccgagaugaacaagcucuucgagcgcaccaagaagcagcuccgcgagaacgccgaggacaugggcaacggcugcuucaagaucuaccacaagugcgacaacgccugcaucggcuccauccgcaacggcaccuacgaccacgacgucuaccgcgacgaggcccucaacaaccgcuuccagaucaagggcgucgagcucaaguccggcuacaaggacuggauccucuggaucuccuucgccaucuccugcuuccuccucugcaucguccuccucggcuucaucaugugggccugccagaagggcaacauccgcugcaacaucugcaucuga

SEQ ID NO: 96372 - RNA, 1701 nt, Artificial Sequence; identical to SEQ ID NO: 96083
  derived and/or modified CDS sequence (opt2) from hemagglutinin__InfluenzaA__ABA42443

SEQ ID NO: 96373 - RNA, 1701 nt, Artificial Sequence; identical to SEQ ID NO: 96087
  derived and/or modified CDS sequence (opt2) from hemagglutinin__InfluenzaA__ABA42454

SEQ ID NO: 96374 - RNA, 1701 nt, Artificial Sequence
  derived and/or modified CDS sequence (opt2) from hemagglutinin__InfluenzaA__ABA42465
augaagaccaucaucgcccucuccuacauccucugccucgucuucgcccagaagcuccccggcaacgacaacuccaccgccacccucugccucggccaccacgccguccccaacggcacccucgucaagaccaucaccaacgaccagaucgaggucaccaacgccaccgagcucguccaguccuccuccaccucccgcaucugcgacuccccccaccagauccucgacggcgagaacugcacccucaucgacgcccuccucggcgacccccacugcgacggcuuccagaacaaggagugggaccucuucgucgagcgcuccaaggccuacuccaacugcuaccccuacgacguccccgacuacgucucccuccgcucccucgucgccuccuccggcacccucgaguucaacaacgaguccuucaacuggaccggcgucgcccagaacggcaccuccuccgccugcaagcgccgcuccgacaaguccuucuucucccgccucaacuggcuccaccagcucaaguacaaguaccccgcccucaacgucaccaugcccaacaacgagaaguucgacaagcucuacaucuggggcguccaccaccccggcaccgacuccgaccagaucucccucuacgcccaggccuccggccgcgucaccgucuccaccaagcgcucccagcagaccgucauccccaacaucggcucccgccccuggggccgcggcgucuccucccgcaucuccaucuacuggaccaucgucaagcccggcgacauccuccucaucaacuccaccggcaaccucaucgccccccgcggcuacuucaagauccgcuccggcaaguccuccaucaugcgcuccgacgcccccaucggcaagugcaacuccgagugcaucacccccaacggcuccauccccaacgacaagcccuuccagaacgucaaccgcaucaccuacggcgccugcccccgcuacgucaagcagaacacccucaagcucgccaccggcaugcgcaacguccccgagaagcagacccgcggcaucuucggcgccaucgccggcuucaucgagaacggcugggagggcaugauggacggcugguacggcuuccgccaccagaacuccgagggcaccggccaggccgccgaccucaaguccacccaggccgccaucaaccagaucaacggcaagcucaaccgccucaucgagaagaccaacgagaaguuccaccagaucgagaaggaguucuccgaggucgagggccgcauccaggaccucgagaaguacgucgaggacaccaagaucgaccucugguccuacaacgccgagcuccucgucgcccucgagaaccagcacaccaucgaccucaccgacuccgagaugaacaagcucuucgagcgcaccaagaagcagcuccgcgagaacgccgaggacaugggcaacggcugcuucaagaucuaccacaagugcgacaacgccugcaucggcuccauccgcaacggcaccuacgaccacgacgucuaccgcgacgaggcccucaacaaccgcuuccagaucaagggcgucgagcucaaguccggcuacaaggacuggauccucuggaucuccuucgccaucuccugcuuccuccucugcaucguccuccucggcuucaucaugugggccugccagaagggcaacauccgcugcaacaucugcaucuga

SEQ ID NO: 96375 - RNA, 1701 nt, Artificial Sequence
  derived and/or modified CDS sequence (opt2) from hemagglutinin__InfluenzaA__ABA42476
augaagaccaucaucgcccucuccuacauccucugccucgucuucgcccagaagcuccccggcaacgacaacuccaccgccacccucugccucggccaccacgccguccccaacggcacccucgucaagaccaucaccaacgaccagaucgaggucaccaacgccaccgagcucguccaguccuccuccaccggccgcaucugcgacuccccccaccagauccucgacggcgagaacugcacccucaucgacgcccuccucggcgacccccacugcgacggcuuccagaacaaggagugggaccucuucgucgagcgcuccaaggccuacuccaacugcuaccccuacgacguccccgacuacgucucccuccgcucccucgucgccuccuccggcacccucgaguucaacaacgaguccuucaacuggaccggcgucgcccagaacggcaccuccuccgccugcaagcgccgcuccgacaaguccuucuucucccgccucaacuggcuccaccagcucaaguacaaguaccccgcccucaacgucaccaugcccaacaacgagaaguucgacaagcucuacaucuggggcguccaccaccccggcaccgacuccgaccagaucucccucuacgcccaggccuccggccgcgucaccgucuccaccaagcgcucccagcagaccgucauccccaacaucggcucccgccccuggguccgcggcgucuccucccgcaucuccaucuacuggaccaucgucaagcccggcgacauccuccucaucaacuccaccggcaaccucaucgccccccgcggcuacuucaagauccgcuccggcaaguccuccaucaugcgcuccgacgcccccaucggcaagugcaacuccgagugcaucacccccaacggcuccauccccaacgacaagcccuuccagaacgucaaccgcaucaccuacggccccugcccccgcuacgucaagcagaacacccucaagcucgccaccggcaugcgcaacguccccgagaagcagacccgcggcaucuucggcgccaucgccggcuucaucgagaacggcugggagggcaugauggacggcugguacggcuuccgccaccagaacuccgagggcaccggccaggccgccgaccucaaguccacccaggccgccaucaaccagaucaacggcaagcucaaccgccucaucgagaagaccaacgagaaguuccaccagaucgagaaggaguucuccgaggucgagggccgcauccaggaccucgagaaguacgucgaggacaccaagaucgaccucugguccuacaacgccgagcuccucgucgcccucgagaaccagcacaccaucgaccucaccgacuccgagaugaacaagcucuucgagcgcaccaagaagcagcuccgcgagaacgccgaggacaugggcaacggcugcuucaagaucuaccacaagugcgacaacgccugcaucggcuccauccgcaacggcaccuacgaccacgacgucuaccgcaacgaggcccucaacaaccgcuuccagaucaagggcgucgagcucaaguccggcuacaaggacuggauccucuggaucuccuucgccaucuccugcuuccuccucugcaucguccuccucggcuucaucaugugggccugccagaagggcaacauccgcugcaacaucugcaucuga

SEQ ID NO: 96376 - RNA, 1701 nt, Artificial Sequence
  derived and/or modified CDS sequence (opt2) from hemagglutinin__InfluenzaA__ABA42498
augaagaccaucaucgcccucuccuacauccucugccucgucuucgcccagaagcuccccggcaacgacaacuccaccgccacccucugccucggccaccacgccguccccaacggcacccucgucaagaccaucaccaacgaccagaucgaggucaccaacgccaccgagcucguccaguccuccuccaccucccgcaucugcgacuccccccaccagauccucgacggcgagaacugcacccucaucgacgcccuccucggcgacccccacugcgacggcuuccagaacaaggagugggaccucuucgucgagcgcuccaaggccuacuccaacugcuaccccuacgacguccccgacuacgucucccuccgcucccucgucgccuccuccggcacccucgaguucaacaacgaguccuucaacuggaccggcgucgcccagaacggcaccuccuccgccugcaagcgccgcuccgacaaguccuucuucucccgccucaacuggcuccaccagcucaaguacaaguaccccgcccucaacgucaccaugcccaacaacgagaaguucgacaagcucuacaucuggggcguccaccaccccggcaccgacuccgaccagaucucccucuacgcccaggccuccggccgcgucaccgucuccaccaagcgcucccagcagaccgucauccccaacaucggcucccgccccuggguccgcggcgucuccuccaucaucuccaucuacuggaccaucgucaagcccggcgacauccuccucaucaacuccaccggcaaccucaucgccccccgcggcuacuucaagauccgcuccggcaaguccuccaucaugcgcuccgacgcccccaucggcaagugcaacuccgagugcaucacccccaacggcuccauccccaacgacaagcccuuccagaacgucaaccgcaucaccuacggcgccugcccccgcuacgucaagcagaacacccucaagcucgccaccggcaugcgcaacguccccgagaagcagacccgcggcaucuucggcgccaucgccggcuucaucgagaacggcugggagggcaugauggacggcugguacggcuuccgccaccagaacuccgagggcaccggccaggccgccgaccucaaguccacccaggccgccaucaaccagaucaacggcaagcucaaccgccucaucgagaagaccaacgagaaguuccaccagaucgagaaggaguucuccgaggucgagggccgcauccaggaccucgagaaguacgucgaggacaccaagaucgaccucugguccuacaacgccgagcuccucgucgcccucgagaaccagcacaccaucgaccucaccgacuccgagaugaacaagcucuucgagcgcaccaagaagcagcuccgcgagaacgccgaggacaugggcaacggcugcuucaagaucuaccacaagugcgacaacgccugcaucggcuccauccgcaacggcaccuacgaccacgacgucuaccgcgacgaggcccucaacaaccgcuuccagaucaagggcgucgagcucaaguccggcuacaaggacuggauccucuggaucuccuucgccaucuccugcuuccuccucugcaucguccuccucggcuucaucaugugggccugccagaagggcaacauccgcugcaacaucugcaucuga

SEQ ID NO: 96377 - RNA, 1701 nt, Artificial Sequence; identical to SEQ ID NO: 96108
  derived and/or modified CDS sequence (opt2) from hemagglutinin__InfluenzaA__ABA42509

SEQ ID NO: 96378 - RNA, 1701 nt, Artificial Sequence
  derived and/or modified CDS sequence (opt2) from hemagglutinin__InfluenzaA__ABA42520
augaagaccaucaucgcccucuccuacauccucugccucgucuucgcccagaagcuccccgucaacgacaacuccaccgccacccucugccucggccaccacgccguccccaacggcacccucgucaagaccaucaccaacgacuacaucgaggucaccaacgccaccgagcucguccaguccuccuccaccggccgcaucugcgacuccccccaccagauccucgacggcgagaacugcacccucaucgacgcccuccucggcgacccccacugcgacggcuuccagaacaaggagugggaccucuucgucgagcgcuccaccgccuacuccaacugcuaccccuacgacguccccgacuacgccucccuccgcucccucgucgccuccuccggcacccucgaguucaacaacgaguccuucaacuggaccggcgucgcccagaacggcaccuccuccgccugcaagcgccgcuccaucaaguccuucuucucccgccucaacuggcuccaccagcucaaguacaaguaccccgcccucaacgucaccaugcccaacaacgagaaguucgacaagcucuacaucuggggcguccaccaccccuccaccgacuccgaccagaucucccucuacgcccaggccuccggccgcgucaccgucuccaccaagcgcucccagcagaccgucauccccaacaucggcucccgccccuggguccgcggcgucuccuccaucaucuccaucuacuggaccaucgucaagcccggcgacauccuccucaucaacuccaccggcaaccucaucgccccccgcggcuacuucaagauccgcuccggcaaguccuccaucaugcgcuccaacgcccccaucggcaagugcaacuccgagugcaucacccccaacggcuccauccccaacgacaagcccuuccagaacgucaaccgcaucaccuacggcgccugcccccgcuacgucaagcagaacacccucaagcucgccaccggcaugcgcaacguccccgagaagcagacccgcggcaucuucggcgccaucgccggcuucaucgagaacggcugggagggcauggucgacggcugguacggcuuccgccaccagaacuccgagggcaccggccaggccgccgaccucaaguccacccaggccgccaucaaccagaucaacggcaagcucaaccgccucaucgagaagaccaacgagaaguuccaccagaucgagaaggaguucuccgaggucgagggccgcauccaggaccucgagaaguacgucgaggacaccaagaucgaccucugguccuacaacgccgagcuccucgucgcccucgagaaccagcacaccaucgaccucaccgacuccgagaugaacaagcucuucgagcgcacccgcaagcagcuccgcgagaacgccgaggacaugggcaacggcugcuucaagaucuaccacaagugcgacaacgccugcaucggcuccauccgcaacggcaccuacgaccacgacgucuaccgcgacgaggcccucaacaaccgcuuccagaucaagggcgucgagcucaaguccggcuacaaggacuggauccucuggaucuccuucgccaucuccugcuuccuccucugcgucguccuccucggcuucaucaugugggccugccagaagggcaacauccgcugcaacaucugcaucuga

SEQ ID NO: 96379 - RNA, 1701 nt, Artificial Sequence
  derived and/or modified CDS sequence (opt2) from hemagglutinin__InfluenzaA__ABA42531
augaagaccaucaucgcccucuccuacauccucugccucgucuucgcccagaagcuccccgucaacgacaacuccaccgccacccucugccucggccaccacgccguccccaacggcacccucgucaagaccaucaccaacgaccacaucgaggucaccaacgccaccgagcucguccaguccuccuccaccggccgcaucugcgacuccccccaccagauccucgacggcgagaacugcacccucaucgacgcccuccucggcgacccccacugcgacggcuuccagaacaaggagugggaccucuucgucgagcgcuccaccgccuacuccaacugcuaccucuacgacguccccgacuacgccucccuccgcucccucgucgccuccuccggcacccucgaguucaacaacgaguccuucaacuggaccggcgucgcccagaacggcaccuccuccgccugcaagcgccgcuccaucaaguccuucuucucccgccucaacuggcuccaccagcucaaguacaaguaccccgcccucaacgucaccaugcccaacaacgagaaguucgacaagcucuacaucuggggcguccaccaccccuccaccgacuccgaccagaucucccucuacgcccaggccuccggccgcgucaccgucuccaccaagcgcucccagcagaccgucauccccaacaucggcucccgccccuggguccgcggcgucuccucccgcaucuccaucuacuggaccaucgucaagcccggcgacauccuccucaucaacuccaccggcaaccucaucgccccccgcggcuacuucaagauccgcuccggcaaguccuccaucaugcgcuccaacgcccccaucggcaagugcaacuccgagugcaucacccccaacggcuccauccccaacgacaagcccuuccagaacgucaaccgcaucaccuacggcgccugcccccgcuacgucaagcagaacacccucaagcucgccaccggcaugcgcaacguccccgagaagcagacccgcggcaucuucggcgccaucgccggcuucaucgagaacggcugggagggcauggucgacggcugguacggcuuccgccaccagaacuccgagggcaccggccaggccgccgaccucaaguccacccaggccgccaucaaccagaucaacggcaagcucaaccgccucaucgagaagaccaacgagaaguuccaccagaucgagaaggaguucuccgaggucgagggccgcauccaggaccucgagaaguacgucgaggacaccaagaucgaccucugguccuacaacgccgagcuccucgucgcccucgagaaccagcacaccaucgaccucaccgacuccgagaugaacaagcucuucgagcgcacccgcaagcagcuccgcgagaacgccgaggacaugggcaacggcugcuucaagaucuaccacaagugcgacaacgccugcaucggcuccauccgcaacggcaccuacgaccacgacgucuaccgcgacgaggcccucaacaaccgcuuccagaucaagggcgucgagcucaaguccggcuacaaggacuggauccucuggaucuccuucgccaucuccugcuuccuccucugcgucguccuccucggcuucaucaugugggccugccagaagggcaacauccgcugcaacaucugcaucuga

SEQ ID NO: 96380 - RNA, 1701 nt, Artificial Sequence; identical to SEQ ID NO: 96108
  derived and/or modified CDS sequence (opt2) from hemagglutinin__InfluenzaA__ABA42542

SEQ ID NO: 96381 - RNA, 1701 nt, Artificial Sequence
  derived and/or modified CDS sequence (opt2) from hemagglutinin__InfluenzaA__ABA42553
augaagaccaucaucgcccucuccuacauccucugccucgucuucgcccagaagcuccccgucaacgacaacuccaccgccacccucugccucggccaccacgccguccccaacggcacccucgucaagaccaucaccaacgaccacaucgaggucaccaacgccaccgagcucguccaguccuccuccaccggccgcaucugcgacuccccccaccagauccucgacggcgagaacugcacccucaucgacgcccuccucggcgacccccacugcgacggcuuccagaacaaggagugggaccucuucgucgagcgcuccaccgcccacuccaacugcuaccccuacgacguccccgacuacgccucccuccgcucccucgucgccuccuccggcacccucgaguucaacaacgaguccuucaacuggaccggcgucgcccagaacggcaccuccuccgccugcaagcgccgcuccaucaaguccuucuucucccgccucaacuggcuccaccagcucaaguacaaguaccccgcccucaacgucaccaugcccaacaacgagaaguucgacaagcucuacaucuggggcguccaccaccccuccaccgacuccgaccagaucucccucuacgcccaggccuccggccgcgucaccgucuccaccaagcgcucccagcagaccgucauccccaacaucggcucccgccccuggguccgcggcgucuccucccgcaucuccaucuacuggaccaucgucaagcccggcgacauccuccucaucaacuccaccggcaaccucaucgccccccgcggcuacuucaagauccgcuccggcaaguccuccaucaugcgcuccaacgcccccaucggcaagugcaacuccgagugcaucacccccaacggcuccauccccaacgacaagcccuuccagaacgucaaccgcaucaccuacggcgccugcccccgcuacgucaagcagaacacccucaagcucgccaccggcaugcgcaacguccccgagaagcagacccgcggcaucuucggcgccaucgccggcuucaucgagaacggcugggagggcauggucgacggcugguacggcuuccgccaccagaacuccgagggcaccggccaggccgccgaccucaaguccacccaggccgccaucaaccagaucaacggcaagcucaaccgccucaucgagaagaccaacgagaaguuccaccagaucgagaaggaguucuccgaggucgagggccgcauccaggaccucgagaaguacgucgaggacaccaagaucgaccucugguccuacaacgccgagcuccucgucgcccucgagaaccagcacaccaucgaccucaccgacuccgagaugaacaagcucuucgagcgcacccgcaagcagcuccgcgagaacgccgaggacaugggcaacggcugcuucaagaucuaccacaagugcgacaacgccugcaucggcuccauccgcaacggcaccuacgaccacgacgucuaccgcgacgaggcccucaacaaccgcuuccagaucaagggcgucgagcucaaguccggcuacaaggacuggauccucuggaucuccuucgccaucuccugcuuccuccucugcgucguccuccucggcuucaucaugugggccugccagaagggcaacauccgcugcaacaucugcaucuga

SEQ ID NO: 96382 - RNA, 1701 nt, Artificial Sequence; identical to SEQ ID NO: 96108
  derived and/or modified CDS sequence (opt2) from hemagglutinin__InfluenzaA__ABA42564

SEQ ID NO: 96383 - RNA, 1701 nt, Artificial Sequence
  derived and/or modified CDS sequence (opt2) from hemagglutinin__InfluenzaA__ABA42928
augaagaccaucaucgcccucuccuacauccucugccucgucuucgcccagaagcuccccgucaacgacaacuccaccgccacccucugccucggccaccacgccguccccaacggcacccucgucaagaccaucaccaacgaccacaucgaggucaccaacgccaccgagcucguccaguccuccuccaccggccgcaucugcgacuccccccaccagauccucgacggcgagaacugcacccucaucgacgcccuccucggcgacccccacugcgacggcuuccagaacaaggagugggaccucuucgucgagcgcuccaccgccuacuccaacugcuaccccuacgacguccccgacuacgccucccuccgcucccucgucgccuccuccggcacccucgaguucaacaacgaguccuucaacuggaccggcgucgcccagaacggcaccuccuccgccugcaagcgccgcuccaucaaguccuucuucucccgccucaacuggcuccaccagcucaaguacaaguaccccgcccucaacgucaccaugcccaacaacgagaaguucgacaagcucuacaucuggggcguccaccaccccuccaccgacuccgaccagaucucccucuacgcccaggccuccggccgcgucaccgucuccaccaagcgcucccagcagaccgucauccccaacaucggcucccgccccuggguccgcggcgucuccuccaagaucuccaucuacuggaccaucgucaagcccggcgacauccuccucaucaacuccaccggcaaccucaucgccccccgcggcuacuucaagauccgcuccggcaaguccuccaucaugcgcuccaacgcccccaucggcaagugcaacuccgagugcaucacccccaacggcuccauccccaacgacaagcccuuccagaacgucaaccgcaucaccuacggcgccugcccccgcuacgucaagcagaacacccucaagcucgccaccggcaugcgcaacguccccgagaagcagacccgcggcaucuucggcgccaucgccggcuucaucgagaacggcugggagggcauggucaacggcugguacggcuuccgccaccagaacuccgagggcaccggccaggccgccgaccucaaguccacccaggccgccaucaaccagaucaacggcaagcucaaccgccucaucgagaagaccaacgagaaguuccaccagaucgagaaggaguucuccgaggucgagggccgcauccaggaccucgagaaguacgucgaggacaccaagaucgaccucugguccuacaacgccgagcuccucgucgcccucgagaaccagcacaccaucgaccucaccgacuccgagaugaacaagcucuucgagcgcacccgcaagcagcuccgcgagaacgccgaggacaugggcaacggcugcuucaagaucuaccacaagugcgacaacgccugcaucggcuccauccgcaacggcaccuacgaccacgacgucuaccgcgacgaggcccucaacaaccgcuuccagaucaagggcgucgagcucaaguccggcuacaaggacuggauccucuggaucuccuucgccaucuccugcuuccuccucugcgucguccuccucggcuucaucaugugggccugccagaagggcaacauccgcugcaacaucugcaucuga

SEQ ID NO: 96384 - RNA, 1701 nt, Artificial Sequence; identical to SEQ ID NO: 96108
  derived and/or modified CDS sequence (opt2) from hemagglutinin__InfluenzaA__ABA42939

SEQ ID NO: 96385 - RNA, 1701 nt, Artificial Sequence
  derived and/or modified CDS sequence (opt2) from hemagglutinin__InfluenzaA__ABA42978
augaagaccaucaucgcccucuccuacauccucugccucgucuucgcccagaagcuccccgucaacgacaacuccaccgccacccucugccucggccaccacgccguccccaacggcacccucgucaagaccaucaccaacgaccacaucgaggucaccaacgccaccgagcucguccaguccuccuccaccggccgcaucugcgacuccccccaccagauccucgacggcgagaacugcacccucaucgacgcccuccucggcgacccccacugcgacggcuuccagaacaaggagugggaccucuucgucgagcgcuccaccgccuacuccaacugcuaccccuacgacguccccgacuacgccucccuccgcucccucgucgccuccuccggcacccucgaguucaacaacgaguccuucaacuggaccggcgucgcccagaacggcaccuccuccgccugcaagcgccgcuccaucaaguccuucuucucccgccucaacuggcuccaccagcucaaguacaaguaccccgcccucaacgucaccauccccaacaacgagaaguucgacaagcucuacaucuggggcguccaccaccccuccaccgacuccgaccagaucucccucuacgcccaggccuccggccgcgucaccgucuccaccaagcgcucccagcagaccgucauccccaacaucggcucccgccccuggguccgcggcgucuccucccgcaucuccaucuacuggaccaucgucaagcccggcgacauccuccucaucaacuccaccggcaaccucaucgccccccgcggcuacuucaagauccgcuccggcaaguccuccaucaugcgcuccaacgcccccaucggcaagugcaacuccgagugcaucacccccaacggcuccauccccaacgacaagcccuuccagaacgucaaccgcaucaccuacggcgccugcccccgcuacgucaagcagaacacccucaagcucgccaccggcaugcgcaacguccccgagaagcagacccgcggcaucuucggcgccaucgccggcuucaucgagaacggcugggagggcauggucgacggcugguacggcuuccgccaccagaacuccgagggcaccggccaggccgccgaccucaaguccacccaggccgccaucaaccagaucaacggcaagcucaaccgccucaucgagaagaccaacgagaaguuccaccagaucgagaaggaguucuccgaggucgagggccgcauccaggaccucgagaaguacgucgaggacaccaagaucgaccucugguccuacaacgccgagcuccucgucgcccucgagaaccagcacaccaucgaccucaccgacuccgagaugaacaagcucuucgagcgcacccgcaagcagcuccgcgagaacgccgaggacaugggcaacggcugcuucaagaucuaccacaagugcgacaacgccugcaucggcuccauccgcaacggcaccuacgaccacgacgucuaccgcgacgaggcccucaacaaccgcuuccagaucaagggcgucgagcucaaguccggcuacaaggacuggauccucuggaucuccuucgccaucuccugcuuccuccucugcgucguccuccucggcuucaucaugugggccugccagaagggcaacauccgcugcaacaucugcaucuga

SEQ ID NO: 96386 - RNA, 1701 nt, Artificial Sequence; identical to SEQ ID NO: 96279
  derived and/or modified CDS sequence (opt2) from hemagglutinin__InfluenzaA__ABA43167

SEQ ID NO: 96387 - RNA, 1701 nt, Artificial Sequence
  derived and/or modified CDS sequence (opt2) from hemagglutinin__InfluenzaA__ABA43178
augaagaccaucaucgcccucuccuacauccucugccucgucuucgcccagaagcuccccggcaacgacaacuccaccgccacccucugccucggccaccacgccguccccaacggcaccaucgucaagaccaucaccaacgaccagaucgaggucaccaacgccaccgagcucguccaguccuccuccaccggcggcaucugcgacuccccccaccagauccucgacggcgagaacugcacccucaucgacgcccuccucggcgacccccagugcgacggcuuccagaacaagaagugggaccucuucgucgagcgcuccaaggccuacuccaacugcuaccccuacgacguccccgacuacgccucccuccgcucccucgucgccuccuccggcacccucgaguucaacaacgaguccuucaacuggaccggcgucacccagaacggcaccuccuccgccugcaagcgccgcuccaacaacuccuucuucucccgccucaacuggcucacccaccucaaguucaaguaccccgcccucaacgucaccaugcccaacaacgagaaguucgacaagcucuacaucuggggcguccaccaccccggcaccgacaacgaccagaucucccucuacgcccaggccuccggccgcaucaccgucuccaccaagcgcucccagcagaccgucauccccaacaucggcucccgcccccgcguccgcgacauccccucccgcaucuccaucuacuggaccaucgucaagcccggcgacauccuccucaucaacuccaccggcaaccucaucgccccccgcggcuacuucaagauccgcuccggcaaguccuccaucaugcgcuccgacgcccccaucggcaagugcaacuccgagugcaucacccccaacggcuccauccccaacgacaagcccuuccagaacgucaaccgcaucaccuacggcgccugcccccgcuacgucaagcagaacacccucaagcucgccaccggcaugcgcaacguccccgagaagcagacccgcggcaucuucggcgccaucgccggcuucaucgagaacggcugggagggcauggucgacggcugguacggcuuccgccaccagaacuccgagggcaucggccaggccgccgaccucaaguccacccaggccgccaucaaccagaucaacggcaagcucaaccgccucaucggcaagaccaacgagaaguuccaccagaucgagaaggaguucuccgaggucgagggccgcauccaggaccucgagaaguacgucgaggacaccaagaucgaccucugguccuacaacgccgagcuccucgucgcccucgagaaccagcacaccaucgaccucaccgacuccgagaugaacaagcucuucgagcgcaccaagaagcagcuccgcgagaacgccgaggacaugggcaacggcugcuucaagaucuaccacaagugcgacaacgccugcaucggcuccauccgcaacggcaccuacgaccacgacgucuaccgcgacgaggcccucaacaaccgcuuccagaucaagggcgucgagcucaaguccggcuacaaggacuggauccucuggaucuccuucgccaucuccugcuuccuccucugcaucgcccuccucggcuucaucaugugggccugccagaagggcaacauccgcugcaacaucugcaucuga

SEQ ID NO: 96388 - RNA, 1698 nt, Artificial Sequence
  derived and/or modified CDS sequence (opt2) from hemagglutinin__InfluenzaA__ABA43189
augaaggccaagcuccucguccuccucugcaccuucaccgccaccuacgccgacaccaucugcgucggcuaccacgccaacaacuccaccgacaccgucgacaccguccucgagaagaacgucaccgucacccacuccgucaaccuccucgaggacucccacaacggcaagcucugccuccucaagggcaucgccccccuccagcucggcaacugcuccgucgccggcuggauccucggcaaccccgagugcgagcuccucaucuccaaggaguccugguccuacaucgucgagacccccaaccccgagaacggcaccugcuaccccggcuacuucgccgacuacgaggagcuccgcgagcagcucuccuccgucuccuccuucgagcgcuucgagaucuuccccaagggcuccuccuggcccaaccacaccgucaccggcgucuccgccuccugcucccacaacggcaaguccuccuucuaccgcaaccuccucuggcucaccggcaagaacggccucuaccccaaccucuccauguccuacgucaacaacaaggagaaggagguccucguccucuggggcguccaccacccccccaacaucggcgaccagcgcgcccucuaccacaccgagaacgccuacgucuccgucgucuccucccacuacucccgccgcuucacccccgagaucgccaagcgccccaagguccgcgaccaggagggccgcaucaacuacuacuggacccuccucgagcccggcgacaccaucaucuucgaggccaacggcaaccucaucgcccccugguacgccuucgcccucucccgcggcuucggcuccggcaucaucaccuccaacgcccccauggacgagugcgacgccaagugccagaccccccagggcgccaucaacuccucccuccccuuccagaacguccaccccgucaccaucggcgagugccccaaguacguccgcuccgccaagcuccgcauggucaccggccuccgcaacauccccuccauccagucccgcggccucuucggcgccaucgccggcuucaucgagggcggcuggaccggcauggucgacggcugguacggcuaccaccaccagaacgagcagggcuccggcuacgccgccgaccagaaguccacccagaacgccaucaacggcaucaccaacaaggucaacuccgucaucgagaagaugaacacccaguucaccgccgucggcaaggaguucaacaagcucgagcgccgcauggagaaccucaacaagaaggucgacgacggcuuccucgacaucuggaccuacaacgccgagcuccucguccuccucgagaacgagcgcacccucgacuuccacgacuccaacgucaagaaccucuacgagaaggucaagucccagcucaagaacaacgccaaggagaucggcaacggcugcuucgaguucuaccacaagugcaacaacgagugcauggaguccgucaagaacggcaccuacgacuaccccaaguacuccgaggaguccaagcucaaccgcgagaagaucgacggcgucaagcucgaguccaugggcgucuaccagauccucgccaucuacuccaccgucgccuccucccucguccuccucgucucccucggcgccaucuccuucuggaugugcuccaacggcucccuccagugccgcaucugcaucuga

SEQ ID NO: 96389 - RNA, 1701 nt, Artificial Sequence
  derived and/or modified CDS sequence (opt2) from hemagglutinin__InfluenzaA__ABA43200
augaagaccaucaucgcccucuccuacauccucugccucgucuucgcccagaagcuccccggcaacgacaacuccaccgccacccucugccucggccaccacgccguccccaacggcaccaucgucaagaccaucaccaacgaccagaucgaggucaccaacgccaccgagcucguccaguccuccuccaccggcggcaucugcgacuccccccaccagauccucgacggcgagaacugcacccucaucgacgcccuccucggcgacccccagugcgacggcuuccagaacaagaagugggaccucuucgucgagcgcuccaaggccuacuccaacugcuaccccuacgacguccccgacuacgccucccuccgcucccucgucgccuccuccggcacccucgaguucaacaacgaguccuucaacuggaccggcgucacccagaacggcaccuccuccgccugcaagcgccgcuccaacaacuccuucuucucccgccucaacuggcucacccaccucaaguucaaguaccccgcccucaacgucaccaugcccaacaacgagaaguucgacaagcucuacaucuggggcguccaccaccccggcaccgacaacgaccagaucucccucuacgcccaggccuccggccgcaucaccgucuccaccaagcgcucccagcagaccgucauccccaacaucggcucccgcccccgcguccgcgacauccccucccgcaucuccaucuacuggaccaucgucaagcccggcgacauccuccucaucaacuccaccggcaaccucaucgccccccgcggcuacuucaagauccgcuccggcaaguccuccaucaugcgcuccgacgcccccaucggcaagugcaacuccgagugcaucacccccaacggcuccauccccaacgacaagcccuuccagaacgucaaccgcaucaccuacggcgccugcccccgcuacgucaagcagaacacccucaagcucgccaccggcaugcgcaacguccccgagaagcagacccgcggcaucuucggcgccaucgccggcuucaucgagaacggcugggagggcauggucgacggcugguacggcuuccgccaccagaacuccgagggcaucggccaggccgccgaccucaaguccacccaggccgccaucaaccagaucaacggcaagcucaaccgccucaucggcaagaccaacgagaaguuccaccagaucgagaaggaguucuccgaggucgagggccgcauccaggaccucgagaaguacgucgaggacaccaagaucgaccucugguccuacaacgccgagcuccucgucguccucgagaaccagcacaccaucgaccucaccgacuccgagaugaacaagcucuucgagcgcaccaagaagcagcuccgcgagaacgccgaggacaugggcaacggcugcuucaagaucuaccacaagugcgacaacgccugcaucggcuccauccgcaacggcaccuacgaccacgacgucuaccgcgacgaggcccucaacaaccgcuuccagaucaagggcgucgagcucaaguccggcuacaaggacuggauccucuggaucuccuucgccaucuccugcuuccuccucugcgucguccuccucggcuucaucaugugggccugccagaagggcaacauccgcugcaacaucugcaucuga

SEQ ID NO: 96390 - RNA, 1701 nt, Artificial Sequence
  derived and/or modified CDS sequence (opt2) from hemagglutinin__InfluenzaA__ABA43336
augaagaccaucaucgcccucuccuacaucuucugccucgucuucgcccagaagcuccccggcaacgacaacuccaccgccacccucugccucggccaccacgccguccccaacggcacccucgucaagaccaucaccaacgaccagaucgaggucaccaacgccaccgagcucguccagaacuccuccaccggccgcaucugcgacuccccccaccgcauccucgacggcaagaacugcacccucaucgacgcccuccucggcgacccccacugcgacggcuuccagaacaaggagugggaccucuucgucgagcgcuccaaggccuacuccaacugcuaccccuacgacguccccgacuacgccucccuccgcucccucgucgccuccuccggcacccucgaguucaucaacgaggacuucaacuggaccggcgucgcccaguccggcggcuccuacgccugcaagcgcggcuccgucaacuccuucuucucccgccucaacuggcuccacgaguccgaguacaaguaccccgcccucaacgucaccaugcccaacaacggcaaguucgacaagcucuacgucuggggcguccaccaccccaucaccgaccgcgagcagaccaagcucuacguccgcgccuccggccgcgucaccgucuccaccaagcgcucccagcagaccgucauccccaacaucggcucccgccccuggguccgcggccucuccucccgcaucuccaucuacuggaccaucgucaagcccggcgacauccuccucaucaacuccaccggcaaccucaucgccccccgcggcuacuucaagauccgcaccggcaaguccuccaucaugcgcuccgacgcccccaucggcaccugcuccuccgagugcaucacccccaacggcuccauccccaacgacaagcccuuccagaacgucaaccgcaucaccuacggcgccugcccccgcuacgucaagcagaacacccucaagcucgccaccggcaugcgcaacguccccgagaagcagacccgcggcaucuucggcgccaucgccggcuucaucgagaacggcugggagggcauggucgacggcugguacggcuuccgccaccagaacuccgagggcaccggccaggccgccgaccucaaguccacccaggccgccaucgaccagaucaacggcaagcucaaccgccucaucgagaagaccaacgagaaguuccaccagaucgagaaggaguucuccgaggucgagggccgcauccaggaccucgagaaguacgucgaggacaccaagaucgaccucugguccuacaacgccgagcuccucgucgcccucgagaaccagcacaccaucgaccucaccgacuccgagaugaacaagcucuucgagaagacccgcaagcagcuccgcgagaacgccgaggacaugggcaacggcugcuucaagaucuaccacaagugcgacaacgccugcaucggcuccauccgcaacggcaccuacgaccacgacgucuaccgcgacgaggcccucaacaaccgcuuccagaucaagggcgucgagcucaaguccggcuacaaggacuggauccucuggaucuccuucgccaucuccugcuuccuccucugcgucguccuccucggcuucaucaugugggccugccagaagggcaacauccgcugcaacaucugcaucuga

SEQ ID NO: 96391 - RNA, 1707 nt, Artificial Sequence
  derived and/or modified CDS sequence (opt2) from hemagglutinin__InfluenzaA__ABA54915
auggagaaggucguccuccuccucgccaccgccucccucgucaaguccgaccagaucugcaucggcuaccacgccaacaacuccaccgagcaggucgacaccaucauggagaagaacgucaccgucacccacgcccaggacauccucgagaagacccacaacggcaagcucugcgaccucgacggcgucaagccccucauccuccgcgacugcuccgucgccggcuggcuccucggcaaccccaugugcgacgaguucaucaacguccccgagugguccuacaucgucgagaaggccucccccgccaacgaccucugcuaccccggcgacuucaacgacuacgaggagcucaagcaccuccucucccgcaucaaccacuucgagaagauccagaucauccccaaguccuccugguccaaccacgaggccuccuccggcgucuccgccgccugccccuaccacggcaagcccuccuucuuccgcaacgucgucuggcucaucaagaagaacuccgccuaccccaccaucaagcgcuccuacaacaacaccaaccaggaggaccuccucguccucuggggcauccaccaccccaacgacgccgccgagcagaccaagcucuaccagaaccccaccaccuacaucuccgucggcaccuccacccucaaccagcgccucguccccaagaucgccacccgcuccaaggucaacggccaguccggccgcauggaguucuucuggaccauccucaagcccaacgacgccaucaacuucgaguccaacggcaacuucaucgcccccgaguacgccuacaagaucgucaagaagggcgacuccgccaucaugaaguccgagcucgaguacggcaacugcaacaccaagugccagacccccaugggcgccaucaacuccuccaugcccuuccacaacauccacccccucaccaucggcgagugccccaaguacgucaaguccaaccgccucguccucgccaccggccuccgcaacaccccccagcgcgagcgccgccgcaagaagcgcggccucuucggcgccaucgccggcuucaucgagggcggcuggcagggcauggucgacggcugguacggcuaccaccacuccaacgagcagggcuccggcuacgccgccgacaaggaguccacccagaaggccaucgacggcgucaccaacaaggucaacuccaucaucgacaagaugaacacccaguucgaggccgucggccgcgaguucaacaaccucgagcgccgcaucgagaaccucaacaagaagauggaggacggcuuccucgacgucuggaccuacaacgccgagcuccucguccucauggagaacgagcgcacccucgacuuccacgacuccaacgucaagaaccucuacaacaagguccgccuccagcuccgcgacaacgccaaggagcucggcaacggcugcuucgaguucuaccacaagugcgacaacgagugcauggaguccgucaagaacggcaccuacgacuacccccaguacuccgaggaggcccgccucaaccgcgaggagaucuccggcgucaagcucgaguccaugggcaccuaccagauccucuccaucuacuccaccgucgccuccucccucgcccucgccaucauggucgccggccucucccucuggaugugcuccaacggcucccuccagugccgcaucugcaucuga

SEQ ID NO: 96392 - RNA, 1698 nt, Artificial Sequence
  derived and/or modified CDS sequence (opt2) from hemagglutinin__InfluenzaA__ABA87080
augaaggucaagcuccucguccuccucugcaccuucaccgccaccuacgccgacaccaucugcaucggcuaccacgccaacaacuccaccgacaccgucgacaccguccucgagaagaacgucaccgucacccacuccgucaaccuccucgaggacucccacaacggcaagcucugccuccucaagggcaucgccccccuccagcucggcaacugcuccgucgccggcuggauccucggcaaccccgagugcgagcuccucaucuccaaggaguccugguccuacaucaucgagacccccaaccccgagaacggcaccugcuaccccggcuacuucgccgacuacgaggagcuccgcgagcagcucuccuccgucuccuccuucgagcgcuucgagaucuuccccaaggaguccuccuggcccaaccacaccgucaccggcgucuccgccuccugcucccacaacggcaaguccuccuucuaccgcaaccuccucuggcucaccggcaagaacggccucuaccccaaccucuccaaguccuacgccaacaacaaggagaaggagguccucguccucuggggcguccaccacccccccaacaugggcgaccagcgcgcccucuaccacaccgagaacgccuacgucuccgucgucuccucccacuacucccgccgcuucacccccgagaucgccaagcgccccaagguccgcgaccaggagggccgcaucaacuacuacuggacccuccucgagcccggcgacaccaucaucuucgaggccaacggcaaccucaucgccccccgcuacgccuucgcccucucccgcggcuucggcuccggcaucaucaccuccaacgcccccauggacgagugcgacgccaagugccagaccccccagggcgccaucaacuccucccuccccuuccagaacguccaccccgucaccaucggcgagugccccaaguacguccgcuccgccaagcuccgcauggucaccggccuccgcaacauccccuccauccagucccgcggccucuucggcgccaucgccggcuucaucgagggcggcuggaccggcauggucgacggcugguacggcuaccaccaccagaacgagcagggcuccggcuacgccgccgaccagaaguccacccagaacgccaucaacggcaucaccaacaaggucaacuccgucaucgagaagaugaacacccaguucaccgccgucggcaaggaguucaacaagcucgagcgccgcauggagaaccucaacaagaaggucgacgacggcuuccucgacaucuggaccuacaacgccgagcuccucguccuccucgagaacgagcgcacccucgacuuccacgacuccaacgucaagaaccucuacgagaaggucaagucccagcucaagaacaacgccaaggagaucggcaacggcugcuucgaguucuaccacaagugcaacgacgagugcauggaguccgucaagaacggcaccuacgacuaccccaaguacuccgaggaguccaagcucaaccgcgagaagaucgacggcgucaagcucgaguccaugggcgucuaccagauccucgccaucuacuccaccgucgccuccucccucguccuccucgucucccucggcgccaucuccuucuggaugugcuccaacggcucccuccagugccgcaucugcaucuga

SEQ ID NO: 96393 - RNA, 1698 nt, Artificial Sequence; identical to SEQ ID NO: 96332
  derived and/or modified CDS sequence (opt2) from hemagglutinin__InfluenzaA__ABA87091

SEQ ID NO: 96394 - RNA, 1698 nt, Artificial Sequence; identical to SEQ ID NO: 96332
  derived and/or modified CDS sequence (opt2) from hemagglutinin__InfluenzaA__ABA87231

SEQ ID NO: 96395 - RNA, 1701 nt, Artificial Sequence; identical to SEQ ID NO: 96291
  derived and/or modified CDS sequence (opt2) from hemagglutinin__InfluenzaA__ABA87242

SEQ ID NO: 96396 - RNA, 1701 nt, Artificial Sequence; identical to SEQ ID NO: 96292
  derived and/or modified CDS sequence (opt2) from hemagglutinin__InfluenzaA__ABA87253

SEQ ID NO: 96397 - RNA, 1698 nt, Artificial Sequence
  derived and/or modified CDS sequence (opt2) from hemagglutinin__InfluenzaA__ABB02781
augaaggucaagcuccucauccuccucugcaccuucaccgccaccuacgccgacaccaucugcaucggcuaccacgccaacaacuccaccgacaccgucgacaccguccucgagaagaacgucaccgucacccacuccgucaaccuccucgaggacucccacaacggcaagcucugccuccucaagggcaucgccccccuccagcucggcaacugcuccgucgccggcuggauccucggcaaccccgagugcgagcuccucaucuccaaggaguccugguccuacaucgucgagacccccaaccccgagaacggcgccugcuaccccggcuacuucgccgacuacgaggagcuccgcgagcagcucuccuccgucuccuccuucgagcgcuucgagaucuuccccaaggaguccuccuggcccaaccacaccgucaccggcgucuccgccuccugcucccacaacggcaaguccuccuucuaccgcaaccuccucuggcucaccggcaagaacggccucuaccccaaccucuccaaguccuacgccaacaacaaggagaaggagguccucauccucuggggcguccaccacccccccaacaucggcgaccagcgcacccucuaccacaccgagaacgccuacgucuccgucgucuccucccacuacucccgccgcuucacccccgagaucaccaagcgccccaagguccgcgaccaggagggccgcaucaacuacuacuggacccuccucgagcccggcgacaccaucaucuucgaggccaacggcaaccucaucgcccccugguacgccuucgcccucucccgcggcuucggcuccggcaucaucaccuccaacgcccccauggacgagugcgacgccaagugccagaccccccagggcgccaucaacuccucccuccccuuccagaacguccaccccgucaccaucggcgagugccccaaguacguccgcuccgccaagcuccgcauggucaccggccuccgcaacauccccuccauccagucccgcggccucuucggcgccaucgccggcuucaucgagggcggcuggaccggcauggucgacggcugguacggcuaccaccaccagaacgagcagggcuccggcuacgccgccgaccagaaguccacccagaacgccaucaacggcaucaccaacaaggucaacuccgucaucgagaagaugaacacccaguucaccgccgucggcaaggaguucaacaagcucgagcgccgcauggagaaccucaacaagaaggucgacgacggcuuccucgacaucuggaccuacaacgccgagcuccucguccuccucgagaacgagcgcacccucgacuuccacgacuccaacgucaagaaccucuacgagaaggucaagucccagcucaagaacaacgccaaggagaucggcaacggcugcuucgaguucuaccacaagugcaacaacgagugcauggaguccgucaagaacggcaccuacgacuaccccaaguacuccgaggaguccaagcucaaccgcgagaagaucgacggcgucaagcucgacuccaugggcgucuaccagauccucgccaucuacuccaccgucgccuccucccucguccuccucgucucccucggcgccaucuccuucuggaugugcuccaacggcucccuccagugccgcgucugcaucuga

SEQ ID NO: 96398 - RNA, 1698 nt, Artificial Sequence; identical to SEQ ID NO: 96337
  derived and/or modified CDS sequence (opt2) from hemagglutinin__InfluenzaA__ABB02792

SEQ ID NO: 96399 - RNA, 1698 nt, Artificial Sequence; identical to SEQ ID NO: 96335
  derived and/or modified CDS sequence (opt2) from hemagglutinin__InfluenzaA__ABB02803

SEQ ID NO: 96400 - RNA, 1698 nt, Artificial Sequence
  derived and/or modified CDS sequence (opt2) from hemagglutinin__InfluenzaA__ABB02814
augaaggccaagcuccucguccuccucugcaccuucaccgccaccuacgccgacaccaucugcaucggcuaccacgccaacaacuccaccgacaccgucgacaccguccucgagaagaacgucaccgucacccacuccgucaaccuccucgaggacucccacaacggcaagcucugccuccucaagggcaucgccccccuccagcucggcaacugcuccgucgccggcuggauccucggcaaccccgagugcgagcuccucaucuccaaggaguccugguccuacaucgucgagacccccaaccccgagaacggcaccugcuaccccggcuacuucgccgacuacgaggagcuccgcgagcagcucuccuccgucuccuccuucgagcgcuucgagaucuuccccaagggcuccuccuggcccaaccacaccgucaccggcgucuccgccuccugcucccacaacggcaaguccuccuucuaccgcaaccuccucuggcucaccggcaagaacggccucuaccccaaccucuccauguccuacgucaacaacaaggagaaggagguccucguccucuggggcguccaccacccccccaacaucggcgaccagcgcgcccucuaccacaccgagaacgccuacgucuccgucgucuccucccacuacucccgccgcuucacccccgagaucgccaagcgccccaagguccgcgaccaggagggccgcaucaacuacuacuggacccuccucgagcccggcgacaccaucaucuucgaggccaacggcaaccucaucgcccccugguacgccuucgcccucucccgcggcuucggcuccggcaucaucaccuccaacgcccccauggacgagugcgacgccaagugccagaccccccagggcgccaucaacuccucccuccccuuccagaacguccaccccgucaccaucggcgagugccccaaguacguccgcuccgccaagcuccgcauggucaccggccuccgcaacauccccuccauccagucccgcggccucuucggcgccaucgccggcuucaucgagggcggcuggaccggcauggucgacggcugguacggcuaccaccaccagaacgagcagggcuccggcuacgccgccgaccagaaguccacccagaacgccaucaacggcaucaccaacaaggucaacuccgucaucgagaagaugaacacccaguucaccgccgucggcaaggaguucaacaagcucgagcgccgcauggagaaccucaacaagaaggucgacgacggcuuccucgacaucuggaccuacaacgccgagcuccucguccuccucgagaacgagcgcacccucgacuuccacgacuccaacgucaagaaccucuacgagaaggucaagucccagcucaagaacaacgccaaggagaucggcaacggcugcuucgaguucuaccacaagugcgacaacgagugcauggaguccgucaagaacggcaccuacgacuaccccaaguacuccgaggaguccaagcucaaccgcgagaagaucgacggcgucaagcucgaguccaugggcgucuaccagauccucgccaucuacuccaccgucgccuccucccucguccuccucgucucccucggcgccaucuccuucuggaugugcuccaacggcucccuccagugccgcaucugcaucuga

SEQ ID NO: 96401 - RNA, 1698 nt, Artificial Sequence
  derived and/or modified CDS sequence (opt2) from hemagglutinin__InfluenzaA__ABB02825
augaaggccaagcuccucguccuccucugcaccuucaccgccaccuacgccgacaccaucugcaucggcuaccacgccaacaacuccaccgacaccgucgacaccguccucgagaagaacgucaccgucacccacuccgucaaccuccucgaggacucccacaacggcaagcucugccuccucaagggcaucgccccccuccagcucggcaacugcuccgucgccggcuggauccucggcaaccccgagugcgagcuccucaucuccaaggaguccugguccuacaucgucgagacccccaaccccgagaacggcaccugcuaccccggcuacuucgccgacuacgaggagcuccgcgagcagcucuccuccgucuccuccuucgagcgcuucgagaucuuccccaagggcuccuccuggcccaaccacaccgucaccggcgucuccgccuccugcucccacaacggcaaguccuccuucuaccgcaaccuccucuggcucaccggcaagaacggccucuaccccaaccucuccauguccuacgucaacaacaaggagaaggagguccucguccucuggggcguccaccacccccccaacaucggcgaccagcgcgcccucuaccacaccgagaacgccuacgucuccgucgucuccucccacuacucccgccgcuucacccccgagaucgccaagcgccccaagguccgcgaccaggagggccgcaucaacuacuacuggacccuccucgagcccggcgacaccaucaucuucgaggccaacggcaaccucaucgcccccugguacgccuucgcccucucccgcggcuucggcuccggcaucaucaccuccaacgcccccauggacgagugcgacgccaagugccagaccccccagggcgccaucaacuccucccuccccuuccagaacguccaccccgucaccaucggcgagugccccaaguacguccgcuccgccaagcuccgcauggucaccggccuccgcaacauccccuccauccagucccgcggccucuucggcgccaucgccggcuucaucgagggcggcuggaccggcauggucgacggcugguacggcuaccaccaccagaacgagcagggcuccggcuacgccgccgaccagaaguccacccagaacgccaucaacggcaucaccaacaaggucaacuccgucaucgagaagaugaacacccaguucaccgccgucggcaaggaguucaacaagcucgagcgccgcauggagaaccucaacaagaaggucgacgacggcuuccucgacaucuggaccuacaacgccgagcuccucguccuccucgagaacgagcgcacccucgacuuccacgacuccaacgucaagaaccucuacgagaaggucaagucccagcucaagaacaacgccaaggagaucggcaacggcugcuucgaguucuaccacaagugcgacaacgagugcauggaguccgucaagaacggcaccuacgacuaccccaaguacuccgaggaguccaagcucaaccgcgagcgcaucgacggcgucaagcucgaguccaugggcgucuaccagauccucgccaucuacuccaccgucgccuccucccucguccuccucgucucccucggcgccaucuccuucuggaugugcuccaacggcucccuccagugccgcaucugcaucuga

SEQ ID NO: 96402 - RNA, 1701 nt, Artificial Sequence
  derived and/or modified CDS sequence (opt2) from hemagglutinin__InfluenzaA__ABB02836
augaagaccaucaucgcccucuccuacauccucugccucgucuucgcccagaagcuccccggcaacgacaacuccaccgccacccucugccucggccaccacgccguccccaacggcaccaucgucaagaccaucaccaacgaccagaucgaggucaccaacgccaccgagcucguccaguccuccuccaccggcggcaucugcgacuccccccaccagauccucgacggcgagaacugcacccucaucgacgcccuccucggcgacccccagugcgacggcuuccagaacaagaagugggaccucuucgucgagcgcuccaaggccuacuccaacugcuaccccuacgacguccccgacuacgccucccuccgcucccucgucgccuccuccggcacccucgaguucaacaacgaguccuucaacuggaccggcgucacccagaacggcaccuccuccgccugcaagcgccgcuccaacaacuccuucuucucccgccucaacuggcucacccaccucaaguucaaguaccccgcccucaacgucaccaugcccaacaacgagaaguucgacaagcucuacaucuggggcguccaccaccccggcaccgacaacgaccagaucucccucuacgcccaggccuccggccgcaucaccgucuccaccaagcgcaaccagcagaccgucauccccaacaucggcucccgcccccgcguccgcgacauccccucccgcaucuccaucuacuggaccaucgucaagcccggcgacauccuccucaucaacuccaccggcaaccucaucgccccccgcggcuacuucaagauccgcuccggcaaguccuccaucaugcgcuccgacgcccccaucggcaagugcaaguccgagugcaucacccccaacggcuccauccccaacgacaagcccuuccagaacgucaaccgcaucaccuacggcgccugcccccgcuacgucaagcagaacacccucaagcucgccaccggcaugcgcaacguccccgagaagcagacccgcggcaucuucggcgccaucgccggcuucaucgagaacggcugggagggcauggucgacggcugguacggcuuccgccaccagaacuccgagggcaucggccaggccgccgaccucaaguccacccaggccgccaucaaccagaucaacggcaagcucaaccgccucaucggcaagaccaacgagaaguuccaccagaucgagaaggaguucuccgaggucgagggccgcauccaggaccucgagaaguacgucgaggacaccaagaucgaccucugguccuacaacgccgagcuccucgucgcccucgagaaccagcacaccaucgaccucaccgacuccgagaugaacaagcucuucgagcgcaccaagaagcagcuccgcgagaacgccgaggacaugggcaacggcugcuucaagaucuaccacaagugcgacaacgccugcaucggcuccauccgcaacggcaccuacgaccacgacgucuaccgcgacgaggcccucaacaaccgcuuccagaucaagggcgucgagcucaaguccggcuacaaggacuggauccucuggaucuccuucgccaucuccugcuuccuccucugcgucgcccuccucggcuucaucaugugggccugccagaagggcaacauccgcugcaacaucugcaucuga

SEQ ID NO: 96403 - RNA, 1701 nt, Artificial Sequence
  derived and/or modified CDS sequence (opt2) from hemagglutinin__InfluenzaA__ABB02847
augaagaccaucaucgcccucuccuacauccucugccucgucuucgcccagaagcuccccggcaacgacaacuccaccgccacccucugccucggccaccacgccguccccaacggcaccaucgucaagaccaucaccaacgaccagaucgaggucaccaacgccaccgagcucguccaguccuccuccaccggcggcaucugcgacuccccccaccagauccucgacggcgagaacugcacccucaucgacgcccuccucggcgacccccagugcgacggcuuccagaacaagaagugggaccucuucgucgagcgcuccaaggccuacuccaacugcuaccccuacgacguccccgacuacgccucccuccgcucccucgucgccuccuccggcacccucgaguucaacaacgaguccuucaacuggaucggcgucacccagaacggcaccuccuccgccugcaagcgccgcuccaacaacuccuucuucucccgccucaacuggcucacccaccucaaguucaaguaccccgcccucaacgucaccaugcccaacaacgagaaguucgacaagcucuacaucuggggcguccaccaccccggcaccgacaacgaccagaucucccucuacgcccaggccuccggccgcaucaccgucuccaccaagcgcucccagcagaccgucauccccaacaucggcucccgcccccgcguccgcgacauccccucccgcaucuccaucuacuggaccaucgucaagcccggcgacauccuccucaucaacuccaccggcaaccucaucgccccccgcggcuacuucaagauccgcuccggcaaguccuccaucaugcgcuccgacgcccccaucggcaagugcaacuccgagugcaucacccccaacggcuccauccccaacgacaagcccuuccagaacgucaaccgcaucaccuacggcgccugcccccgcuacgucaagcagaacacccucaagcucgccaccggcaugcgcaacguccccgagaagcagacccgcggcaucuucggcgccaucgccggcuucaucgagaacggcugggagggcauggucgacggcugguacggcuuccgccaccagaacuccgagggcaucggccaggccgccgaccucaaguccacccaggccgccaucaaccagaucaacggcaagcucaaccgccucaucggcaagaccaacgagaaguuccaccagaucgagaaggaguucuccgaggucgagggccgcauccaggaccucgagaaguacgucgaggacaccaagaucgaccucugguccuacaacgccgagcuccucgucgcccucgagaaccagcacaccaucgaccucaccgacuccgagaugaacaagcucuucgagcgcaccaagaagcagcuccgcgagaacgccgaggacaugggcaacggcugcuucaagaucuaccacaagugcgacaacgccugcaucggcuccauccgcaacggcaccuacgaccacgacgucuaccgcgacgaggcccucaacaaccgcuuccagaucaagggcgucgagcucaaguccggcuacaaggacuggauccucuggaucuccuucgccaucuccugcuuccuccucugcgucguccuccucggcuucaucaugugggccugccagaagggcaacauccgcugcaacaucugcaucuga

SEQ ID NO: 96404 - RNA, 1701 nt, Artificial Sequence; identical to SEQ ID NO: 96083
  derived and/or modified CDS sequence (opt2) from hemagglutinin__InfluenzaA__ABB02858

SEQ ID NO: 96405 - RNA, 1701 nt, Artificial Sequence
  derived and/or modified CDS sequence (opt2) from hemagglutinin__InfluenzaA__ABB02869
augaagaccaucaucgcccucuccuacauccucugccucgucuucgcccagaagcuccccgucaacgacaacuccaccgccacccucugccucggccaccacgccguccccaacggcacccucgucaagaccaucaccaacgaccacaucgaggucaccaacgccaccgagcucguccaguccuccuccaccggccgcaucugcgacuccccccaccagauccucgacggcgagaacugcacccucaucgacgcccuccucggcgacccccacugcgacggcuuccagaacaaggagugggaccucuucgucgagcgcuccaccgccuacuccaacugcuaccccuacgacguccccgacuacgccucccuccgcucccucgucgccuccuccggcacccucgaguucaacaacgaguccuucaacuggaccggcgucgcccagaacggcaccuccuccgccugcaagcgccgcuccaucaaguccuucuucucccgccucaacuggcuccaccagcucaaguacaaguaccccgcccucaacgucaccaugcccaacaacgagaaguucgacaagcucuacaucuggggcguccaccaccccuccaccgacuccgaccagaucucccucuacgcccaggccuccggccgcgucaccgucuccaccaagcgcucccagcagaccgucauccccaacaucggcucccgccccuggguccgcggcgucuccucccgcaucuccaucuacuggaccaucgucaagcccggcgacauccuccucaucaacuccaccggcaaccucaucgccccccgcggcuacuucaagauccgcuccggcaaguccuccaucaugcgcuccaacgcccccaucggcaagugcaacuccgagugcaucacccccaacggcuccauccccaacgacaagcccuuccagaacgucaaccgcaucaccuacggcgccugcccccgcuacgucaagcagaacacccucaagcucgccaccggcaugcgcaacguccccgagaagcagacccgcggcaucuucggcgccaucgccggcuucgucgagaacggcugggagggcauggucgacggcugguacggcuuccgccaccagaacuccgagggcaccggccaggccgccgaccucaaguccacccaggccgccaucaaccagaucaacggcaagcucaaccgccucaucgagaagaccaacgagaaguuccaccagaucgagaaggaguucuccgaggucgagggccgcauccaggaccucgagaaguacgucgaggacaccaagaucgaccucugguccuacaacgccgagcuccucgucgcccucgagaaccagcacaccaucgaccucaccgacuccgagaugaacaagcucuucgagcgcacccgcaagcagcuccgcgagaacgccgaggacaugggcaacggcugcuucaagaucuaccacaagugcgacaacgccugcaucggcuccauccgcaacggcaccuacgaccacgacgucuaccgcgacgaggcccucaacaaccgcuuccagaucaagggcgucgagcucaaguccggcuacaaggacuggauccucuggaucuccuucgccaucuccugcuuccuccucugcgucguccuccucggcuucaucaugugggccugccagaagggcaacauccgcugcaacaucugcaucuga

SEQ ID NO: 96406 - RNA, 1701 nt, Artificial Sequence
  derived and/or modified CDS sequence (opt2) from hemagglutinin__InfluenzaA__ABB02880
augaagaccaucaucgcccucuccuacauccucugccucgucuucgcccagaagcuccccgucaacgacaacuccaccgccacccucugccucggccaccacgccguccccaacggcacccucgucaagaccaucaccaacgaccacaucgaggucaccaacgccaccgagcucguccaguccuccuccaccggccgcaucugcgacuccccccaccagauccucgacggcgagaacugcacccucaucgacgcccuccucggcgacccccacugcgacggcuuccagaacaaggagugggaccucuucgucgagcgcuccaccgccuacuccaacugcuaccccuacgacguccccgacuacgccucccuccgcucccucgucgccuccuccggcacccucgaguucaacaacgaguccuucaacuggaccggcgucgcccagaacggcaccuccuccgccugcaagcgccgcuccaucaaguccuucuucucccgccucaacuggcuccaccagcucaaguacaaguaccccgcccucaacgucaccaugcccaacaacgagaaguucgacaagcucuacaucuggggcguccaccaccccuccaccgacuccgaccagaucucccucuacgcccaggccuccggccgcgucaccgucuccaccaagcgcucccagcagaccgucauccccaacaucggcucccgccccuggguccgcggcgucuccucccgcaucuccaucuacuggaccaucgucaagcccggcgacauccuccucaucaacuccaccggcaaccucaucgccccccgcggcuacuucaagauccgcuccggcaaguccuccaucaugcgcuccaacgcccccaucggcaagugcaacuccgagugcaucacccccaacggcuccauccccaacgacaagcccuuccagaacgucaaccgcaucaccuacggcgccugcccccgcuacgucaagcagaacacccucaagcucgccaccggcaugcgcaacguccccgagaagcagacccgcggcaucuucggcgccaucgccggcuucaucgagaacggcugggagggcauggucgacggcugguacggcuuccgccaccagaacuccgagggcaccggccaggccgccgaccucaaguccacccaggccgccaucaaccagaucaaccgcaagcucaaccgccucaucgagaagaccaacgagaaguuccaccagaucgagaaggaguucuccgaggucgagggccgcauccaggaccucgagaaguacgucgaggacaccaagaucgaccucugguccuacaacgccgagcuccucgucgcccucgagaaccagcacaccaucgaccucaccgacuccgagaugaacaagcucuucgagcgcacccgcaagcagcuccgcgagaacgccgaggacaugggcaacggcugcuucaagaucuaccacaagugcgacaacgccugcaucggcuccauccgcaacggcaccuacgaccacgacgucuaccgcgacgaggcccucaacaaccgcuuccagaucaagggcgucgagcucaaguccggcuacaaggacuggauccucuggaucuccuucgccaucuccugcuuccuccucugcgucguccuccucggcuucaucaugugggccugccagaagggcaacauccgcugcaacaucugcaucuga

SEQ ID NO: 96407 - RNA, 1701 nt, Artificial Sequence
  derived and/or modified CDS sequence (opt2) from hemagglutinin__InfluenzaA__ABB02891
augaagaccaucaucgcccucuccuacauccucugccucgucuucgcccagaagcuccccgucaacgacaacuccaccgccacccucugccucggccaccacgccguccccaacggcacccucgucaagaccaucaccaacgaccacaucgaggucaccaacgccaccgagcucguccaguccuccuccaccggccgcaucugcgacuccccccaccagauccucgacggcgagaacugcacccucaucgacgcccuccucggcgacccccacugcgacggcuuccagaacaaggagugggaccucuucgucgagcgcuccaccgccuacuccaacugcuaccccuacgacguccccgacuacgccucccuccgcucccucgucgccuccuccggcacccucgaguucaacaacgaguccuucaacuggaccggcgucgcccagaacggcaccuccuccgccugcaagcgccgcuccaucaaguccuucuucucccgccucaacuggcuccaccagcucaaguacaaguaccccgcccucaacgucaccaugcccaacaacgagaaguucgacaagcucuacaucuggggcguccaccaccccuccaccgacuccgaccagaucucccucuacgcccaggccuccggccgcgucaccgucuccaccaagcgcucccagcagaccgucauccccaacaucggcucccgccccuggguccgcggcgucuccuccaucaucuccaucuacuggaccaucgucaagcccggcgacauccuccucaucaacuccaccggcaaccucaucgccccccgcggcuacuucaagauccgcuccggcaaguccuccaucaugcgcuccaacgcccccaucggcgagugcaacuccgagugcaucacccccaacggcuccauccccaacgacaagcccuuccagaacgucaaccgcaucaccuacggcgccugcccccgcuacgucaagcagaacacccucaagcucgccaccggcaugcgcaacguccccgagaagcagacccgcggcaucuucggcgccaucgccggcuucaucgagaacggcugggagggcauggucgacggcugguacggcuuccgccaccagaacuccgagggcaccggccaggccgccgaccucaaguccacccaggccgccaucaaccagaucaacggcaagcucaaccgccucaucgagaagaccaacgagaaguuccaccagaucgagaaggaguucuccgaggucgagggccgcauccaggaccucgagaaguacgucgaggacaccaagaucgaccucugguccuacaacgccgagcuccucgucgcccucgagaaccagcacaccaucgaccucaccgacuccgagaugaacaagcucuucgagcgcacccgcaagcagcuccgcgagaacgccgaggacaugggcaacggcugcuucaagaucuaccacaagugcgacaacgccugcaucggcuccauccgcaacggcaccuacgaccacgacgucuaccgcgacgaggcccucaacaaccgcuuccagaucaagggcgucgagcucaaguccggcuacaaggacuggauccucuggaucuccuucgccaucuccugcuuccuccucugcgucguccuccucggcuucaucaugugggccugccagaagggcaacauccgcugcaacaucugcaucuga

SEQ ID NO: 96408 - RNA, 1701 nt, Artificial Sequence
  derived and/or modified CDS sequence (opt2) from hemagglutinin__InfluenzaA__ABB02902
augaagaccaucaucgcccucuccuacauccucugccucgucuucgcccagaagcuccccgucaacgacaacuccaccgccacccucugccucggccaccacgccguccccaacggcacccucgucaagaccaucaccaacgaccacaucgaggucaccaacgccaccgagcucguccaguccuccuccaccggccgcaucugcgacuccccccaccagauccucgacggcgagaacugcacccucaucgacgcccuccucggcgacccccacugcgacggcuuccagaacaaggagugggaccucuucgucgagcgcuccaccgccuacuccaacugcuaccccuacgacguccccgacuacgccucccuccgcucccucgucgccuccuccggcacccucgaguucaacaacgaguccuucaacuggaccggcgucgcccagaacggcaccuccuccgccugcaagcgccgcuccaucaaguccuucuucucccgccucaacuggcuccaccagcucaaguacaaguaccccgcccucaacgucaccaugcccaacaacgagaaguucgacaagcucuacaucuggggcguccaccaccccuccaccgacuccgaccagaucucccucuacgcccaggccuccggccgcgucaccgucuccaccaagcgcucccagcagaccgucauccccaacaucggcucccgccccuggguccgcggcgucuccucccgcaucuccaucuacuggaccaucgucaagcccggcgacauccuccucaucaacuccaccggcaaccucaucgccccccgcggcuacuucaagauccgcuccggcaaguccuccaucaugcgcuccaacgcccccaucggcaagugcaacuccgagugcaucacccccaacggcuccauccccaacgacaagcccuuccagaacgucaaccgcaucaccuacggcgccugcccccgcuacgucaagcagaacacccucaagcucgccaccggcaugcgcaacguccccgagaagcagacccgcggcaucuucggcgccaucgccggcuucaucgagaacggcugggagggcaugauggacggcugguacggcuuccgccaccagaacuccgagggcaccggccaggccgccgaccucaaguccacccaggccgccaucaaccagaucaacggcaagcucaaccgccucaucgagaagaccaacgagaaguuccaccagaucgagaaggaguucuccgaggucgagggccgcauccaggaccucgagaaguacgucgaggacaccaagaucgaccucugguccuacaacgccgagcuccucgucgcccucgagaaccagcacaccaucgaccucaccgacuccgagaugaacaagcucuucgagcgcacccgcaagcagcuccgcgagaacgccgaggacaugggcaacggcugcuucaagaucuaccacaagugcgacaacgccugcaucggcuccauccgcaacggcaccuacgaccacgacgucuaccgcgacgaggcccucaacaaccgcuuccagaucaagggcgucgagcucaaguccggcuacaaggacuggauccucuggaucuccuucgccaucuccugcuuccuccucugcgucguccuccucggcuucaucaugugggccugccagaagggcaacauccgcugcaacaucugcaucuga

SEQ ID NO: 96409 - RNA, 1698 nt, Artificial Sequence
  derived and/or modified CDS sequence (opt2) from hemagglutinin__InfluenzaA__ABB02913
augaaggccaagcuccucguccuccucugcaccuucaccgccaccuacgccgacaccaucugcaucggcuaccacgccaacaacuccaccgacaccgucgacaccguccucgagaagaacgucaccgucacccacuccgucaaccuccucgaggacucccacaacggcaagcucugccuccucaagggcaucgccccccuccagcucggcaacugcuccgucgccggcuggauccucggcaaccccgagugcgagcuccucaucuccaaggaguccugguccuacaucgucgagacccccaaccccgagaacggcaccugcuaccccggcuacuucgccgacuacgaggagcuccgcgagcagcucuccuccgucuccuccuucgagcgcuucgagaucuuccccaagggcuccuccuggcccaaccacaccgucaccggcgucuccgccuccugcucccacaacggcaaguccuccuucuaccgcaaccuccucuggcucaccggcaagaacggccucuaccccaaccucuccauguccuacgucaacaacaaggagaaggagguccucguccucuggggcguccaccgcccccccaacaucggcgaccagcgcgcccucuaccacaccgagaacgccuacgucuccgucgucuccucccacuacucccgccgcuucacccccgagaucgccaagcgccccaagguccgcgaccaggagggccgcaucaacuacuacuggacccuccucgagcccggcgacaccaucaucuucgaggccaacggcaaccucaucgcccccugguacgccuucgcccucucccgcggcuucggcuccggcaucaucaccuccaacgcccccauggacgagugcgacgccaagugccagaccccccagggcgccaucaacuccucccuccccuuccagaacguccaccccgucaccaucggcgagugccccaaguacguccgcuccgccaagcuccgcauggucaccggccuccgcaacauccccuccauccagucccgcggccucuucggcgccaucgccggcuucaucgagggcggcuggaccggcauggucgacggcugguacggcuaccaccaccagaacgagcagggcuccggcuacgccgccgaccagaaguccacccagaacgccaucaaccgcaucaccaacaaggucaacuccgucaucgagaagaugaacacccaguucaccgccgucggcaaggaguucaacaagcucgagcgccgcauggagaaccucaacaagaaggucgacgacggcuuccucgacaucuggaccuacaacgccgagcuccucguccuccucgagaacgagcgcacccucgacuuccacgacuccaacgucaagaaccucuacgagaaggucaagucccagcucaagaacaacgccaaggagaucggcaacggcugcuucgaguucuaccacaagugcaacaacgagugcauggaguccgucaagaacggcaccuacgacuaccccaaguacuccgaggaguccaagcucaaccgcgagaagaucgacggcgucaagcucgaguccaugggcgucuaccagauccucgccaucuacuccaccgucgccuccucccucguccuccucgucucccucggcgccaucuccuucuggaugugcuccaacggcucccuccagugccgcaucugcaucuga

SEQ ID NO: 96410 - RNA, 1698 nt, Artificial Sequence
  derived and/or modified CDS sequence (opt2) from hemagglutinin__InfluenzaA__ABB02924
augaaggucaagcuccucguccuccucugcaccuucaccgccaccuacgccgacaccaucugcaucggcuaccacgccaacaacuccaccgacaccgucgacaccguccucgagaagaacgucaccgucacccacuccgucaaccuccucgaggacucccacaacggcaagcucugccuccucaagggcaucgccccccuccagcucggcaacugcuccgucgccggcuggauccucggcaaccccgagugcgagcuccucaucuccaaggaguccugguccuacaucgucgagacccccaaccccgagaacggcaccugcuaccccggcuacuucgccgacuacgaggagcuccgcgagcagcucuccuccgucuccuccuucgagcgcuucgagaucuuccccaaggaguccuccuggcccaaccacaccgucaccggcgucuccgccuccugcucccacaacggcaaguccuccuucuaccgcaaccuccucuggcucaccggcaagaacggccucuaccccaaccucuccaaguccuacgccaacaacaaggagaaggagguccucguccucuggggcguccaccacccccccaacaucggcgaccagcgcgcccucuaccacaccgagaacgccuacgucuccgucgucuccucccacuacucccgccgcuucacccccgagaucgccaagcgccccaagguccgcgaccaggagggccgcaucaacuacuacuggacccuccucgagcccggcgacaccaucaucuucgaggccaacggcaaccucaucgccccccgcuacgccuucgcccucucccgcggcuucggcuccggcaucaucaccuccaacgcccccauggacgagugcgacgccaagugccagaccccccagggcgccaucaacuccucccuccccuuccagaacguccaccccgucaccaucggcgagugccccaaguacguccgcuccgccaagcuccgcauggucaccggccuccgcaacauccccuccauccagucccgcggccucuucggcgccaucgccggcuucaucgagggcggcuggaccggcauggucgacggcugguacggcuaccaccaccagaacgagcagggcuccggcuacgccgccgaccagaaguccacccagaacgccaucaacggcaucaccaacaaggucaacgccgucaucgagaagaugaacacccaguucaccgccgucggcaaggaguucaacaagcucgagcgccgcauggagaaccucaacaagaaggucgacgacggcuuccucgacaucuggaccuacaacgccgagcuccucguccuccucgagaacgagcgcacccucgacuuccacgacuccaacgucaagaaccucuacgagaaggucaagucccagcucaagaacaacgccaaggagaucggcaacggcugcuucgaguucuaccacaagugcaacgacgagugcauggaguccgucaagaacggcaccuacgacuaccccaaguacuccgaggaguccaagcucaaccgcgagaagaucgacggcgucaagcucgaguccaugggcgucuaccagauccucgccaucuacuccaccgucgccuccucccucguccuccucgucucccucggcgccaucuccuucuggaugugcuccaacggcucccuccagugccgcaucugcaucuga

SEQ ID NO: 96411 - RNA, 1698 nt, Artificial Sequence
  derived and/or modified CDS sequence (opt2) from hemagglutinin__InfluenzaA__ABB02936
augaaggccaagcuccucguccuccucugcaccuucaccgccaccuacgccgacaccaucugcaucggcuaccacgccaacaacuccaccgacaccgucgacaccguccucgagaagaacgucaccgucacccacuccgucaaccuccucgaggacucccacaacggcaagcucugccuccucaagggcaucgccccccuccagcucggcaacugcuccgucgccggcuggauccucggcaaccccgagugcgagcuccucaucuccaaggaguccugguccuacaucgucgagacccccaaccccgagaacggcaccugcuaccccggccacuucgccgacuacgaggagcuccgcgagcagcucuccuccgucuccuccuucgagcgcuucgagaucuuccccaagggcuccuccuggcccaaccacaccgucaccggcgucuccgccuccugcucccacaacggcaaguccuccuucuaccgcaaccuccucuggcucaccggcaagaacggccucuaccccaaccucuccauguccuacgucaacaacaaggagaaggagguccucguccucuggggcguccaccacccccccaacaucggcgaccagcgcgcccucuaccacaccgagaacgccuacgucuccgucgucuccucccacuacucccgccgcuucacccccgagaucgccaagcgccccaagguccgcgaccaggagggccgcaucaacuacuacuggacccuccucgagcccggcgacaccaucaucuucgaggccaacggcaaccucaucgcccccugguacgccuucgcccucucccgcggcuucggcuccggcaucaucaccuccaacgcccccauggacgagugcgacgccaagugccagaccccccagggcgccaucaacuccucccuccccuuccagaacguccaccccgucaccaucggcgagugccccaaguacguccgcuccgccaagcuccgcauggucaccggccuccgcaacauccccuccauccagucccgcggccucuucggcgccaucgccggcuucaucgagggcggcuggaccggcauggucgacggcugguacggcuaccaccaccagaacgagcagggcuccggcuacgccgccgaccagaaguccacccagaacgccaucaacggcaucaccaacaaggucaacuccgucaucgagaagaugaacacccaguucaccgccgucggcaaggaguucaacaagcucgagcgccgcauggagaaccucaacaagaaggucgacgacggcuuccucgacaucuggaccuacaacgccgagcuccucguccuccucgagaacgagcgcacccucgacuuccacgacuccaacgucaagaaccucuacgagaaggucaagucccagcucaagaacaacgccaaggagaucggcaacggcugcuucgaguucuaccacaagugcaacaacgagugcauggaguccgucaagaacggcaccuacgacuaccccaaguacuccgaggaguccaagcucaaccgcgagaagaucgacggcgucaagcucgaguccaugggcgucuaccagauccucgccaucuacuccaccgucgccuccucccucguccuccucgucucccucggcgccaucuccuucuggaugugcuccaacggcucccuccagugccgcaucugcaucuga

SEQ ID NO: 96412 - RNA, 1701 nt, Artificial Sequence
  derived and/or modified CDS sequence (opt2) from hemagglutinin__InfluenzaA__ABB02947
augaagaccaucaucgcccucuccuacauccucugccucgucuucgcccagaagauccccggcaacgacaacuccaccgccacccucugccucggccaccacgccguccccaacggcacccucgucaagaccaucaccaacgaccagaucgaggucaccaacgccaccgagcucguccaguccuccuccaccggccgcaucugcgacuccccccaccgcauccucgacggcgagaacugcacccucaucgacgcccuccucggcgacccccacugcgacggcuuccagaacaaggagugggaccucuucgucgagcgcuccaaggccuacuccaacugcuaccccuacgacguccaggacuacgccucccuccgcucccucgucgccuccuccggcacccucgaguucaacaacgaguccuucaacuggaccggcgucgcccagaacggcaccuccuacgccugcaagcgccgcuccaucaaguccuucuucucccgccucaacuggcuccaccagcucaaguacaaguaccccgcccucaacgucaccaugcccaacaacgacaaguucgacaagcucuacaucuggggcguccaccaccccuccaccgacuccgaccagaccucccucuacgcccaggccuccggccgcgucaccgucuccaccaagcgcucccagcagaccgucauccccaacaucggcucccgccccuggguccgcggcgucuccucccgcaucuccaucuacuggaccaucgucaagcccggcgacauccuccucaucaacuccaccggcaaccucaucgccccccgcggcuacuucaagauccgcuccggcaaguccuccaucaugcgcuccgacgcccccaucggcaagugcaacuccgagugcaucacccccaacggcuccauccccaacgacaagcccuuccagaacgucaaccgcaucaccuacggcgccugcccccgcuacgucaagcagaacacccucaagcucgccaccggcaugcgcaacguccccgagaagcagacccgcggcaucuucggcgccaucgccggcuucaucgagaacggcugggagggcauggucgacggcugguacggcuuccgccaccagaacuccgagggcaccggccaggccgccgaccucaaguccacccaggccgccaucaaccagaucaacggcaagcucaaccgccucaucgagaagaccaacgagaaguuccaccagaucgagaaggaguucuccgaggucgagggccgcauccaggaccucgagaaguacgucgaggacaccaagaucgaccucugguccuacaacgccgagcuccucgucgcccucgagaaccagcacaccaucgaccucaccgacuccgagaugaacaagcucuucgagcgcacccgcaagcagcuccgcgagaacgccgaggacaugggcaacggcugcuucaagaucuaccacaagugcgacaacgccugcaucggcuccauccgcaacggcaccuacgaccacgacgucuaccgcgacgaggcccucaacaaccgcuuccagaucaagggcgucgagcucaaguccggcuacaaggacuggauccucuggaucuccuucgccaucuccugcuuccuccucugcgucguccuccucggcuucaucaugugggccugccagaagggcaacauccgcugcaacaucugcaucuga

SEQ ID NO: 96413 - RNA, 1701 nt, Artificial Sequence; identical to SEQ ID NO: 96222
  derived and/or modified CDS sequence (opt2) from hemagglutinin__InfluenzaA__ABB02958

SEQ ID NO: 96414 - RNA, 1701 nt, Artificial Sequence; identical to SEQ ID NO: 96222
  derived and/or modified CDS sequence (opt2) from hemagglutinin__InfluenzaA__ABB02969

SEQ ID NO: 96415 - RNA, 1701 nt, Artificial Sequence
  derived and/or modified CDS sequence (opt2) from hemagglutinin__InfluenzaA__ABB02980
augaagaccaucaucgcccucuccuacauccucugccucgucuucgcccagaagcuccccggcaacgacaacuccaccgccacccucugccucggccaccacgccguccccaacggcacccucgucaagaccaucaccaacgaccagaucgaggucaccaacgccaccgagcucguccaguccuccuccaccggccgcaucugcgacuccccccaccagauccucgacggcgagaacugcacccucaucgacgcccuccucggcgacccccacugcgacggcuuccagaacaaggagugggaccucuucgucgagcgcuccaaggccuacuccaacugcuaccccuacgacguccccgacuacgccucccuccgcucccucgucgccuccuccggcacccucgaguucaacaacgaguccuucaacuggaccggcgucgcccagaacggcaccuccuccgccugcaagcgccgcuccaacaaguccuucuucucccgccucaacuggcuccaccagcucaaguacaaguaccccgcccucaacgucaccaugcccaacaacgagaaguucgacaagcucuacaucuggggcguccaccaccccuccaccgacuccgaccagaucucccucuacgcccaggccuccggccgcgucaccgucuccaccaagcgcucccagcagaccgucauccccaacaucggcucccgccccuggguccgcggcgucuccuccaucaucuccaucuacuggaccaucgucaagcccggcgacauccuccucaucaacuccaccggcaaccucaucgccccccgcggcuacuucaagauccgcuccggcaaguccuccaucaugcgcuccgacgcccccaucggcaagugcaacuccgagugcaucacccccaacggcuccauccccaacgacaagcccuuccagaacgucaaccgcaucaccuacggcgccugcccccgcuacgucaagcagaacacccucaagcucgccaccggcaugcgcaacguccccgagaagcagacccgcggcaucuucggcgccaucgccggcuucaucgagaacggcugggagggcauggucgacggcugguacggcuuccgccaccagaacuccgagggcaccggccaggccgccgaccucaaguccacccaggccgccaucaaccagaucaacggcaagcucaaccgccucaucgagaagaccaacgagaaguuccaccagaucgagaaggaguucuccgaggucgagggccgcauccaggaccucgagaaguacgucgaggacaccaagaucgaccucugguccuacaacgccgagcuccucgucgcccucgagaaccagcacaccaucgaccucaccgacuccgagaugaacaagcucuucgagcgcaccaagaagcagcuccgcgagaacgccgaggacaugggcaacggcugcuucaagaucuaccacaagugcgacaacgccugcaucggcuccauccgcaacggcaccuacgaccacgacgucuaccgcgacgaggcccucaacaaccgcuuccagaucaagggcgucgagcucaaguccggcuacaaggacuggauccucuggaucuccuucgccaucuccugcuuccuccucugcgucguccuccucggcuucaucaugugggccugccagaagggcaacauccgcugcaacaucugcaucuga

SEQ ID NO: 96416 - RNA, 1701 nt, Artificial Sequence
  derived and/or modified CDS sequence (opt2) from hemagglutinin__InfluenzaA__ABB02991
augaagaccaucaucgcccucuccuacauccucugccucgucuucgcccagaagcuccccggcaacgacaacuccaccgccacccucugccucggccaccacgccguccccaacggcacccucgucaagaccaucaccaacgaccagaucgaggucaccaacgccaccgagcucguccaguccuccuccaccggccgcaucugcgacaacccccaccagauccucgacggcgagaacugcacccucaucgacgcccuccucggcgacccccacugcgacggcuuccagaacaaggagugggaccucuucgucgagcgcuccaaggccuacuccaacugcuaccccuacgacguccccgacuacgccucccuccgcucccucgucgccuccuccggcacccucgaguucaacaacgaguccuucaacuggaccggcgucgcccagaacggcaccuccuccgccugcaagcgccgcuccaacaaguccuucuucucccgccucaacuggcuccaccagcucaaguacaaguaccccgcccucaacgucaccaugcccaacaacgagaaguucgacaagcucuacaucuggggcguccaccaccccuccaccgacuccgaccagaucucccucuacgcccaggccuccggccgcgucaccgucuccaccaagcgcucccagcagaccgucauccccaacaucggcucccgccccuggguccgcggcgucuccuccaucaucuccaucuacuggaccaucgucaagcccggcgacauccuccucaucaacuccaccggcaaccucaucgccccccgcggcuacuucaagauccgcuccggcaaguccuccaucaugcgcuccgacgcccccaucggcaagugcaacuccgagugcaucacccccaacggcuccauccccaacgacaagcccuuccagaacgucaaccgcaucaccuacggcgccugcccccgcuacgucaagcagaacacccucaagcucgccaccggcaugcgcaacguccccgagaagcagacccgcggcaucuucggcgccaucgccggcuucaucgagaacggcugggagggcauggucgacggcugguacggcuuccgccaccagaacuccgagggcaccggccaggccgccgaccucaaguccacccaggccgccaucaaccagaucaacggcaagcucaaccgccucaucgagaagaccaacgagaaguuccaccagaucgagaaggaguucuccgaggucgagggccgcauccaggaccucgagaaguacgucgaggacaccaagaucgaccucugguccuacaacgccgagcuccucgucgcccucgagaaccagcacaccaucgaccucaccgacuccgagaugaacaagcucuucgagcgcaccaagaagcagcuccgcgagaacgccgaggacaugggcaacggcugcuucaagaucuaccacaagugcgacaacgccugcaucggcuccauccgcaacggcaccuacgaccacgacgucuaccgcgacgaggcccucaacaaccgcuuccagaucaagggcgucgagcucaaguccggcuacaaggacuggauccucuggaucuccuucgccaucuccugcuuccuccucugcgucguccuccucggcuucaucaugugggccugccagaagggcaacauccgcugcaacaucugcaucuga

SEQ ID NO: 96417 - RNA, 1701 nt, Artificial Sequence
  derived and/or modified CDS sequence (opt2) from hemagglutinin__InfluenzaA__ABB03002
augaagaccaucaucgcccucuccuacauccucugccucgucuucgcccagaagcuccccggcaacgacaacuccaccgccacccucugccucggccaccacgccguccccaacggcacccucgucaagaccaucaccaacgaccagaucgaggucaccaacgccaccgagcucguccaguccuccuccaccggccgcaucugcaacuccccccaccagauccucgacggcgagaacugcacccucaucgacgcccuccucggcgacccccacugcgacggcuuccagaacaaggagugggaccucuucgucgagcgcuccaaggccuacuccaacugcuaccccuacgacguccccgacuacgccucccuccgcucccucgucgccuccuccggcacccucgaguucaacaacgaguccuucaacuggaccggcgucgcccagaacggcaccuccuccgccugcaagcgccgcuccaacaaguccuucuucucccgccucaacuggcuccaccagcucaaguacaaguaccccgcccucaacgucaccaugcccaacaacgagaaguucgacaagcucuacaucuggggcguccaccaccccuccaccgacuccgaccagaucucccucuacgcccaggccuccggccgcgucaccgucuccaccaagcgcucccagcagaccgucauccccaacaucggcuccggccccuggguccgcggcgucuccucccgcaucuccaucuacuggaccaucgucaagcccggcgacauccuccucaucaacuccaccggcaaccucaucgccccccgcggcuacuucaagauccgcuccggcaaguccuccaucaugcgcuccgacgcccccaucggcaagugcaacuccgagugcaucacccccaacggcuccauccccaacgacaagcccuuccagaacgucaaccgcaucaccuacggcgccugcccccgcuacgucaagcagaacacccucaagcucgccaccggcaugcgcaacguccccgagaagcagacccgcggcaucuucggcgccaucgccggcuucaucgagaacggcugggagggcauggucgacggcugguacggcuuccgccaccagaacuccgagggcaccggccaggccgccgaccucaaguccacccaggccgccaucaaccagaucaacggcaagcucaaccgccucaucgagaagaccaacgagaaguuccaccagaucgagaaggaguucuccgaggucgagggccgcauccaggaccucgagaaguacgucgaggacaccaagaucgaccucugguccuacaacgccgagcuccucgucgcccucgagaaccagcacaccaucgaccucaccgacuccgagaugaacaagcucuucgagcgcaccaagaagcagcuccgcgagaacgccgaggacaugggcaacggcugcuucaagaucuaccacaagugcgacaacgccugcaucggcuccauccgcaacggcaccuacgaccacgacgucuaccgcgacgaggcccucaacaaccgcuuccagaucaagggcgucgagcucaaguccggcuacaaggacuggauccucuggaucuccuucgccaucuccugcuuccuccucugcgucguccuccucggcuucaucaugugggccugccagaagggcaacauccgcugcaacaucugcaucuga

SEQ ID NO: 96418 - RNA, 1701 nt, Artificial Sequence
  derived and/or modified CDS sequence (opt2) from hemagglutinin__InfluenzaA__ABB03013
augaagaccaucaucgcccucuccuacauccucugccucgucuucgcccagaagcuccccggcaacgacaacuccaccgccacccucugccucggccaccacgccguccccaacggcacccucgucaagaccaucaccuccgaccagaucgaggucaccaacgccaccgagcucguccaguccuccuccaccggccgcaucugcgacuccccccaccgcauccucgacggcgagaacugcacccucaucgacgcccuccucggcgacccccacugcgacggcuuccagaacaaggagugggaccucuucgucgagcgcuccaaggccuacuccaacugcuaccccuacgacguccccgacuacgccucccuccgcucccucgucgccuccuccggcacccucgaguucaacaacgaguccuucaacuggaccggcgucgcccagaacggcaccuccuucgccugcaagcgccgcuccaucaaguccuucuucucccgccucaacuggcuccaccagcucaaguacaaguaccccgcccucaacgucaccaugcccaacaacgacaaguucgacaagcucuacaucuggggcguccaccaccccggcaccgacuccgaccagaccucccucuacgcccaggccuccggccgcgucaccgucuccaccaagcgcucccagcagaccgucauccccaacaucggcuccggccccuggguccgcggcgucuccucccgcaucuccaucuacuggaccaucgucaagcccggcgacauccuccucaucaacuccaccggcaaccucaucgccccccgcggcuacuucaagauccgcuccggcaaguccuccaucaugcgcuccgacgcccccaucggcaagugcaacuccgagugcaucacccccaacggcuccauccccaacgacaagcccuuccagaacgucaaccgcaucaccuacggcgccugcccccgcuacgucaagcagaacacccucaagcucgccaccggcaugcgcaacguccccgagaagcagacccgcggcaucuucggcgccaucgccggcuucaucgagaacggcugggagggcauggucgacggcugguacggcuuccgccaccagaacuccgagggcaccggccaggccgccgaccucaaguccacccaggccgccaucaaccagaucaacggcaagcucaaccgccucaucgagaagaccaacgagaaguuccaccagaucgagaaggaguucaccgaggucgagggccgcauccaggaccucgagaaguacgucgaggacaccaagaucgaccucugguccuacaacgccgagcuccucgucgcccucgagaaccagcacaccaucgaccucaccgacuccgagaugaacaagcucuucgagcgcacccgcaagcagcuccgcgagaacgccgaggacaugggcaacggcugcuucaagaucuaccacaagugcgacaacgccugcaucggcuccauccgcaacggcaccuacgaccacgacgucuaccgcgacgaggcccucaacaaccgcuuccagaucaagggcgucgagcucaaguccggcuacaaggacuggauccucuggaucuccuucgccaccuccugcuuccuccucugcgucguccuccucggcuucaucaugugggccugccagaagggcaacauccgcugcaacaucugcaucuga

SEQ ID NO: 96419 - RNA, 1701 nt, Artificial Sequence
  derived and/or modified CDS sequence (opt2) from hemagglutinin__InfluenzaA__ABB03024
augaagaccaucaucgcccucuccuacauccucugccucgucuucgcccagaagcuccccggcaacgacaacuccaccgccacccucugccucggccaccacgccguccccaacggcacccucgucaagaccaucaccaacgaccagaucgaggucaccaacgccaccgagcucguccaguccuccuccaccggccgcaucugcgacuccccccaccagauccucgacggcgagaacugcacccucaucgacgcccuccucggcgacccccacugcgacggcuuccagaacaaggagugggaccucuucgucgagcgcuccaaggccuacuccaacugcuaccccuacgacguccccgacuacgccucccuccgcucccucgucgccuccuccggcacccucgaguucaacaacgaguccuucaacuggaccggcgucgcccagaacggcaccuccuccgccugcaagcgccgcuccaacaaguccuucuucucccgccucaacuggcuccaccagcucaaguacaaguaccccgcccucaacgucaccaugcccaacaacgagaaguucgacaagcucuacaucuggggcguccaccaccccuccaccgacuccgaccagaucucccucuacgcccaggccuccggccgcgucaccgucuccaccaagcgcucccagcagaccgucauccccaacaucggcucccgccccuggauccgcggcgucuccucccgcaucuccaucuacuggaccaucgucaagcccggcgacauccuccucaucaacuccaccggcaaccucaucgccccccgcggcuacuucaagauccgcuccggcaaguccuccaucaugcgcuccgacgcccccaucggcaagugcaacuccgagugcaucacccccaacggcuccauccccaacgacaagcccuuccagaacgucaaccgcaucaccuacggcgccugcccccgcuacgucaagcagaacacccucaagcucgccaccggcaugcgcaacguccccgagaagcagacccgcggcaucuucggcgccaucgccggcuucaucgagaacggcugggagggcauggucgacggcugguacggcuuccgccaccagaacuccgagggcaccggccaggccgccgaccucaaguccacccaggccgccaucaaccagaucaacggcaagcucaaccgccucaucgagaagaccaacgagaaguuccaccagaucgagaaggaguucuccgaggucgagggccgcauccaggaccucgagaaguacgucgaggacaccaagaucgaccucugguccuacaacgccgagcuccucgucgcccucgagaaccagcacaccaucgaccucaccgacuccgagaugaacaagcucuucgagcgcaccaagaagcagcuccgcgagaacgccgaggacaugggcaacggcugcuucaagaucuaccacaagugcgacaacgccugcaucggcuccauccgcaacggcaccuacgaccacgacgucuaccgcgacgaggcccucaacaaccgcuuccagaucaagggcgucgagcucaaguccggcuacaaggacuggauccucuggaucuccuucgccaucuccugcuuccuccucugcgucguccuccucggcuucaucaugugggccugccagaagggcaacauccgcugcaacaucugcaucuga

SEQ ID NO: 96420 - RNA, 1701 nt, Artificial Sequence
  derived and/or modified CDS sequence (opt2) from hemagglutinin__InfluenzaA__ABB03035
augaagaccaucaucgcccucuccuacauccucugccucgucuucgcccagaagcuccccggcaacgacaacuccaccgccacccucugccucggccaccacgccguccccaacggcacccucgucaagaccaucaccuccgaccagaucgaggucaccaacgccaccgagcucguccaguccuccuccaccggccgcaucugcgacuccccccaccgcauccucgacggcgagaacugcacccucaucgacgcccuccucggcgacccccacugcgacggcuuccagaacaaggagugggaccucuucgucgagcgcuccaaggccuacuccaacugcuaccccuacgacguccccgacuacgccucccuccgcucccucgucgccuccuccggcacccucgaguucaacaacgaguccuucaacuggaccggcgucgcccagaacggcaccuccuucgccugcaagcgccgcuccaucaaguccuucuucucccgccucaacuggcuccaccagcucaaguacaaguaccccgcccucaacgucgccaugcccaacaacgacaaguucgacaagcucuacaucuggggcguccaccaccccggcaccgacuccgaccagaccucccucuacgcccaggccuccggccgcgucaccgucuccaccaagcgcucccagcagaccgucauccccaacaucggcucccgccccuggguccgcggcgucuccucccgcaucuccaucuacuggaccaucgucaagcccggcgacauccuccucaucaacuccaccggcaaccucaucgccccccgcggcuacuucaagauccgcuccggcaaguccuccaucaugcgcuccgacgcccccaucggcaagugcaacuccgagugcaucacccccaacggcuccauccccaacgacaagcccuuccagaacgucaaccgcaucaccuacggcgccugcccccgcuacgucaagcagaacacccucaagcucgccaccggcaugcgcaacguccccgagaagcagacccgcggcaucuucggcgccaucgccggcuucaucgagaacggcugggagggcauggucgacggcugguacggcuuccgccaccagaacuccgagggcaccggccaggccgccgaccucaaguccacccaggccgccaucaaccagaucaacggcaagcucaaccgccucaucgagaagaccaacgagaaguuccaccagaucgagaaggaguucaccgaggucgagggccgcauccaggaccucgagaaguacgucgaggacaccaagaucgaccucugguccuacaacgccgagcuccucgucgcccucgagaaccagcacaccaucgaccucaccgacuccgagaugaacaagcucuucgagcgcacccgcaagcagcuccgcgagaacgccgaggacaugggcaacggcugcuucaagaucuaccacaagugcgacaacgccugcaucggcuccauccgcaacggcaccuacgaccacgacgucuaccgcgacgaggcccucaacaaccgcuuccagaucaagggcgucgagcucaaguccggcuacaaggacuggauccucuggaucuccuucgccaccuccugcuuccuccucugcgucguccuccucggcuucaucaugugggccugccagaagggcaacauccgcugcaacaucugcaucuga

SEQ ID NO: 96421 - RNA, 1701 nt, Artificial Sequence
  derived and/or modified CDS sequence (opt2) from hemagglutinin__InfluenzaA__ABB03046
augaagaccaucaucgcccucuccuacauccucugccucgucuucgcccagaagcuccccggcaacgacaacuccaccgccacccucugccucggccaccacgccguccccaacggcacccucgucaagaccaucaccaacgaccagaucgaggucaccaacgccaccgagcucguccaguccuccuccaccggccgcaucugcgacuccccccaccagauccucgacggcgagaacugcacccucaucgacgcccuccucggcgacccccacugcgacggcuuccagaacaaggagugggaccucuucgucgagcgcuccaaggccuacuccaacugcuaccccuacgacguccccgacuacgccucccuccgcucccucgucgccuccuccggcacccucgaguucaacaacgaguccuucaacuggaccggcgucgcccagaacggcaccuccuccgccugcaagcgccgcuccaacaaguccuucuucucccgccucaacuggcuccaccagcucaaguacaaguaccccgcccucaacgucaccaugcccaacaacgagaaguucgacaagcucuacaucuggggcguccaccaccccuccaccgacuccgaccagaucucccucuacgcccaggccuccggccgcgucaccgucuccaccaagcgcucccagcagaccgucauccccaacaucggcucccgccccuggguccgcggcgucuccuccggcaucuccaucuacuggaccaucgucaagcccggcgacauccuccucaucaacuccaccggcaaccucaucgccccccgcggcuacuucaagauccgcuccggcaaguccuccaucaugcgcuccgacgcccccaucggcaagugcaacuccgagugcaucacccccaacggcuccauccccaacgacaagcccuuccagaacgucaaccgcaucaccuacggcgccugcccccgcuacgucaagcagaacacccucaagcucgccaccggcaugcgcaacguccccgagaagcagacccgcggcaucuucggcgccaucgccggcuucaucgagaacggcugggagggcauggucgacggcugguacggcuuccgccaccagaacuccgagggcaccggccaggccgccgaccucaaguccacccaggccgccaucaaccagaucaacggcaagcucaaccgccucaucgagaagaccaacgagaaguuccaccagaucgagaaggaguucuccgaggucgagggccgcauccaggaccucgagaaguacgucgaggacaccaagaucgaccucugguccuacaacgccgagcuccucgucgcccucgagaaccagcacaccaucgaccucaccgacuccgagaugaacaagcucuucgagcgcaccaagaagcagcuccgcgagaacgccgaggacaugggcaacggcugcuucaagaucuaccacaagugcgacaacgccugcaucggcuccauccgcaacggcaccuacgaccacgacgucuaccgcgacgaggcccucaacaaccgcuuccagaucaagggcgucgagcucaaguccggcuacaaggacuggauccucuggaucuccuucgccaucuccugcuuccuccucugcgucgcccuccucggcuucaucaugugggccugccagaagggcaacauccgcugcaacaucugcaucuga

SEQ ID NO: 96422 - RNA, 1701 nt, Artificial Sequence
  derived and/or modified CDS sequence (opt2) from hemagglutinin__InfluenzaA__ABB03057
augaagaccaucaucgcccucuccuacauccucugccucgucuucgcccaggagcuccccggcaacgacaacuccaccgccacccucugccucggccaccacgccguccccaacggcaccaucgucaagaccaucaccaacgaccagaucgaggucaccaacgccaccgagcucguccaguccuccuccaccggcggcaucugcgacuccccccaccagauccucgacggcgagaacugcacccucaucgacgcccuccucggcgacccccagugcgacggcuuccagaacaagaagugggaccucuucgucgagcgcuccaaggccuacuccaacugcuaccccuacgacguccccgacuacgccucccuccgcucccucgucgccuccuccggcacccucgaguucaacaacgaguccuucaacuggaccggcgucacccagaacggcaccuccuccgccugcaagcgccgcuccaacaacuccuucuucucccgccucaacuggcucacccaccucaaguucaaguaccccgcccucaacgucaccaugcccaacaacgagaaguucgacaagcucuacaucuggggcguccaccaccccggcaccgacaacgaccagaccucccucuacgcccaggccuccggccgcaucaccgucuccaccaagcgcucccagcagaccgucauccccaacaucggcucccgcccccgcguccgcgacauccccucccgcaucuccaucuacuggaccaucgucaagcccggcgacauccuccucaucaacuccaccggcaaccucaucgccccccgcggcuacuucaagauccgcuccggcaaguccuccaucaugcgcuccgacgcccccaucggcaagugcaacuccgagugcaucacccccaacggcuccauccccaacgacaagcccuuccagaacgucaaccgcaucaccuacggcgccugcccccgcuacgucaagcagaacacccucaagcucgccaccggcaugcgcaacguccccgagaagcagacccgcggcaucuucggcgccaucgccggcuucaucgagaacggcugggagggcauggucgacggcugguacggcuuccgccaccagaacuccgagggcaucggccaggccgccgaccucaaguccacccaggccgccaucaaccagaucaacggcaagcucaaccgccucaucggcaagaccaacgagaaguuccaccagaucgagaaggaguucuccgaggucgagggccgcauccaggaccucgagaaguacgucgaggacaccaagaucgaccucugguccuacaacgccgagcuccucgucgcccucgagaaccagcacaccaucgaccucaccgacuccgagaugaacaagcucuucgagcgcaccaagaagcagcuccgcgagaacgccgaggacaugggcaacggcugcuucaagaucuaccacaagugcgacaacgccugcaucggcuccauccgcaacggcaccuacgaccacgacgucuaccgcgacgaggcccucaacaaccgcuuccagaucaagggcgucgagcucaagcucggcuacaaggacuggauccucuggaucuccuucgccaucuccugcuuccuccucugcgucgcccuccucggcuucaucaugugggccugccagaagggcaacauccgcugcaacaucugcaucuga

SEQ ID NO: 96423 - RNA, 1701 nt, Artificial Sequence; identical to SEQ ID NO: 96322
  derived and/or modified CDS sequence (opt2) from hemagglutinin__InfluenzaA__ABB03068

SEQ ID NO: 96424 - RNA, 1701 nt, Artificial Sequence; identical to SEQ ID NO: 96279
  derived and/or modified CDS sequence (opt2) from hemagglutinin__InfluenzaA__ABB03079

SEQ ID NO: 96425 - RNA, 1701 nt, Artificial Sequence; identical to SEQ ID NO: 96279
  derived and/or modified CDS sequence (opt2) from hemagglutinin__InfluenzaA__ABB03090

SEQ ID NO: 96426 - RNA, 1698 nt, Artificial Sequence
  derived and/or modified CDS sequence (opt2) from hemagglutinin__InfluenzaA__ABB03101
augaaggucaagcuccucauccuccucugcaccuucaccgccaccuacgccgacaccaucugcaucggcuaccacgccaacaacuccaccgacaccgucgacaccguccucgagaagaacgucaccgucacccacuccgucaaccuccucgaggacucccacaacggcaagcucugccuccucaagggcaucgccccccuccagcucggcaacugcuccgucgccggcuggauccucggcaaccccgagugcgagcuccucaucuccaaggaguccugguccuacaucgucgagacccccaaccccgagaacggcgccugcuaccccggcuacuucgccgacuacgaggagcuccgcgagcagcucuccuccgucuccuccuucgagcgcuucgagaucuuccccaagaaguccuccuggcccaaccacaccgucaccggcgucuccgccuccugcucccacaacggcaaguccuccuucuaccgcaaccuccucuggcucaccggcaagaacggccucuaccccaaccucuccaaguccuacgccaacaacaaggagaaggagguccucauccucuggggcguccaccacccccccaacaucggcgaccagcgcacccucuaccacaccgagaacgccuacgucuccgucgucuccucccacuacucccgccgcuucacccccgagaucaccaagcgccccaagguccgcgaccaggagggccgcaucaacuacuacuggacccuccucgagcccggcgacaccaucaucuucgagaccaacggcaaccucaucgcccccugguacgccuucgcccucucccgcggcuucggcuccggcaucaucaccuccaacgcccccauggacgagugcgacgccaagugccagaccccccagggcgccaucaacuccucccuccccuuccagaacguccaccccgucaccaucggcgagugccccaaguacguccgcuccgccaagcuccgcauggucaccggccuccgcaacauccccuccauccagucccgcggccucuucggcgccaucgccggcuucaucgagggcggcuggaccggcauggucgacggcugguacggcuaccaccaccagaacgagcagggcuccggcuacgccgccgaccagaaguccacccagaacgccaucaacggcaucaccaacaaggucaacuccgucaucgagaagaugaacacccaguucaccgccgucggcaaggaguucaacaagcucgagcgccgcauggagaaccucaacaagaaggucgacgacggcuuccucgacaucuggaccuacaacgccgagcuccucguccuccucgagaacgagcgcacccucgacuuccacgacuccaacgucaagaaccucuacgagaaggucaagucccagcucaagaacaacgccaaggagaucggcaacggcugcuucgaguucuaccacaagugcaacaacgagugcauggaguccgucaagaacggcaccuacgacuaccccaaguacuccgaggaguccaagcucaaccgcgagaagaucgacggcgucaagcucgacuccaugggcgucuaccagauccucgccaucuacuccaccgucgccuccucccucguccuccucgucucccucggcgccaucuccuucuggaugugcuccaacggcucccuccagugccgcaucugcaucuga

SEQ ID NO: 96427 - RNA, 1701 nt, Artificial Sequence
  derived and/or modified CDS sequence (opt2) from hemagglutinin__InfluenzaA__ABB03112
augaagaccaucaucgcccucuccuacauccucugccucgucuucgcccagaagcuccccggcaacgacaacuccaccgccacccucugccucggccaccacgccguccccaacggcaccaucgucaagaccaucaccaacgaccagaucgaggucaccaacgccaccgagcucguccaguccuccuccaccggcggcaucugcgacuccccccaccagauccucgacggcgagaacugcacccucaucgacgcccuccucggcgacccccagugcgacggcuuccagaacaagaagugggaccucuucgucgagcgcuccaaggccuacuccaacugcuaccccuacgacguccccgacuacgccucccuccgcucccucgucgccuccuccggcacccucgaguucaacaacgaguccuucaacuggaccggcgucacccagaacggcaccuccuccgccugcaagcgccgcuccaacaaguccuucuucucccgccucaacuggcucacccaccucaaguacaaguaccccgcccucaacgucaccaugcccaacaacgagaaguucgacaagcucuacaucuggggcguccaccaccccggcaccgacuccgaccagaucucccucuacgcccaggccuccggccgcaucaccgucuccaccaagcgcucccagcagaccgucauccccaacaucggcucccgcccccgcguccgcgacgucuccucccgcaucuccaucuacuggaccaucgucaagcccggcgacauccuccucaucaacuccaccggcaaccucaucgccccccgcggcuacuucaagauccgcuccggcaaguccuccaucaugcgcuccgacgcccccaucggcaagugcaacuccgagugcaucacccccaacggcuccauccccaacgacaagcccuuccagaacgucaacaagaucaccuacggcgccugcccccgcuacgucaagcagaacacccucaagcucgccaccggcaugcgcaacguccccgagaagcagacccgcggcaucuucggcgccaucgccggcuucaucgagaacggcugggagggcauggucgacggcugguacggcuuccgccaccagaacuccgagggcaccggccaggccgccgaccucaaguccacccaggccgccaucaaccagaucaacggcaagcucaaccgccucaucggcaagaccaacgagaaguuccaccagaucgagaaggaguucuccgaggucgagggccgcauccaggaccucgagaaguacgucgaggacaccaagaucgaccucugguccuacaacgccgagcuccucgucgcccucgagaaccagcacaccaucgaccucaccgacuccgagaugaacaagcucuucgagcgcaccaagaagcagcuccgcgagaacgccgaggacaugggcaacggcugcuucaagaucuaccacaagugcgacaacaccugcaucgaguccauccgcaacggcaccuacgaccacgacgucuaccgcgacgaggcccucaacaaccgcuuccagaucaagggcgucgagcucaaguccggcuacaaggacuggauccucuggaucuccuucgccaucuccugcuuccuccucugcgucgcccuccucggcuucaucaugugggccugccagaagggcaacauccgcugcaacaucugcaucuga

SEQ ID NO: 96428 - RNA, 1698 nt, Artificial Sequence
  derived and/or modified CDS sequence (opt2) from hemagglutinin__InfluenzaA__ABB03123
augaaggucaagcuccucguccuccucugcaccuucaccgccaccuacgccgacaccaucugcaucggcuaccacgccaacaacuccaccgacaccgucgacaccguccucgagaagaacgucaccgucacccacuucgucaaccuccucgaggacucccacaacggcaagcucugccuccucaagggcaucgccccccuccagcucggcaacugcuccgucgccggcuggauccucggcaaccccgagugcgagcuccucaucuccaaggaguccugguccuacaucgucgagacccccaaccccgagaacggcaccugcuaccccggcuacuucgccgacuacgaggagcuccgcgagcagcucuccuccgucuccuccuucgagcgcuucgagaucuuccccaaggaguccuccuggcccaaccacaccgucaccggcgucuccgccuccugcucccacaacggcaaguccuccuucuaccgcaaccuccucuggcucaccggcaagaacggccucuaccccaaccucuccaaguccuacgccaacaacaaggagaaggagguccucguccucuggggcguccaccacccccccaacaucggcgaccagcgcgcccucuaccacaccgagaacgccuacgucuccgucgucuccucccacuacucccgccgcuucacccccgagaucgccaagcgccccaagguccgcgaccaggagggccgcaucaacuacuacuggacccuccucgagcccggcgacaccaucaucuucgaggccaacggcaaccucaucgccccccgcuacgccuucgcccucucccgcggcuucggcuccggcaucaucaccuccaacgcccccauggacgagugcgacgccaagugccagaccccccagggcgccaucaacuccucccuccccuuccagaacguccaccccgucaccaucggcgagugccccaaguacguccgcuccgccaagcuccgcauggucaccggccuccgcaacauccccuccauccagucccgcggccucuucggcgccaucgccggcuucaucgagggcggcuggaccggcauggucgacggcugguacggcuaccaccaccagaacgagcagggcuccggcuacgccgccgaccagaaguccacccagaacgccaucaacggcaucaccaacaaggucaacuccgucaucgagaagaugaacacccaguucaccgccgucggcaaggaguucaacaagcucgagcgccgcauggagaaccucaacaagaaggucgacgacggcuuccucgacaucuggaccuacaacgccgagcuccucguccuccucgagaacgagcgcacccucgacuuccacgacuccaacgucaagaaccucuacgagaaggucaagucccagcucaagaacaacgccaaggagaucggcaacggcugcuucgaguucuaccacaagugcaacgacgagugcauggaguccgucaagaacggcaccuacgacuaccccaaguacuccgaggaguccaagcucaaccgcgagaagaucgacggcgucaagcucgaguccaugggcgucuaccagauccucgccaucuacuccaccgucgccuccucccucguccuccucgucucccucggcgccaucuccuucuggaugugcuccaacggcucccuccagugccgcaucugcaucuga

SEQ ID NO: 96429 - RNA, 1698 nt, Artificial Sequence
  derived and/or modified CDS sequence (opt2) from hemagglutinin__InfluenzaA__ABB03134
augaaggucaagcuccucauccuccucugcaccuucaccgccaccuacgccgacaccaucugcaucggcuaccacgccaacaacuccaccgacaccgucgacaccguccucgagaagaacgucaccgucacccacuccgucaaccuccucgaggacucccacaacggcaagcucugccuccucaagggcaucgccccccuccagcucggcaacugcuccgucgccggcuggauccucggcaaccccgagugcgagcuccucaucuccaaggaguccugguccuacaucgucgagacccccaaccccgagaacggcaccugcuaccccggcuacuucgccgacuacgaggagcuccgcgagcagcucuccuccgucuccuccuucgagcgcuucgagaucuuccccaaggaguccuccuggcccaaccacaccgucaccggcgucuccgccuccugcucccacaacggcaaguccuccuucuaccgcaaccuccucuggcucaccgagaagaacggccucuaccccacccucuccaaguccuacgccaacaacaaggagaaggagguccucauccucuggggcguccaccacccccccaacaucggcgaccagcgcacccucuaccacaccgagaacgccuacgucuccgucgucuccucccacuacucccgccgcuucacccccgagaucaccaagcgccccaagguccgcgaccaggagggccgcaucaacuacuacuggacccuccucgagcccggcgacaccaucaucuucgaggccaacggcaaccucaucgcccccugguacgccuucgcccucucccgcggcuucggcuccggcaucaucaccuccaacgcccccauggacgagugcgacgccaagugccagaccccccagggcgccaucaacuccucccuccccuuccagaacguccaccccgucaccaucggcgagugccccaaguacguccgcuccgccaagcuccgcauggucaccggccuccgcaacauccccuccauccagucccgcggccucuucggcgccaucgccggcuucaucgagggcggcuggaccggcauggucgacggcugguacggcuaccaccaccagaacgagcagggcuccggcuacgccgccgaccagaaguccacccagaacgccaucaacggcaucaccaacaaggucaacuccgucaucgagaagaugaacacccaguucaccgccgucggcaaggaguucaacaagcucgagcgccgcauggagaaccucaacaagaaggucgacgacggcuuccucgacaucuggaccuacaacgccgagcuccucguccuccucgagaacgagcgcacccucgacuuccacgacuccaacgucaagaaccucuacgagaaggucaagucccagcucaagaacaacgccaaggagaucggcaacggcugcuucgaguucuaccacaagugcaacaacgagugcauggaguccgucaagaacggcaccuacgacuaccccaaguacuccgaggaguccaagcucaaccgcgagaagaucgacggcgucaagcucgaguccaugggcgucuaccagauccucgccaucuacuccaccgucgccuccucccucguccuccucgucucccucggcgccaucuccuucuggaugugcuccaacggcucccuccagugccgcaucugcaucuga

SEQ ID NO: 96430 - RNA, 1698 nt, Artificial Sequence; identical to SEQ ID NO: 96335
  derived and/or modified CDS sequence (opt2) from hemagglutinin__InfluenzaA__ABB03145

SEQ ID NO: 96431 - RNA, 1701 nt, Artificial Sequence
  derived and/or modified CDS sequence (opt2) from hemagglutinin__InfluenzaA__ABB04283
augaagaccaucaucgcccucuccuacaucuucugccucgucuucgcccagaaccuccccggcaacgacaacuccaccgccacccucugccucggccaccacgccguccccaacggcacccucgucaagaccaucaccaacgaccagaucgaggucaccaacgccaccgagcucguccaguccuccuccaccggccgcaucugcgacuccccccaccgcauccucgacggcaagaacugcacccucaucgacgcccuccucggcgacccccacugcgacggcuuccagaacgagaagugggaccucuucgucgagcgcuccaaggccuucuccaacugcuaccccuacgacguccccgacuacgccucccuccgcucccucgucgccuccuccggcacccucgaguucaucaacgagggcuucaacuggaccggcgucacccaguccggcggcuccuacgccugcaagcgcggcuccgacaaguccuucuucucccgccucaacuggcucuacgaguccgaguccaaguaccccgcccucaacgucaccaugcccaacaacggcaacuucgacaagcucuacaucuggggcguccaccaccccuccaccgacaaggagcagaccaaccucuacguccgcgccuccggccgcgucaccgucuccaccaagcgcucccagcagaccaucauccccaacaucggcccccgccccuggguccgcggccucuccucccgcaucuccaucuacuggaccaucgucaagcccggcgacauccuccucaucaacuccuccggcaaccucaucgccccccgcggcuacuucaagauccgcaccggcaaguccuccaucaugcgcuccgacgcccccaucggcaccugcuccuccgagugcaucacccccaacggcuccauccccaacgacaagcccuuccagaacgucaacaagaucaccuacggcgccugccccaaguacgucaagcagaacacccucaagcucgccaccggcaugcgcaacauccccgagaagcagacccgcggcaucuucggcgccaucgccggcuucaucgagaacggcugggagggcauggucgacggcugguacggcuuccgccaccagaacuccgagggcaccggccaggccgccgaccucaaguccacccaggccgccaucgaccagaucaacggcaagcucaaccgcgucaucgagaagaccaacgagaaguuccaccagaucgagaaggaguucuccgaggucgagggccgcauccaggaccucgagaaguacgucgaggacaccaagaucgaccucugguccuacaacgccgagcuccucgucgcccucgagaaccagcacaccaucgaccucaccgacuccgagaugaacaagcucuucgagaagacccgccgccagcuccgcgagaacgccgaggacaugggcaacggcugcuucaagaucuaccacaagugcgacaacgccugcaucggcuccauccgcaacggcaccuacgaccacgacgucuaccgcgacgaggcccucaacaaccgcuuccagaucaagggcgucgagcucaaguccggcuacaaggacuggauccucuggaucuccuucgccaucuccugcuuccuccucugcgucguccuccucggcuucaucaugugggccugccagaagggcaacauccgcugcaacaucugcaucuga

SEQ ID NO: 96432 - RNA, 1701 nt, Artificial Sequence
  derived and/or modified CDS sequence (opt2) from hemagglutinin__InfluenzaA__ABB04294
augaagaccaucaucgcccucuccuacaucuucugccucguccucggccaggaccuccccggcaacgacaacuccaccgccacccucugccucggccaccacgccguccccaacggcacccucgucaagaccaucaccaacgaccagaucgaggucaccaacgccaccgagcucguccaguccuccuccaccggcaagaucugcaacaacccccaccgcauccucgacggcaucaacugcacccucaucgacgcccuccucggcgacccccacugcgacggcuuccagaacgagaagugggaccucuucgucgagcgcuccaaggccuucuccaacugcuaccccuacgacguccccgacuacgccucccuccgcucccucgucgccuccuccggcacccucgaguucaucaacgagggcuucaacuggaccggcgucacccagaacggcggcuccaacgccugcaagcgcggccccgacuccggcuucuucucccgccucaacuggcucuacaaguccggcuccaccuaccccguccucaacgucaccaugcccaacaacgacaacuucgacaagcucuacaucuggggcguccaccaccccuccaccgaccaggagcagaccaaccucuacguccaggccuccggccgcgucaccgucuccaccaagcgcucccagcagaccaucauccccaacaucggcucccgccccuggguccgcggccucuccucccgcaucuccaucuacuggaccaucgucaagcccggcgacauccucgucaucaacuccaacggcaaccucaucgccccccgcggcuacuucaagaugcgcaccggcaaguccuccaucaugcgcuccgacgcccccaucggcaccugcaucuccgagugcaucacccccaacggcuccauccccaacgacaagcccuuccagaacgucaacaagaucaccuacggcgccugccccaaguacgucaagcagaacacccucaagcucgccaccggcaugcgcaacguccccgagaagcagacccgcggcaucuucggcgccaucgccggcuucaucgagaacggcugggagggcaugaucgacggcugguacggcuuccgccaccagaacuccgagggcaccggccaggccgccgaccucaaguccacccaggccgccaucgaccagaucaacggcaagcucaaccgcgucaucgagaagaccaacgagaaguuccaccagaucgagaaggaguucuccgaggucgagggccgcauccaggaccucgagaaguacgucgaggacaccaagaucgaccucugguccuacaacgccgagcuccucgucgcccucgagaaccagcacaccaucgaccucaccgacuccgagaugaacaagcucuucgagaagacccgccgccagcuccgcgagaacgccgaggacaugggcaacggcugcuucaagaucuaccacaagugcgacaacgccugcaucggcuccauccgcaacggcaccuacgaccacgacgucuaccgcgacgaggcccucaacaaccgcuuccagaucaagggcgucgagcucaaguccggcuacaaggacuggauccucuggaucuccuucgccaucuccugcuuccuccucugcgucguccuccucggcuucaucaugugggccugccagaagggcaacauccgcugcaacaucugcaucuga

SEQ ID NO: 96433 - RNA, 1701 nt, Artificial Sequence
  derived and/or modified CDS sequence (opt2) from hemagglutinin__InfluenzaA__ABB04305
augaagaccaucaucgcccucuccuacaucuucugccucgucuucgcccagaagcuccccgagaacgacaacuccaccgccacccucugccucggccaccacgccguccccaacggcacccucgucaagaccaucaccaacgaccagaucgaggucaccaacgccaccgagcucguccaguccuccuccaccggccgcaucugcgacuccccccaccgcauccucgacggcaagaacugcacccucaucgacgcccuccucggcgacccccacugcgacggcuuccagaacgagaagugggaccucuucgucgagcgcuccaaggccuucuccaacugcuaccccuacgacguccccgacuacgccucccuccgcucccucgucgccuccuccggcacccucgaguucaucaacgagggcuucaacuggaccggcgucacccaguccggcggcuccuacgccugcaagcgcggcuccgucaacuccuucuucucccgccucaacuggcucuacaaguccgaguccaaguaccccguccucaacgucaccaugcccaacaacggcaaguucgacaagcucuacaucuggggcguccaccaccccuccaccgacaaggagcagaccaaccucuacguccgcgccuccggcaaggucaccgucuccaccaagcgcucccagcagaccgucauccccaacaucggcucccgccccuggguccgcggccucuccucccgcaucuccaucuacuggaccaucgucaagcccggcgacauccuccucaucaacuccaccggcaaccucaucgccccccgcggcuacuucaagauccgcaccggcaaguccuccaucaugcgcuccgacgcccccaucggcaccugcuccuccgagugcaucacccccaacggcuccauccccaacgacaagcccuuccagaacgucaacaagaucaccuacggcgccugcccccgcuacgucaagcagaacacccucaagcucgccaccggcaugcgcaacguccccgagaagcagacccgcggcaucuucggcgccaucgccggcuucaucgagaacggcugggagggcauggucgacggcugguacggcuuccgccaccagaacuccgagggcaccggccaggccgccgaccucaaguccacccaggccgccaucgaccagaucaacggcaagcucaaccgccucaucgagaagaccaacgagaaguuccaccagaucgagaaggaguucuccgaggucgagggccgcauccaggaccucgagaaguacgucgaggacaccaagaucgaccucugguccuacaacgccgagcuccucgucgcccucgagaaccagcacaccaucgaccucaccgacuccgagaugaacaagcucuucgagaagacccgcaagcagcuccgcgagaacgccgaggacaugggcaacggcugcuucaagaucuaccacaagugcgacaacgccugcaucggcuccauccgcaacggcaccuacgaccacgacgucuaccgcgacgaggcccucaacaaccgcuuccagaucaagggcgucgagcucaaguccggcuacaaggacuggauccucuggaucuccuucgccaucuccugcuuccuccucugcgucguccuccucggcuucaucaugugggccugccagaagggcaacauccgcugcaacaucugcaucuga

SEQ ID NO: 96434 - RNA, 1701 nt, Artificial Sequence
  derived and/or modified CDS sequence (opt2) from hemagglutinin__InfluenzaA__ABB04316
augaagaccaucaucgcccucuccuacaucuucugccucgucuucgcccagaagcuccccggcaacgacaacuccaccgccacccucugccucggccaccacgccguccccaacggcacccucgucaagaccaucaccaacgaccagaucgaggucaccaacgccaccgagcucguccaguccuccuccaccggccgcaucugcgacuccccccaccgcauccucgacggcaagaacugcacccucaucgacgcccuccucggcgacccccacugcgacggcuuccagaacgagaagugggaccucuucgucgagcgcuccaaggccuacuccaacugcuaccccuacgacguccccgacuacgccucccuccgcucccucgucgccuccuccggcacccucgaguucaucaacgaggacuucaacuggaccggcgucacccaguccggcggcuccuacgccugcaagcgcggcuccgucaaguccuucuucucccgccucaacuggcuccacgaguccgaguacaaguaccccgcccucaacgucaccaugcccaacaacggcaaguucgacaagcucuacaucuggggcguccaccaccccuccaccgaccgcgagcagaccaaccucuacguccgcgccuccggccgcgucaccgucuccaccaagcgcucccagcagaccgucauccccaacaucggcucccgccccuggguccgcggccucuccucccgcaucuccaucuacuggaccaucgucaagcccggcgacauccuccucaucaacuccaccggcaaccucaucgccccccgcggcuacuucaagauccgcaccggcaaguccuccaucaugcgcuccgacgcccccaucggcaccugcuccuccgagugcaucacccccaacggcuccauccccaacgacaagcccuuccagaacgucaacaagaucaccuacggcgccugcccccgcuacgucaagcagaacacccucaagcucgccaccggcaugcgcaacguccccgagaagcagacccgcggcaucuucggcgccaucgccggcuucaucgagaacggcugggagggcauggucgacggcugguacggcuuccgccaccagaacuccgagggcaccggccaggccgccgaccucaaguccacccaggccgccaucgaccagaucaacggcaagcucaaccgccucaucgagaagaccaacgagaaguuccaccagaucgagaaggaguucuccgaggucgagggccgcauccaggaccucgagaaguacgucgaggacaccaagaucgaccucugguccuacaacgccgagcuccucgucgcccucgagaaccagcacaccaucgaccucaccgacuccgagaugaacaagcucuucgagaagacccgcaagcagcuccgcgagaacgccgaggacaugggcaacggcugcuucaagaucuaccacaagugcgacaacgccugcaucggcuccauccgcaacggcaccuacgaccacgacgucuaccgcgacgaggcccucaacaaccgcuuccagaucaagggcgucgagcucaaguccggcuacaagaacuggauccucuggaucuccuucgccaucuccugcuuccuccucugcgucguccuccucggcuucaucaugugggccugccagaagggcaacauccgcugcaacaucugcaucuga

SEQ ID NO: 96435 - RNA, 1701 nt, Artificial Sequence
  derived and/or modified CDS sequence (opt2) from hemagglutinin__InfluenzaA__ABB04327
augaagaccaucaucgcccucuccuacaucuucugccucgucuucgcccagaagcuccccggcaacgacaacuccaccgccacccucugccucggccaccacgccguccccaacggcacccucgucaagaccaucaccaacgaccagaucgaggucaccaacgccaccgagcucguccaguccuccuccaccggccgcaucugcgacuccccccaccgcauccucgacggcaagaacugcacccucaucgacgcccuccucggcgacccccacugcgacggcuuccagaacgagaagugggaccucuucgucgagcgcuccaaggccuucuccaacugcuaccccuacgacguccccgacuacgccucccuccgcucccucgucgccuccuccggcacccucgaguucaucaacgagggcuucaacuggaccggcgucacccaguccggcggcuccuacgccugcaagcgcggcuccgucaacuccuucuucucccgccucaacuggcucuacaaguccgaguacaaguaccccgcccucaacgucaccaugcccaacaacggcaaguucgacaagcucuacaucuggggcguccaccaccccuccaccgagaaggagcagaccaaccucuacguccgcgccuccggccgcgucaccgucuccaccaagcgcucccagcagaccgucauccccaacaucggcuccauccccuggguccgcggccucuccucccgcaucuccaucuacuggaccaucgucaagcccggcgacauccuccucaucaacuccaccggcaaccucaucgccccccgcggcuacuucaagauccgcaccggcaaguccuccaucaugcgcuccgacgcccccaucggcaccugcuccuccgagugcaucacccccaacggcuccauccccaacgacaagcccuuccagaacgucaacaagaucaccuacggcgccugcccccgcuacgucaagcagaacacccucaagcucgccaccggcaugcgcaacguccccgagaagcagacccgcggcaucuucggcgccaucgccggcuucaucgagaacggcugggagggcauggucgacggcugguacggcuuccgccaccagaacuccgagggcaccggccaggccgccgaccucaaguccacccaggccgccaucgaccagaucaacggcaagcucaaccgccucaucgagaagaccaacgagaaguuccaccagaucgagaaggaguucuccgaggucgagggccgcauccaggaccucgagaaguacgucgaggacaccaagaucgaccucugguccuacaacgccgagcuccucgucgcccucgagaaccagcacaccaucgaccucaccgacuccgagaugaacaagcucuucgagaagacccgcaagcagcuccgcgagaacgccgaggacaugggcaacggcugcuucaagaucuaccacaagugcgacaacgccugcaucggcuccauccgcaacggcaccuacgaccacgacgucuaccgcgacgaggcccucaacaaccgcuuccagaucaagggcgucgagcucaaguccggcuacaaggacuggauccucuggaucuccuucgccaucuccugcuuccuccucugcgucguccuccucggcuucaucaugugggccugccagaagggcaacauccgcugcaacaucugcaucuga

SEQ ID NO: 96436 - RNA, 1701 nt, Artificial Sequence
  derived and/or modified CDS sequence (opt2) from hemagglutinin__InfluenzaA__ABB04338
augaagaccaucaucgcccucuccuacaucuucugccucguccucggccaggacuuccccggcaacgacaacuccaccgccacccucugccucggccaccacgccguccccaacggcacccucgucaagaccaucaccaacgaccagaucgaggucaccaacgccaccgagcucguccaguccuccuccaccggcaagaucugcaacaacccccaccgcauccucgacggcaucgacugcacccucaucgacgcccuccucggcgacccccacugcgacggcuuccagaacgagaccugggaccucuucgucgagcgcuccaaggccuucuccaacugcuaccccuacgacguccccgacuacgccucccuccgcucccucgucgccuccuccggcacccucgaguucaucaacgagggcuucaccuggaccggcgucacccagaacggcggcuccaacgccugcaagcgcggccccgacuccggcuucuucucccgccucaacuggcucuacaaguccggcuccaccuaccccguccucaacgucaccaugcccaacaacgacaacuucgacaagcucuacaucuggggcguccaccaccccuccaccgaccaggagcagaccucccucuacguccaggccuccggccgcgucaccgucuccaccaagcgcucccagcagaccaucauccccaacaucggcucccgccccuggguccgcggccucuccucccgcaucuccaucuacuggaccaucgucaagcccggcgacauccucguccucaacuccaacggcaaccucaucgccccccgcggcuacuucaagaugcgcaccggcaaguccuccaucaugcgcuccgacgcccccaucggcaccugcaucuccgagugcaucacccccaacggcuccauccccaacgacaagcccuuccagaacgucaacaagaucaccuacggcgccugccccaaguacgucaagcagaacacccucaagcucgccaccggcaugcgcaacguccccgagaagcagacccgcggccucuucggcgccaucgccggcuucaucgagaacggcugggagggcaugaucgacggcugguacggcuuccgccaccagaacuccgagggcaccggccaggccgccgaccucaaguccacccaggccgccaucgaccagaucaacggcaagcucaaccgcgucaucgagaagaccaacgagaaguuccaccagaucgagaaggaguucuccgaggucgagggccgcauccaggaccucgagaaguacgucgaggacaccaagaucgaccucugguccuacaacgccgagcuccucgucgcccucgagaaccagcacaccaucgaccucaccgacuccgagaugaacaagcucuucgagaagacccgccgccagcuccgcgagaacgccgaggacaugggcaacggcugcuucaagaucuaccacaagugcgacaacgccugcaucggcuccauccgcaacggcaccuacgaccacgacgucuaccgcgacgaggcccucaacaaccgcuuccagaucaagggcgucgagcucaaguccggcuacaaggacuggauccucuggaucuccuucgccaucuccugcuuccuccucugcgucguccuccucggcuucaucaugugggccugccagaagggcaacauccgcugcaacaucugcaucuga

SEQ ID NO: 96437 - RNA, 1701 nt, Artificial Sequence
  derived and/or modified CDS sequence (opt2) from hemagglutinin__InfluenzaA__ABB04349
augaagaccaucaucgcccucuccuacaucuucugccucgucuucgcccagaagcuccccggcaacgacaacuccaccgccacccucugccucggccaccacgccguccccaacggcacccucgucaagaccaucaccaacgaccagaucgaggucaccaacgccaccgagcucguccaguccuccuccaccggccgcaucugcgacuccccccaccgcauccucgacggcaagaacugcacccucaucgacgcccuccucggcgacccccacugcgacggcuuccagaacgagaagugggaccucuucgucgagcgcuccaaggccuucuccaacugcuaccccuacgacguccccgacuacgccucccuccgcucccucgucgccuccuccggcacccucgaguucaucaacgagggcuucaacuggaccggcgucacccaguccggcggcuccuacgccugcaagcgcggcuccgucaacuccuucuucucccgccucaacuggcucuacaaguccgaguccaaguaccccguccucaacgucaccaugcccaacaacggcaaguucgacaagcucuacaucuggggcguccaccaccccuccaccgacaaggagcagaccaaccucuacguccgcgccuccggcaaggucaccgucuccaccaagcgcucccagcagaccgucauccccaacaucggcucccgccccuggguccgcggccucuccucccgcaucuccaucuacuggaccaucgucaagcccggcgacauccuccucaucaacuccaccggcaaccucaucgccccccgcggcuacuucaagauccgcaccggcaaguccuccaucaugcgcuccgacgcccccaucggcaccugcaacuccgagugcaucacccccaacggcuccauccccaacgacaagcccuuccagaacgucaacaagaucaccuacggcgccugcccccgcuacgucaagcagaacacccucaagcucgccaccggcaugcgcaacguccccgagaagcagacccgcggcaucuucggcgccaucgccggcuucaucgagaacggcugggagggcauggucgacggcugguacggcuuccgccaccagaacuccgagggcaccggccaggccgccgaccucaaguccacccaggccgccaucgaccagaucaacggcaagcucaaccgccucaucgagaagaccaacgagaaguuccaccagaucgagaaggaguucuccgaggucgagggccgcauccaggaccucgagaaguacgucgaggacaccaagaucgaccucugguccuacaacgccgagcuccucgucgcccucgagaaccagcacaccaucgaccucaccgacuccgagaugaacaagcucuucgagaagacccgcaagcagcuccgcgagaacgccgaggacaugggcaacggcugcuucaagaucuaccacaagugcgacaacgccugcaucggcuccauccgcaacggcaccuacgaccacgacgucuaccgcgacgaggcccucaacaaccgcuuccagaucaagggcgucgagcucaaguccggcuacaaggacuggauccucuggaucuccuucgccaucuccugcuuccuccucugcgucguccuccucggcuucaucaugugggccugccagaagggcaacauccgcugcaacaucugcaucuga

SEQ ID NO: 96438 - RNA, 1701 nt, Artificial Sequence
  derived and/or modified CDS sequence (opt2) from hemagglutinin__InfluenzaA__ABB04360
augaagaccaucaucgcccucuccuacaucuucugccucgucuucgcccagaagcuccccggcaacgacaacuccaccgccacccucugccucggccaccacgccguccccaacggcacccucgucaagaccaucaccaacgaccagaucgaggucaccaacgccaccgagcucguccaguccuccuccaccggccgcaucugcgacuccccccaccgcauccucgacggcaagaacugcacccucaucgacgcccuccucggcgacccccacugcgacggcuuccagaacgagaagugggaccucuucgucgagcgcuccaaggccuacuccaacugcuaccccuacgacguccccgacuacgccucccuccgcucccucgucgccuccuccggcacccucgaguucaucaacgaggacuucaacuggaccggcgucacccaguccggcggcuccuacgccugcaagcgcggcuccgucaacuccuucuucucccgccucaacuggcuccacaaguccgaguacaaguaccccgcccucaacgucaccaugcccaacaacggcaaguucgacaagcucuacaucuggggcguccaccaccccuccaccgaccgcgagcagaccaaccucuacguccgcgccuccggccgcgucaccgucuccaccaagcgcucccagcagaccgucauccccaacaucggcucccgccccuggguccgcggccucuccucccgcaucuccaucuacuggaccaucgucaagcccggcgacauccuccucaucaacuccaccggcaaccucaucgccccccgcggcuacuucaagauccgcaccggcaaguccuccaucaugcgcuccgacgcccccaucggcaccugcuccuccgagugcaucacccccaacggcuccauccccaacgacaagcccuuccagaacgucaacaagaucaccuacggcgccugcccccgcuacgucaagcagaacacccucaagcucgccaccggcaugcgcaacguccccgagaagcagacccgcggcaucuucggcgccaucgccggcuucaucgagaacggcugggagggcauggucgacggcugguacggcuuccgccaccagaacuccgagggcaccggccaggccgccgaccucaaguccacccaggccgccaucgaccagaucaacggcaagcucaaccgccucaucgagaagaccaacgagaaguuccaccagaucgagaaggaguucuccgaggucgagggccgcauccaggaccucgagaaguacgucgaggacaccaagaucgaccucugguccuacaacgccgagcuccucgucgcccucgagaaccagcacaccaucgaccucaccgacuccgagaugaacaagcucuucgagaagacccgcaagcagcuccgcgagaacgccgaggacaugggcaacggcugcuucaagaucuaccacaagugcgacaacgccugcaucggcuccauccgcaacggcaccuacgaccacgacgucuaccgcgacgaggcccucaacaaccgcuuccagaucaagggcgucgagcucaaguccggcuacaaggacuggauccucuggaucuccuucgccaucuccugcuuccuccucugcgucguccuccucggcuucaucaugugggccugccagaagggcaacauccgcugcaacaucugcaucuga

SEQ ID NO: 96439 - RNA, 1701 nt, Artificial Sequence
  derived and/or modified CDS sequence (opt2) from hemagglutinin__InfluenzaA__ABB04371
augaagaccaucaucgcccucuccuacaucuucuaccucgcccucggccaggaccuccccggcaacgacaacuccaaggccacccucugccucggccaccacgccguccccaacggcacccucgucaagaccaucaccgacgaccagaccgaggucaccaacgccaccgagcucguccaguccuccuccaccggcaagaucugcaacaacccccaccgcauccucgacggcauggacugcacccucaucgacgcccuccucggcgacccccacugcgacgucuuccagaacgagaccugggaccucuucgucgagcgcuccaaggccuucuccaacugcuaccccuacgacguccccgacuacgccucccuccgcucccucgucgccuccuccggcaccauggaguucaucaccgagggcuucaccuggaccgaggucacccagaacggcggcuccaacgccugcaagcgcggccccgacuccggcuucuucucccgccucaacuggcucaccaaguccggccgcaccuaccccguccucaacgucaccaugcccaacaacgacaacuucgacaagcucuacaucuggggcguccaccaccccuccaccgaccaggagcagaccaaccucuacguccagaccuccggccgcgucaccgucuccacccgccgcucccagcagaccaucauccccaacaucggcucccgccccuggguccgcggccucuccucccgcaucuccaucuacuggaccaucgucaagcccggcgacguccucgucaucaacuccaacggcaaccucaucgccccccgcggcuacuucaagaugcgcaccggcaaguccuccaucaugcgcuccgacgcccccaucgacaccugcaucuccgagugcaucacccccaacggcuccauccccaacgacaagcccuuccagaacgucaacaagaucaccuacggcgccugccccaaguacgucaagcagaacacccucaagcucgccaccggcaugcgcaacguccccgagaagcagacccgcggccucuucggcgccaucgccggcuucaucgagaacggcugggagggcaugaucgacggcugguacggcuuccgccaccagaacuccgagggcaccggccaggccgccgaccucaaguccacccaggccgccaucgaccagaucaacggcaagcucaaccgcaucaucgagaagaccaacgagaaguuccaccagaucgagaaggaguucuccgaggucgagggccgcauccaggaccucgagaaguacgucgaggacaccaagaucgaccucugguccuacaacgccgagcuccucgucgcccucgagaaccagcacaccaucgaccucaccgacuccgagaugaacaagcucuucgagaagacccgccgccagcuccgcgagaacgccgaggacaugggcaacggcugcuucaagaucuaccacaagugcgacaacgccugcaucgaguccauccgcaacggcaccuacgaccacgacgucuaccgcgacgaggcccucaacaaccgcuuccagaucaagggcgucgagcucaaguccggcuacaaggacuggauccucuggaucuccuucgccaucuccugcuuccuccucugcgucguccuccucggcuucaucaugugggccugccagcgcggcaacauccgcugcaacaucugcaucuga

SEQ ID NO: 96440 - RNA, 1701 nt, Artificial Sequence
  derived and/or modified CDS sequence (opt2) from hemagglutinin__InfluenzaA__ABB04906
augaagaccaucaucgcccucuccuacauccucugccucgucuucgcccagaagcuccccggcaacgacaacuccaccgccacccucugccucggccaccacgccguccccaacggcacccucgucaagaccaucaccaacgaccagaucgaggucaccaacgccaccgagcucguccaguccuccuccaccggccgcaucugcgacuccccccaccgcauccucgacggcaagaacugcacccucaucgacgcccuccucggcgacccccacugcgacggcuuccagaacaaggagugggaccucuucgucgagcgcuccaaggccuacuccaacugcuaccccuacgacguccccgacuacgccucccuccgcucccucgucgccuccuccggcacccucgaguucaucaacgaggacuucaacuggaccggcgucgcccagaacggcgacuccuacgccugcaagcgcggcuccgucaaguccuucuucucccgccucaacuggcuccacaaguccgaguacaaguaccccgcccucaacgucaccaugcccaacaacgacaaguucgacaagcucuacaucuggggcguccaccaccccuccaccgaccgcgagcagaccucccucuacauccgcgccuccggcaaggucaccgucuccaccaagcgcucccagcagaccgucauccccaacaucggcucccgccccuggguccgcggccucuccucccgcaucuccaucuacuggaccaucgucaagcccggcgacauccuccucaucaacuccaccggcaaccucaucgccccccgcggcuacuucaagauccgcaccggcaaguccuccaucaugcgcuccgacgcccccaucggcaccugcuccuccgagugcaucacccccaacggcuccauccccaacgacaagcccuuccagaacgucaaccgcaucaccuacggcgccugcccccgcuacgucaagcagaacacccucaagcucgccaccggcaugcgcaacguccccgagaagcagacccgcggcaucuucggcgccaucgccggcuucaucgagaacggcugggagggcauggucgacggcugguacggcuuccgccaccagaacuccgagggcaccggccaggccgccgaccucaaguccacccaggccgccaucgaccagaucaacggcaagcucaaccgccucaucgagaagaccaacgagaaguuccaccagaucgagaaggaguucuccgaggucgagggccgcauccaggaccucgagaaguacgucgaggacaccaagaucgaccucugguccuacaacgccgagcuccucgucgcccucgagaaccagcacaccaucgaccucaccgacuccgagaugaacaagcucuucgagaagacccgcaagcagcuccgcgagaacgccgaggacaugggcaacggcugcuucaagaucuaccacaagugcgacaacgccugcaucggcuccauccgcaacggcaccuacgaccacgacgucuaccgcgacgaggcccucaacaaccgcuuccagaucaagggcgucgagcucaaguccggcuacaaggacuggauccucuggaucuccuucgccaucuccugcuuccuccucugcgucguccuccucggcuucaucaugugggccugccagaagggcaacauccgcugcaacaucugcaucuga

SEQ ID NO: 96441 - RNA, 1701 nt, Artificial Sequence
  derived and/or modified CDS sequence (opt2) from hemagglutinin__InfluenzaA__ABB04917
augaagaccaucaucgcccucuccuacaucuucugccucgucuucgcccagaagcuccccggcaacgacaacuccaccgccacccucugccucggccaccacgccguccccaacggcacccucgucaagaccaucaccaacgaccagaucgaggucaccaacgccaccgagcucguccagaucuccuccaccggccgcaucugcgacuccccccaccgcauccucgacggcaagaacugcacccucaucgacgcccuccucggcgacccccacugcgacggcuuccagaacgagaagugggaccucuucgucgagcgcuccaaggccuucuccaacugcuaccccuacgacguccccgacuacgccucccuccgcucccucgucgccuccuccggcacccucgaguucaucaacgagggcuucaacuggaccggcgucacccaguccggcggcuccuacaccugcaagcgcggcuccgucaacuccuucuucucccgccucaacuggcucuacgaguccgaguccaaguaccccguccucaacgucaccaugcccaacaacggcaaguucgacaagcucuacaucuggggcguccaccaccccuccaccgacaaggagcagaccaaccucuacguccgcgccuccggccgcgucaccgucuccaccaagcgcucccagcagaccgucauccccaacaucggcucccgccccuggguccgcggccucuccucccgcaucuccaucuacuggaccaucgucaagcccggcgacauccuccucaucaacuccaccggcaaccucaucgccccccgcggcuacuucaagauccgcaccggcaaguccuccaucaugcgcuccgacgcccccaucggcaccugcuccuccgagugcaucacccccaacggcuccauccccaacgacaagcccuuccagaacgucaacaagaucaccuacggcgccugcccccgcuacgucaagcagaacacccucaagcucgccaccggcaugcgcaacguccccgagaagcagacccgcggcaucuucggcgccaucgccggcuucaucgagaacggcugggagggcauggucgacggcugguacggcuuccgccaccagaacuccgagggcaccggccaggccgccgaccucaaguccacccaggccgccaucgaccagaucaacggcaagcucaaccgccucaucgagaagaccaacgagaaguuccaccagaucgagaaggaguucuccgaggucgagggccgcauccaggaccucgagaaguacgucgaggacaccaagaucgaccucugguccuacaacgccgagcuccucgucgcccucgagaaccagcacaccaucgaccucaccgacuccgagaugaacaagcucuucgagaagacccgcaagcagcuccgcgagaacgccgaggacaugggcaacggcugcuucaagaucuaccacaagugcgacaacgccugcaucggcuccauccgcaacggcaccuacgaccacgacgucuaccgcgacgaggcccucaacaaccgcuuccagaucaagggcgucgagcucaaguccggcuacaaggacuggauccucuggaucuccuucgccaucuccugcuuccuccucugcgucguccuccucggcuucaucaugugggccugccagaagggcaacauccgcugcaacaucugcaucuga

SEQ ID NO: 96442 - RNA, 1701 nt, Artificial Sequence
  derived and/or modified CDS sequence (opt2) from hemagglutinin__InfluenzaA__ABB04928
augaagaccaucaucgcccucuccuacaucuucugccucgucuucgcccaggaccuccccggcaacgacaacuccaccgccacccucugccucggccaccacgccguccccaacggcacccucgucaagaccaucaccaacgaccagaucgaggucaccaacgccaccgagcucguccaguccuccuccaccggcaagaucugcaacaacccccaccgcauccucgacggcaucaacugcacccucaucgacgcccuccucggcgacccccacugcgacggcuuccagaacgagaagugggaccucuucgucgagcgcuccaaggccuucuccaacugcuaccccuacgacguccccgacuacgccucccuccgcucccucgucgccuccuccggcacccucgaguucaucaacgagggcuucaacuggaucggcgucacccagaacggcggcuccaacgccugcaagcgcggcaccgacuccggcuucuucucccgccucaacuggcucuacaaguccggcuccaccuaccccguccagaacgucaccaugcccaacaacgacaacuccgacaagcucuacaucuggggcguccaccaccccuccaccgacaaggagcagaccgaccucuacguccaggccuccggcaaggucaccgucuccaccaagcgcucccagcagaccaucauccccaacgucggcucccgccccuggguccgcggccucuccucccgcaucuccaucuacuggaccaucgucaagcccggcgacauccucgucaucaacuccaacggcaaccucaucgccccccgcggcuacuucaagaugcgcaccggcaaguccuccaucaugcgcuccgacgcccccaucggcaccugcuccuccgagugcaucacccccaacggcuccauccccaacgacaagcccuuccagaacgucaacaagaucaccuacggcgccugccccaaguacgucaagcagaacacccucaagcucgccaccggcaugcgcaacguccccgagaagcagacccgcggcaucuucggcgccaucgccggcuucaucgagaacggcugggagggcaugaucgacggcugguacggcuuccgccaccagaacuccgagggcaccggccaggccgccgaccucaaguccacccaggccgccaucgaccagaucaacggcaagcucaaccgcgucaucgagaagaccaacgagaaguuccaccagaucgagaaggaguucuccgaggucgagggccgcauccaggaccucgagaaguacgucgaggacaccaagaucgaccucugguccuacaacgccgagcuccucgucgcccucgagaaccagcacaccaucgaccucaccgacuccgagaugaacaagcucuucgagaagacccgccgccagcuccgcgagaacgccgaggacaugggcaacggcugcuucaagaucuaccacaagugcgacaacgccugcaucggcuccauccgcaacggcaccuacgaccacgacgucuaccgcgacgaggcccucaacaaccgcuuccagaucaagggcgucgagcucaaguccggcuacaaggacuggauccucuggaucuccuucgccaucuccugcuuccuccucugcgucguccuccucggcuucaucaugugggccugccagaagggcaacauccgcugcaacaucugcaucuga

SEQ ID NO: 96443 - RNA, 1701 nt, Artificial Sequence
  derived and/or modified CDS sequence (opt2) from hemagglutinin__InfluenzaA__ABB04939
augaagaccaucaucgcccucuccuacaucuucugccucgucuucgcccagaagcuccccggcaacgacaacuccaccgccacccucugccucggccaccacgccguccccaacggcacccucgucaagaccaucaccaacgaccagaucgaggucaccaacgccaccgagcucguccaguccuccuccaccggccgcaucugcgacuccccccaccgcauccucgacggcaagaacugcacccucaucgacgcccuccucggcgacccccacugcgacggcuuccagaacgagaagugggaccucuucgucgagcgcuccaaggccuucuccaacugcuaccccuacgacguccccgacuacgccucccuccgcucccucgucgccuccuccggcacccucgaguucaucaacgagggcuucaacuggaccggcgucacccaguccggcggcuccuacaccugcaagcgcggcuccgucaacuccuucuucucccgccucaacuggcucuacgaguccgaguccaaguaccccguccucaacgucaccaugcccaacaacggcaaguucgacaagcucuacaucuggggcguccaccaccccuccaccgacaaggagcagaccaaccucuacguccgcgccuccggccgcgucaccgucuccaccaagcgcucccagcagaccgucauccccaacaucggcucccgccccuggguccgcggccucuccucccgcaucuccaucuacuggaccaucgucaagcccggcgacauccuccucaucaacuccaucggcaaccucaucgccccccgcggcuacuucaagauccgcaccggcaaguccuccaucaugcgcuccgacgcccccaucggcaucugcuccuccgagugcaucacccccaacggcuccauccccaacgacaagcccuuccagaacgucaacaagaucaccuacggcgccugcccccgcuacgucaagcagaacacccucaagcucgccaccggcaugcgcaacguccccgagaagcagacccgcggcaucuucggcgccaucgccggcuucaucgagaacggcugggagggcauggucgacggcugguacggcuuccgccaccagaacuccgagggcaccggccaggccgccgaccucaaguccacccaggccgccgucgaccagaucaacggcaagcucaaccgccucaucgagaagaccaacgagaaguuccaccagaucgagaaggaguucuccgaggucgagggccgcauccaggaccucgagaaguacgucgaggacaccaagaucgaccucugguccuacaacgccgagcuccucgucgcccucgagaaccagcacaccaucgaccucaccgacuccgagaugaacaagcucuucgagaagacccgcaagcagcuccgcgagaacgccgaggacaugggcaacggcugcuucaagaucuaccacaagugcgacaacgccugcaucggcuccauccgcaacggcaccuacgaccacgacgucuaccgcgacgaggcccucaacaaccgcuuccagaucaagggcgucgagcucaaguccggcuacaaggacuggauccucuggaucuccuucgccaucuccugcuuccuccucugcgucguccuccucggcuucaucaugugggccugccagaagggcaacauccgcugcaacaucugcaucuga

SEQ ID NO: 96444 - RNA, 1701 nt, Artificial Sequence
  derived and/or modified CDS sequence (opt2) from hemagglutinin__InfluenzaA__ABB04950
augaagaccaucaucgcccucuccuacaucuucugccucgucuucgcccagaagcuccccggcaacgacaacuccaccgccacccucugccucggccaccacgccguccccaacggcacccucgucaagaccaucaccaacgaccagaucgaggucaccaacgccaccgagcucguccaguccuccuccaccggccgcaucugcgacuccccccaccgcauccucgacggcaagaacugcacccucaucgacgcccuccucggcgacccccacugcgacggcuuccagaacgagaagugggaccucuucgucgagcgcuccaaggccuucuccaacugcuaccccuacgacguccccgacuacgccucccuccgcucccucgucgccuccuccggcacccucgaguucaucaacgagggcuucaacuggaccggcgucacccaguccggcggcuccuacaccugcaagcgcggcuccgucaacuccuucuucucccgccucaacuggcucuacgaguccgaguccaaguaccccguccucaacgucaccaugcccaacaacggcaaguucgacaagcucuacaucuggggcguccaccaccccuccaccgacaaggagcagaccaaccucuacguccgcgccuccggcaaggucaccgucuccaccaagcgcucccagcagaccgucauccccaacaucggcucccgccccuggguccgcggccucuccucccgcaucuccaucuacuggaccaucgucaagcccggcgacauccuccucaucaacuccaccggcaaccucaucgccccccgcggcuacuucaagauccgcaccggcaaguccuccaucaugcgcuccgacgcccccaucggcaccugcuccuccgagugcaucacccccaacggcuccauccccaacgacaagcccuuccagaacgucaacaagaucaccuacggcgccugcccccgcuacgucaagcagaacacccucaagcucgccaccggcaugcgcaacguccccgagaagcagacccgcggcaucuucggcgccaucgccggcuucaucgagaacggcugggagggcauggucgacggcugguacggcuuccgccaccagaacuccgagggcaccggccaggccgccgaccucaaguccacccaggccgccaucgaccagaucaacggcaagcucaaccgccucaucgagaagaccaacgagaaguuccaccagaucgagaaggaguucuccgaggucgagggccgcauccaggaccucgagaaguacgucgaggacaccaagaucgaccucugguccuacaacgccgagcuccucgucgcccucgagaaccagcacaccaucgaccucaccgacuccgagaugaacaagcucuucgagaagacccgcaagcagcuccgcgagaacgccgaggacaugggcaacggcugcuucaagaucuaccacaagugcgacaacgccugcaucggcuccauccgcaacggcaccuacgaccacgacgucuaccgcgacgaggcccucaacaaccgcuuccagaucaagggcgucgagcucaaguccggcuacaaggacuggauccucuggaucuccuucgccaucuccugcuuccuccucugcgucguccuccucggcuucaucaugugggccugccagaagggcaacauccgcugcaacaucugcaucuga

SEQ ID NO: 96445 - RNA, 1701 nt, Artificial Sequence
  derived and/or modified CDS sequence (opt2) from hemagglutinin__InfluenzaA__ABB04983
augaagaccaucaucgcccucuccuacauccucugccucgucuucgcccagaagcuccccggcaacgacaacuccaccgccacccucugccucggccaccacgccguccccaacggcacccucgucaagaccaucaccaacgaccagaucgaggucaccaacgccaccgagcucguccaguccuccuccaccgaccgcaucugcgacuccccccaccagauccucgacggcgagaacugcacccucaucgacgcccuccucggcgacccccacugcgacggcuuccagaacaaggagugggaccucuucgucgagcgcuccaaggccuacuccaacugcuaccccuacgacguccccgacuacgucucccuccgcucccucgucgccuccuccggcacccucgaguucaacaacgaguccuucaacuggaccggcgucgcccagaacggcaccuccuccgccugcaagcgccgcuccgacaaguccuucuucucccgccucaacuggcuccaccagcucaaguacaaguaccccgcccucaacgucaccaugcccaacaacgagaaguucgacaagcucuacaucuggggcguccaccaccccggcaccgacuccgaccagaucucccucuacgcccaggccuccggccgcgucaccgucuccaccaagcgcucccagcagaccgucauccccaacaucggcucccgccccuggguccgcggcgucuccucccgcaucuccaucuacuggaccaucgucaagcccggcgacauccuccucaucaacuccaccggcaaccucaucgccccccgcggcuacuucaagauccgcuccggcaaguccuccaucaugcgcuccgacgcccccaucggcaagugcaacuccgagugcaucacccccaacggcuccauccccaacgacaagcccuuccagaacgucaaccgcaucaccuacggccccugcccccgcuacgucaagcagaacacccucaagcucgccaccggcaugcgcaacguccccgagaagcagacccgcggcaucuucggcgccaucgccggcuucaucgagaacggcugggagggcaugauggacggcugguacggcuuccgccaccagaacuccgagggcaccggccaggccgccgaccucaaguccacccaggccgccaucaaccagaucaacggcaagcucaaccgccucaucgagaagaccaacgagaaguuccaccagaucgagaaggaguucuccgaggucgagggccgcauccaggaccucgagaaguacgucgaggacaccaagaucgaccucugguccuacaacgccgagcuccucgucgcccucgagaaccagcacaccaucgaccucaccgacuccgagaugaacaagcucuucgagcgcaccaagaagcagcuccgcgagaacgccgaggacaugggcaacggcugcuucaagaucuaccacaagugcgacaacgccugcaucggcuccauccgcaacggcaccuacgaccacgacgucuaccgcgacgaggcccucaacaaccgcuuccagaucaagggcgucgagcucaaguccggcuacaaggacuggauccucuggaucuccuucgccaucuccugcuuccuccucugcaucguccuccucggcuucaucaugugggccugccagaagggcaacauccgcugcaacaucugcaucuga

SEQ ID NO: 96446 - RNA, 1701 nt, Artificial Sequence; identical to SEQ ID NO: 96208
  derived and/or modified CDS sequence (opt2) from hemagglutinin__InfluenzaA__ABB04994

SEQ ID NO: 96447 - RNA, 1701 nt, Artificial Sequence
  derived and/or modified CDS sequence (opt2) from hemagglutinin__InfluenzaA__ABB05005
augaagaccaucaucgcccucucccacauccucugccucgucuucgcccagaagcuccccgucaacgacaacuccaccgccacccucugccucggccaccacgccguccccaacggcacccucgucaagaccaucaccaacgaccacaucgaggucaccaacgccaccgagcucguccaguccuccuccaccggccgcaucugcgacuccccccaccagauccucgacggcgagaacugcacccucaucgacgcccuccucggcgacccccacugcgacggcuuccagaacaaggagugggaccucuucgucgagcgcuccaccgccuacuccaacugcuaccccuacgacguccccgacuacgccucccuccgcucccucgucgccuccuccggcacccucgaguucaacaacgaguccuucaacuggaccggcgucgcccagaacggcaccuccuccgccugcaagcgccgcuccaucaaguccuucuucucccgccucaacuggcuccaccagcucaaguacaaguaccccgcccucaacgucaccaugcccaacaacgagaaguucgacaagcucuacaucuggggcguccaccaccccuccaccgacuccgaccagaucucccucuacgcccaggccuccggccgcgucaccgucuccaccaagcgcucccagcagaccgucauccccgacaucggcucccgccccuggguccgcggcgucuccucccgcaucuccaucuacuggaccaucgucaagcccggcgacauccuccucaucaacuccaccggcaaccucaucgccccccgcggcuacuucaagauccgcuccggcaaguccuccaucaugcgcuccaacgcccccaucggcaagugcaacuccgagugcaucacccccaacggcuccguccccaacgacaagcccuuccagaacgucaaccgcaucaccuacggcgccugcccccgcuacgucaagcagaacacccucaagcucgccaccggcaugcgcaacguccccgagaagcagacccgcggcaucuucggcgccaucgccggcuucaucgagaacggcugggagggcauggucgacggcugguacggcuuccgccaccagaacuccgagggcaccggccaggccgccgaccucaaguccacccaggccgccaucaaccagaucaacggcaagcucaaccgccucaucgagaagaccaacgagaaguuccaccagaucgagaaggaguucuccgaggucgagggccgcauccaggaccucgagaaguacgucgaggacaccaagaucgaccucugguccuacaacgccgagcuccucgucgcccucgagaaccagcacaccaucgaccucaccgacuccgagaugaacaagcucuucgagcgcacccgcaagcagcuccgcgagaacgccgaggacaugggcaacggcugcuucaagaucuaccacaagugcgacaacgccugcaucggcuccauccgcaacggcaccuacgaccacgacgucuaccgcgacgaggcccucaacaaccgcuuccagaucaagggcgucgagcucaaguccggcuacaaggacuggauccucuggaucuccuucgccaucuccugcuuccuccucugcgucguccuccucggcuucaucaugugggccugccagaagggcaacauccgcugcaacaucugcaucuga

SEQ ID NO: 96448 - RNA, 1701 nt, Artificial Sequence
  derived and/or modified CDS sequence (opt2) from hemagglutinin__InfluenzaA__ABB05183
augaagaccaucaucgcccucuccuacauccucugccucgucuucgcccagaagcuccccgucaacgacaacuccaccgccacccucugccucggccaccacgccguccccaacggcacccucgucaagaccaucaccaacgagcacaucgaggucaccaacgccaccgagcucguccaguccuccuccaccggccgcaucugcgacuccccccaccagauccucgacggcgagaacugcacccucaucgacgcccuccucggcgacccccacugcgacggcuuccagaacaaggagugggaccucuucgucgagcgcuccaccgccuacuccaacugcuaccccuacgacguccccgacuacgccucccuccgcucccucgucgccuccuccggcacccucgaguucaacaacgaguccuucaacuggaccggcgucgcccagaacggcaccuccuccgccugcaagcgccgcuccaucaaguccuucuucucccgccucaacuggcuccaccagcucaaguacaaguaccccgcccucaacgucaccaugcccaacaacgagaaguucgacaagcucuacaucuggggcguccaccaccccuccaccgacuccgaccagaucucccucuacgcccaggccuccggccgcgucaccgucuccaccaagcgcucccagcagaccgucauccccaacaucggcucccgccccuggguccgcggcgucuccucccgcaucuccaucuacuggaccaucgucaagcccggcgacauccuccucaucaacuccaccggcaaccucaucgccccccgcggcuacuucaagauccgcuccggcaaguccuccaucaugcgcuccaacgcccccaucggcaagugcaacuccgagugcaucacccccaacggcuccauccccaacgacaagcccuuccagaacgucaaccgcaucaccuacggcgccugcccccgcuacgucaagcagaacacccucaagcucgccaccggcaugcgcaacguccccgagaagcagacccgcggcaucuucggcgccaucgccggcuucaucgagaacggcugggagggcauggucgacggcugguacggcuuccgccaccagaacuccgagggcaccggccaggccgccgaccucaaguccacccaggccgccaucaaccagaucaacggcaagcucaaccgccucaucgagaagaccaacgagaaguuccaccagaucgagaaggaguucuccgaggucgagggccgcauccaggaccucgagaaguacgucgaggacaccaagaucgaccucugguccuacaacgccgagcuccucgucgcccucgagaaccagcacaccaucgaccucaccgacuccgagaugaacaagcucuucgagcgcacccgcaagcagcuccgcgagaacgccgaggacaugggcaacggcugcuucaaggucuaccacaagugcgacaacgccugcaucggcuccauccgcaacggcaccuacgaccacgacgucuaccgcgacgaggcccucaacaaccgcuuccagaucaagggcgucgagcucaaguccggcuacaaggacuggauccucuggaucuccuucgccaucuccugcuuccuccucugcgucguccuccucggcuucaucaugugggccugccagaagggcaacauccgcugcaacaucugcaucuga

SEQ ID NO: 96449 - RNA, 1701 nt, Artificial Sequence
  derived and/or modified CDS sequence (opt2) from hemagglutinin__InfluenzaA__ABB05194
augaagaccaucaucgcccucuccuacauccucugccucgucuucgcccagaagcuccccggcaacgacaacuccaccgccacccucugccucggccaccacgccguccccaacggcacccucgucaagaccaucaccaacgaccagaucgaggucaccaacgccaccgagcucguccaguccuccuccaccggccgcaucugcgacuccccccaccagauccucgacggcgagaacugcacccucaucgacgcccuccucggcgacccccacugcgacggcuuccagaacaaggagugggaccucuucgucgagcgcuccaaggccuacuccaacugcuaccccuacgacguccccgacuacgccucccuccgcucccucgucgccuccuccggcacccucgaguucaacaacgaguccuucaacuggaccggcgucgcccagaacggcaccuccuccgccugcaagcgccgcuccaacaaguccuucuucucccgccucaacuggcuccaccagcucaaguacaaguaccccgcccucaacgucaucaugcccaacaacgagaaguucgacaagcucuacaucuggggcguccaccaccccuccaccgacuccgaccagaucucccucuacgcccaggccuccggccgcgucaccgucuccaccaagcgcucccagcagaccgucauccccaacaucggcucccgccccuggguccgcggcgucuccucccgcaucuccaucuacuggaccaucgucaagcccggcgacauccuccucaucaacuccaccggcaaccucaucgccccccgcggcuacuucaagauccgcuccggcaaguccuccgucaugcgcuccgacgccuccaucggcaagugcaacuccgagugcaucacccccaacggcuccauccccaacgacaagcccuuccagaacgucaaccgcaucaccuacggcgccugcccccgcuacgucaagcagaacacccucaagcucgccaccggcaugcgcaacguccccgagaagcagacccgcggcaucuucggcgccaucgccggcuucaucgagaacggcugggagggcauggucgacggcugguacggcuuccgccaccagaacuccgagggcaccggccaggccgccgaccucaaguccacccaggccgccaucaaccagaucaacggcaagcucaaccgccucaucgagaagaccaacgagaaguuccaccagaucgagaaggaguucuccgaggucgagggccgcauccagaaccucgagaaguacgucgaggacaccaagaucgaccucugguccuacaacgccgagcuccucgucgcccucgagaaccagcacaccaucgaccucaccgacuccgagaugaacaagcucuucgagcgcaccaagaagcagcuccgcgagaacgccgaggacaugggcaacggcugcuucaagaucuaccacaagugcgacaacgccugcaucggcuccauccgcaacggcaccuacgaccacgacgucuaccgcgacgaggcccucaacaaccgcuuccagaucaagggcgucgagcucaaguccggcuacaaggacuggauccucuggaucuccuucgccaucuccugcuuccuccucugcgucguccuccucggcuucaucaugugggccugccagaagggcaacauccgcugcaacaucugcaucuga

SEQ ID NO: 96450 - RNA, 1701 nt, Artificial Sequence
  derived and/or modified CDS sequence (opt2) from hemagglutinin__InfluenzaA__ABB05205
augaagaccaucaucgcccucuccuacauccucugccucgucuucgcccagaagcuccccggcaacgacaacuccaccgccacccucugccucggccaccacgccguccccaacggcacccucgucaagaccaucaccaacgaccagaucgaggucaccaacgccaccgagcucguccaguccuccuccaccggccgcaucugcgacuccccccaccagauccucgacggcgagaacugcacccucaucgacgcccuccucggcgacccccacugcgacggcuuccagaacaaggagugggaccucuucgucgagcgcuccaacgccuacuccaacugcuaccccuacgacguccccgacuacgccucccuccgcucccucgucgccuccuccggcacccucgaguucaacuccgaguccuucaacuggaccggcgucgcccagaacggcaccuccuccgccugcaagcgccgcuccaacaaguccuucuucucccgccucaacuggcuccaccagcucaaguacaaguaccccgcccucaacgucaccaugcccaacaacgagaaguucgacaagcucuacaucuggggcguccaccaccccggcaccgacuccgaccagaucucccucuacgcccaggccuccggccgcgucaccgucuccaccaagcgcucccagcagaccgucauccccaacaucggcucccgccccuggguccgcggcgucuccucccgcaucuccaucuacuggaccaucgucaagcccggcgacauccuccucaucaacuccaccggcaaccucaucgccccccgcggcuacuucaagauccgcuccggcaaguccuccaucaugcgcuccgacgcccccaucggcaagugcaacuccgagugcaucacccccaacggcuccauccccaacaacaagcccuuccagaacgucaaccgcaucaccuacggcgccugcccccgcuacgucaagcagaacacccucaagcucgccaccggcaugcgcaacguccccgagaagcagacccgcggcaucuucggcgccaucgccggcuucaucgagaacggcugggagggcauggucgacggcugguacggcuuccgccaccagaacuccgagggcaccggccaggccgccgaccucaaguccacccaggccgccaucaaccagaucaacggcaagcucaaccgccucaucgagaagaccaacgagaaguuccaccagaucgagaaggaguucuccgaggucgagggccgcauccaggaccucgagaaguacgucgaggacaccaagaucgaccucugguccuacaacgccgagcuccucgucgcccucgagaaccagcacaccaucgaccucaccgacuccgagaugaacaagcucuucgagcgcaccaagaagcagcuccgcgagaacgccgaggacaugggcaacggcugcuucaagaucuaccacaagugcgacaacgccugcaucggcuccauccgcaacggcaccuacgaccacgacgucuaccgcgacgaggcccucaacaaccgcuuccagaucaagggcgucgagcucaaguccggcuacaaggacuggauccucuggaucuccuucgccaucuccugcuuccuccucugcgucguccuccucggcuucaucaugugggccugccagaagggcaacauccgcugcaacaucugcaucuga

SEQ ID NO: 96451 - RNA, 1701 nt, Artificial Sequence; identical to SEQ ID NO: 96108
  derived and/or modified CDS sequence (opt2) from hemagglutinin__InfluenzaA__ABB05216

SEQ ID NO: 96452 - RNA, 1701 nt, Artificial Sequence
  derived and/or modified CDS sequence (opt2) from hemagglutinin__InfluenzaA__ABB46392
augaagaccaucaucgcccucuccuacaucuucugccucgccuucgcccaggaccuccccggcaacgacaacuccaccgccacccucugccucggccaccacgccguccccaacggcacccucgucaagaccaucaccaacgaccagaucgaggucaccaacgccaccgagcucguccaguccuccuccaccggcaagaucugcgacaacccccaccgcauccucgacggcaucaacugcacccucaucgacgcccuccucggcgacccccacugcgacggcuuccagaacgagaagugggaccucuucgucgagcgcuccaaggccuucuccaacugcuaccccuacgacguccccgacuacgccucccuccgcucccucgucgccuccuccggcacccucgaguucaucaacgagggcuucaacuggaccggcgucacccagaacggcggcuccuccgccugcaagcgcggccccgacaacggcuucuucucccgccucaacuggcucuacaaguccggcuccaccuaccccguccagaacgucaccaugcccaacaacgacaacuccgacaagcucuacaucuggggcguccaccaccccaacaccgacaaggagcagaccgaccucuacguccaggccuccggcaaggucaccgucuccaccaagcgcucccagcagaccaucauccccaacgucggcucccgccccuggguccgcggccucuccucccgcgucuccaucuacuggaccaucgucaagcccggcgacauccucgucaucaacuccaacggcaaccucaucgccccccgcggcuacuucaagaugcgcaccggcaaguccuccaucaugcgcuccgacgcccccaucggcaccugcuccuccgagugcaucacccccaacggcuccauccccaacgacaagcccuuccagaacgucaacaagaucaccuacggcgccugccccaaguacgucaagcagaacacccucaagcucgccaccggcaugcgcaacguccccgagaagcagacccgcggcaucuucggcgccaucgccggcuucaucgagaacggcugggagggcaugaucgacggcugguacggcuuccgccaccagaacuccgagggcaccggccaggccgccgaccucaaguccacccagaccgccaucgaccagaucaacggcaagcucaaccgcgucaucgagaagaccaacgagaaguuccaccagaucgagaaggaguucuccgaggucgagggccgcauccaggaccucgagaaguacgucgaggacaccaagaucgaccucugguccuacaacgccgagcuccucgucgcccucgagaaccagcacaccaucgaccucaccgacuccgagaugaacaagcucuucgagaagacccgccgccagcuccgcgagaacgccgaggacaugggcaacggcugcuucaagaucuaccacaagugcgacaacgccugcaucggcuccauccgcaacggcaccuacgaccacgacgucuaccgcgacgaggcccucaacaaccgcuuccagaucaagggcgucgagcucaaguccggcuacaaggacuggauccucuggaucuccuucgccaucuccugcuuccuccucugcgucguccuccucggcuucaucaugugggccugccagaagggcaacauccgcugcaacaucugcaucuga

SEQ ID NO: 96453 - RNA, 1701 nt, Artificial Sequence
  derived and/or modified CDS sequence (opt2) from hemagglutinin__InfluenzaA__ABB46414
augaagaccaucaucgcccucuccuacauccucugccucgucuucgcccagaagcuccccggcaacgacaacuccaccgccacccucugccucggccaccacgccguccccaacggcacccucgucaagaccaucaccaacgaccagaucgaggucaccaacgccaccgagcucguccaguccuccuccaccggccgcaucugcgacuccccccaccgcauccucgacggcgagaacugcacccucaucgacgcccuccucggcgacccccacugcgacggcuuccagaacaaggagugggaccucuucgucgagcgcuccaaggccuacuccaacugcuaccccuacgacguccccgacuacgccucccuccgcucccucgucgccuccuccggcacccucgaguucaacaacgaguccuucaacuggaccggcgucgcccagaacggcaccuccuccgccugcaagcgccgcuccaucaaguccuucuucucccgccucaacuggcuccaccagcucaaguacaaguaccccgcccucaacgucaccaugcccaacaacgacaaguucgacaagcucuacaucuggggcguccaccaccccuccaccgacuccgaccagaccucccucuacgcccaggccuccggccgcgucaccgucuccaccaagcgcucccagcagaccgucauccccaacaucggcucccgccccuggguccgcggcgucuccucccgcaucuccaucuacuggaccaucgucaagcccggcgacauccuccucaucaacuccaccggcaaccucaucgccccccgcggcuacuucaagauccgcuccggcaaguccuccaucaugcgcuccgacgcccccaucggcaagugcaacuccgagugcaucacccccaacggcuccauccccaacgacaagcccuuccagaacgucaaccgcaucaccuacggcgccugcccccgcuacgucaagcagaacacccucaagcucgccaccggcaugcgcaacguccccgagaagcagacccgcggcaucuucggcgccaucgccggcuucaucgagaacggcugggagggcauggucgacggcugguacggcuuccgccaccagaacuccgagggcaccggccaggccgccgaccucaaguccacccaggccgccaucaaccagaucaacggcaagcucaaccgccucaucgagaagaccaacgagaaguuccaccagaucgagaaggaguucuccgaggucgagggccgcauccaggaccucgagaaguacgucgaggacaccaagaucgaccucugguccuacaacgccgagcuccucgucgcccucgagaaccagcacaccaucgaccucaccgacuccgagaugaacaagcucuucgagcgcacccgcaagcagcuccgcgagaacgccgaggacaugggcaacggcugcuucaagaucuaccacaagugcgacaacgccugcaucggcuccauccgcaacggcaccuacgaccacgacgucuaccgcgacgaggcccucaacaaccgcuuccagaucaagggcgucgagcucaaguccggcuacaaggacuggauccucuggaucuccuucgccaucuccugcuuccucuucugcgucguccuccucggcuucaucaugugggccugccagaagggcaacauccgcugcaacaucugcaucuga

SEQ ID NO: 96454 - RNA, 1701 nt, Artificial Sequence
  derived and/or modified CDS sequence (opt2) from hemagglutinin__InfluenzaA__ABB46425
augaagaccaucaucgcccucuccuacauccucugccucgucuucgcccagaagcuccccggcaacgacaacuccaccgccacccucugccucggccaccacgccguccccaacggcacccucgucaagaccaucaccuccgaccagaucgaggucaccaacgccaccgagcucguccaguccuccuccaccggcaagaucugcgacuccccccaccgcauccucgacggcgagaacugcacccucaucgacgcccuccucggcgacccccacugcgacggcuuccagaacaaggagugggaccucuucgucgagcgcuccaaggccuacuccaacugcuaccccuacgacguccccgacuacgccucccuccgcucccucgucgccuccuccggcacccucgaguucaacaacgaguccuucaacuggaccggcgucgcccagaacggcaccuccuucgccugcaagcgccgcuccaucaaguccuucuucucccgccucaacuggcuccaccagcucaaguacaaguaccccgcccucaacgucaccaugcccaacaacgacaaguucgacaagcucuacaucuggggcguccaccaccccuccaccgacuccgaccagaccucccucuacgcccaggccuccggccgcgucaccgucuccaccaagcgcucccagcagaccgucauccccaacaucggcucccgccccuggguccgcggcgucuccucccgcaucuccaucuacuggaccaucgucaagcccggcgacauccuccucaucaacuccaccggcaaccucaucgccccccgcggcuacuucaagauccgcuccggcaaguccuccaucaugcgcuccgacgcccccaucggcaagugcaacuccgagugcaucacccccaacggcuccauccccaacgacaagcccuuccagaacgucaaccgcaucaccuacggcgccugcccccgcuacgucaagcagaacacccucaagcucgccaccggcaugcgcaacguccccgagaagcagacccgcggcaucuucggcgccaucgccggcuucaucgagaacggcugggagggcauggucgacggcugguacggcuuccgccaccagaacuccgagggcaccggccaggccgccgaccucaaguccacccaggccgccaucaaccagaucaacggcaagcucaaccgccucaucgagaagaccaacgagaaguuccaccagaucgagaaggaguucuccgaggucgagggccgcauccaggaccucgagaaguacgucgaggacaccaagaucgaccucugguccuacaacgccgagcuccucgucgcccucgagaaccagcacaccaucgaccucaccgacuccgagaugaacaagcucuucgagcgcacccgcaagcagcuccgcgagaacgccgaggacaugggcaacggcugcuucaagaucuaccacaagugcgacaacgccugcaucggcuccauccgcaacggcaccuacgaccacgacgucuaccgcgacgaggcccucaacaaccgcuuccagaucaagggcgucgagcucaaguccggcuacaaggacuggauccucuggaucuccuucgccaucuccugcuuccuccucugcgucguccuccucggcuucaucaugugggccugccagaagggcaacauccgcugcaacaucugcaucuga

SEQ ID NO: 96455 - RNA, 1701 nt, Artificial Sequence
  derived and/or modified CDS sequence (opt2) from hemagglutinin__InfluenzaA__ABB46436
augaagaccaucaucgcccucuccuacauccucugccucgucuucgcccagaagcuccccggcaacgacaacuccaccgccacccucugccucggccaccacgccguccccaacggcaccaucgucaagaccaucaccaacgaccagaucgaggucaccaacgccaccgagcucguccaguccuccuccaccggcggcaucugcgacuccccccaccagauccucgacggcgagaacugcacccucaucgacgcccuccucggcgacccccagugcgacggcuuccagaacaagaagugggaccucuucgucgagcgcuccaaggccuacuccaacugcuaccccuacgacguccccgacuacgccucccuccgcucccucgucgccuccuccggcacccucgaguucaacaacgaguccuucaacuggaccggcgucacccagaacggcaccuccuccgccugcaagcgccgcuccaacaacuccuucuucucccgccucaacuggcucacccaccucaaguucaaguaccccgcccucaacgucaccaugcccaacaacgagaaguacgacaagcucuacaucuggggcguccaccaccccggcaccgacaacgaccagaucucccucuacgcccaggccuccggccgcaucaccgucuccaccaagcgcucccagcagaccgucauccccaacaucggcucccgcccccgcguccgcgacauccccucccgcaucuccaucuacuggaccaucgucaagcccggcgacauccuccucaucaacuccaccggcaaccucaucgccccccgcggcuacuucaagauccgcuccggcaaguccuccaucaugcgcuccgacgcccccaucggcaagugcaacuccgagugcaucacccccaacggcuccauccccaacgacaagcccuuccagaacgucaaccgcaucaccuacggcgccugcccccgcuacgucaagcagaacacccucaagcucgccaccggcaugcgcaacguccccgagaagcagacccgcggcaucuucggcgccaucgccggcuucaucgagaacggcugggagggcauggucgacggcugguacggcuuccgccaccagaacuccgagggcaucggccaggccgccgaccucaaguccacccaggccgccaucaaccagaucaacggcaagcucaaccgccucaucggcaagaccaacgagaaguuccaccagaucgagaaggaguucuccgaggucgagggccgcauccaggaccucgagaaguacgucgaggacaccaagaucgaccucugguccuacaacgccgagcuccucgucgcccucgagaaccagcacaccaucgaccucaccgacuccgagaugaacaagcucuucgagcgcaccaagaagcagcuccgcgagaacgccgaggacaugggcaacggcugcuucaagaucuaccacaagugcgacaacgccugcaucggcuccauccgcaacggcaccuacgaccacgacgucuaccgcgacgaggcccucaacaaccgcuuccagaucaagggcgucgagcucaaguccggcuacaaggacuggauccucuggaucuccuucgccaucuccugcuuccuccucugcgucgcccuccucggcuucaucaugugggccugccagaagggcaacauccgcugcaacaucugcaucuga

SEQ ID NO: 96456 - RNA, 1701 nt, Artificial Sequence; identical to SEQ ID NO: 96389
  derived and/or modified CDS sequence (opt2) from hemagglutinin__InfluenzaA__ABB46447

SEQ ID NO: 96457 - RNA, 1701 nt, Artificial Sequence
  derived and/or modified CDS sequence (opt2) from hemagglutinin__InfluenzaA__ABB46458
augaagaccaucaucgcccucuccuacauccucugccucgucuucgcccagaagcuccccggcaacgacaacuccaccgccacccucugccucggccaccacgccguccccaacggcaccaucgucaagaccaucaccaacgaccagaucgaggucaccaacgccaccgagcucguccaguccuccuccaccggcggcaucugcgacuccccccaccagauccucgacggcgagaacugcacccucaucgacgcccuccucggcgacccccagugcgacggcuuccagaacaagaagugggaccucuucgucgagcgcuccaaggccuacuccaacugcuaccccuacgacguccccgacuacgccucccuccgcucccucgucgccuccuccggcacccucgaguucaacaacgaguccuucaacuggaccggcgucacccagaacggcaccuccuccgccugcaagcgccgcuccaacaacuccuucuucucccgccucaacuggcucacccaccucaaguucaaguaccccgcccucaacgucaccaugcccaacaacgagaaguucgacaagcucuacaucuggggcguccaccaccccggcaccgacaacgaccagaucucccucuacgcccaggccuccggccgcaucaccgucuccaccaagcgcaaccagcagaccgucauccccaacaucggcucccgcccccgcguccgcgacauccccucccgcaucuccaucuacuggaccaucgucaagcccggcgacauccuccucaucaacuccaccggcaaccucaucgccccccgcggcuacuucaagauccgcuccggcaaguccuccaucaugcgcuccgacgcccccaucggcaagugcaaguccgagugcaucacccccaacggcuccauccccaacgacaagcccuuccagaacgucaaccgcaucaccuacggcgccugcccccgcuacgucaagcagaacacccucaagcucgccaccggcaugcgcaacguccccgagaagcagacccgcggcaucuucggcgccaucgccggcuucaucgagaacggcugggagggcauggucgacggcugguacggcuuccgccaccagaacuccgagggcaucggccaggccgccgaccucaaguccacccaggccgccaucaaccagaucaacggcaagcucaaccgccucaucggcaagaccaacgagaaguuccaccagaucgagaaggaguucuccgaggucgagggccgcauccaggaccucgagaaguacgucgaggacaccaagaucgaccucugguccuacaacgccgagcuccucgucgcccucgagaaccagcacaccaucgaccucaccgacuccgagaugaacaagcucuucgagcgcaccaagaagcagcuccgcgagaacgccgaggacaugggcaacggcugcuucaagaucuaccacaagugcgacaacgccugcaucggcuccauccgcaacggcaccuacgaccacgacgucuaccgcgacgaggcccucaacaaccgcuuccagaucaagggcgucgagcucaaguccggcuacaaggacuggauccucuggaucuccuucgccaucuccugcuuccuccucugcgucgcccuccucggcuucaucauguggggcugccagaagggcaacauccgcugcaacaucugcaucuga

SEQ ID NO: 96458 - RNA, 1701 nt, Artificial Sequence
  derived and/or modified CDS sequence (opt2) from hemagglutinin__InfluenzaA__ABB51961
augaagaccaucaucgcccucuccuacauccucugccucgucuucgcccagaagcuccccggcaacgacaacuccaccgccacccucugccucggccaccacgccguccccaacggcaccaucgucaagaccaucaccaacgaccagaucgaggucaccaacgccaccgagcucguccaguccuucuccaccggcggcaucugcgacuccccccaccagauccucgacggcgagaacugcacccucaucgacgcccuccucggcgacccccagugcgacggcuuccagaacaagaagugggaccucuucgucgagcgcuccaaggccuacuccaacugcuaccccuacgacguccccgacuacgccugcguccgcucccucgucgccuccuccggcacccucgaguucaacaacgaguccuucaacugggccggcgucacccagaacggcaccuccuccgccugcaagcgccgcuccaacaaguccuucuucucccgccucaacuggcucacccaccucaaguacaaguaccccgcccucaacgucaccaugcccaacaacgagaaguucgacaagcucuacaucuggggcguccaccaccccggcaccgacuccgaccagaucucccucuacgcccaggccuccggccgcaucaccgucuccacccagcgcugcaagcagcucgucauccccaacaucggcucccgcccccgcguccgcgacgucuccucccgcaucuccaucuacuggaccaucgucaaccccggcgacauccuccucaucaacuccaccggcaaccucaucgccccccgcggcuacuucaagauccgcuccggcaaguccuccaucaugcgcuccgacgcccccaucggcaagugcaacuccgagugcaucacccccaacggcuccauccccaacgacaagcccuuccagaacgucaaccgcaucaccuacggcgccugcccccgcuacgucaagcagaacacccucaagcucgccaccggcaugcgcaacguccccgagaagcagacccgcggcaucuucggcgccaucgccggcuucaucgagaacggcugggagggcauggucgacggcugguacggcuuccgccaccagaacuccgagggcaccggccaggccgccgaccucaaguccacccaggccgccaucaaccagaucaacggcaagcucaaccgccucaucggcaagaccaacgagaaguuccaccagaucgagaaggaguucuccgaggucgagggccgcauccaggaccucgagaaguacgucgaggacaccaagaucgaccucugguccuacaacgccgagcuccucgucgcccucgagaaccagcacaccaucgaccucaccgacuccgagaugaacaagcucuucgagcgcaccaagaagcagcuccgcgagaacgccgaggacaugggcaacggcugcuucaagaucuaccacaagugcgacaacgccugcaucgaguccauccgcaacggcaccuacgaccacgacgucuaccgcgacgaggcccucaacaaccgcuuccagaucaagggcgucgagcucaaguccggcuacaaggacuggauccucuggaucuccuucgccaucuccugcuuccuccucugcgucgcccuccucggcuucaucaugugggccugccagaagggcaacauccgcugcaacaucugcaucuga

SEQ ID NO: 96459 - RNA, 1698 nt, Artificial Sequence
  derived and/or modified CDS sequence (opt2) from hemagglutinin__InfluenzaA__ABB51962
augaaggccaagcuccucguccuccucugcaccuucaccgccaccuacgccgacaccaucugcaucggcuaccacgccaacaacuccaccgacaccgucgacaccguccucgagaagaacgucaccgucacccacuccgucaaccuccucgaggacucccacaacggcaagcucugccuccucaagggcaucgccccccuccagcucggcaacugcuccgucgccggcuggauccucggcaaccccgagugcgagcuccucaucuccaaggaguccugguccuacaucgucgagacccccaaccccgagaacggcaccugcuaccccggcuacuucgccgacuacgaggagcuccgcgagcagcucuccuccgucuccuccuucgagcgcuucgagaucuuccccaagggcuccuccuggcccaaccacaccgucaccggcgucuccgccuccugcucccacaacggcaaguccuccuucuaccgcaaccuccucuggcucaccggcaagaacggccucuaccccaaccucuccauguccuacgucaacaacaaggagaaggagguccucguccucuggggcguccaccacccccccaacaucggcaaccagcgcgcccucuaccacaccgagaacgccuacgucuccgucgucuccucccacuacucccgccgcuucacccccgagaucgccaagcgccccaagguccgcgaccaggagggccgcaucaacuacuacuggacccuccucgagcccggcgacaccaucaucuucgaggccaacggcaaccucaucgcccccugguacgccuucgccaugucccgcggcuucggcuccggcaucuccaccuccaacgcccccaugggcgagugcgacgccaaguuccagaccccccagggcggcaucaacaucucccuccccuuccagaacguccaccccgucaccaucggcgagugccccaacuacguccgcuccgccaagcuccgcauggucaccggccuccgcaacauccccuccauccagucccgcggccucuucggcgccaucgccggcuucaucgagggcggcuggaccggcauggucgacggcugguacggcuaccaccaccagaacgagcagggcuccggcuacgccgccgaccagaaguccacccagaacgccaucaacggcaucaccaacaaggucaacuccgucaucgagaagaugaacacccaguucaccgccgucggcaaggaguucaacaagcucgagcgccgcauggagaaccucaacaagaaggucgacgacggcuuccucgacaucuggaccuacaacgccgagcuccucguccuccucgagaacgagcgcacccucgacuuccacgacuccaacgucaagaaccucuacgagaaggucaagucccagcucaagaacaacgccaaggagaucggcaacggcugcuccgaguucuaccacaagugcaacaacgagugcauggaguccgucaagaacggcaccuacgacuaccccaaguacuccgaggaguccaagcucaaccgcgagaagaucgacggcgucaagcucgaguccaugggcgucuaccagauccucgccaucuacuccaccgucgccuccucccucguccuccucgucucccucggcgccaucuccuucuggaugugcuccaacggcucccuccagugccgcaucugcaucuga

SEQ ID NO: 96460 - RNA, 1701 nt, Artificial Sequence
  derived and/or modified CDS sequence (opt2) from hemagglutinin__InfluenzaA__ABB51963
augaagaccaucaucgcccucuccuacauccucugccucgucuucgcccagaagcuccccggcaacgacaacuccaccgccacccucugccucggccaccacgccguccccaacggcaccaucgucaagaccaucaccaacgaccgcaucgaggucaccaacgccaccgagcucguccaguccuccuccaccggcggcaucugcgacuccccccaccagauccucgacggcgagaacugcacccucaucgacgcccuccucggcgacccccagugcgacggcuuccagaacaagaagugggaccucuucgucgagcgcuccaaggccuacuccaacugcuaccccuacgacguccccgacuacgccucccuccgcucccucgucgccuccuccggcacccucgaguucaacaacgaguccuucaacuggaccggcgucacccagaacggcaccuccuccgccugcaagcgccgcuccaacaacuccuucuucucccgccucaacuggcucacccaccucaaguucaaguaccccgcccucaacgucaccaugcccaacaacgagaaguucgacaagcucuacaucuggggcguccaccaccccggcaccgacaacgaccagaucucccucuacgcccaggccuccggccgcaucaccgucuccaccaagcgcucccagcagaccgucauccccaacaucggcucccgcccccgcguccgccacauccccucccgcaucuccaucuacuggaccaucgucaaccccggcgacauccuccucaucaacuccaccggcaaccucaucgccccccgcggcuacuucaagauccgcuccggcaaguccuccaucaugcgcuccgacgcccccaucggcaagugcaacuccgagugcaucacccccaacggcuccauccccaacgacaagcccuuccagaacgucaaccgcaucaccuacggcgccugcccccgcuacgucaagcagaacacccucaagcucgccaccggcaugcgcaacguccccgagaagcagaaccgcggcaucuucggcgccaucgccggcuucaucgagaacggcugggagggcauggucgacggcugguacggcuuccgccaccagaacuccgagggcaucggccaggccgccgaccucaaguccacccaggccgccaucaaccagaucaacgagaagcucaaccgccucaucggcaagaccaacgagaaguuccaccagaucgagaaggaguucuccgaggucgagggccgcauccaggaccucgagaaguacgucgaggacaccaagaucgaccucugguccuacaacgccgagcuccucgucgcccucgagaaccagcacaccaucgaccucaccgacuccgagaugaacaagcucuucgagcgcaccaagaagcagcuccgcgagaacgccgaggacaugggcaacggcugcuucaaggucuaccacaagugcgacaacgccugcaucggcuccauccgcaacggcaccuacgaccacaacgucuaccgcgacgaggcccucaacaaccgcuuccagaucaagggcgucgagcucaaguccggcuacaaggacuggauccucuggaucuccuucgccaucuccugcuuccuccucugcgucgcccuccucggcuucaucaugugggccugccagaagggcaacauccgcugcaacaucugcaucuga

SEQ ID NO: 96461 - RNA, 1701 nt, Artificial Sequence; identical to SEQ ID NO: 96318
  derived and/or modified CDS sequence (opt2) from Hemagglutinin__InfluenzaA__ABB51964

SEQ ID NO: 96462 - RNA, 1698 nt, Artificial Sequence
  derived and/or modified CDS sequence (opt2) from hemagglutinin__InfluenzaA__ABB53603
augaaggucaagcuccucauccuccucugcaccuucaccgccaccuacgccgacaccaucugcaucggcuaccacgccaacaacuccaccgacaccgucgacaccguccucgagaagaacgucaccgucacccacuccgucaaccuccucgaggacucccacaacggcaagcucugccuccucaagggcaucgccccccuccagcucggcaacugcuccgucgccggcuggauccucggcaaccccgagugcgagcuccucaucuccaaggaguccugguccuacaucgucgagacccccaaccccgagaacggcgccugcuaccccggcuacuucgccgacuacgaggagcuccgcgagcagcucuccuccgucuccuccuucgagcgcuucgagaucuuccccaaggaguccuccuggcccaaccacaccgucaccggcgucuccgccuccugcucccacaacggcaaguccuccuucuaccgcaaccuccucuggcucaccggcaagaacggccucuaccccaaccucuccaaguccuacgccaacaacaagaagaaggagguccucauccucuggggcguccaccacccccccaacaucggcaaccagcgcacccucuacuacaccgagaacgccuacgucuccgucgucuccucccacuacucccgccgcuucacccccgagaucaccaagcgccccaagguccgcgaccaggagggccgcaucaacuacuacuggacccuccucgagcccggcgacaccaucaucuucgaggccaacggcaaccucaucgcccccugguacgccuucgcccucucccgcggcuucggcuccggcaucaucaccuccaacgcccccauggacgagugcgacgccaagugccagaccccccagggcgccaucaacuccucccuccccuuccagaacguccaccccgucaccaucggcgagugccccaaguacguccgcuccgccaagcuccgcauggucaccggccuccgcaacauccccuccauccagucccgcggccucuucggcgccaucgccggcuucaucgagggcggcuggaccggcauggucgacggcugguacggcuaccaccaccagaacgagcagggcuccggcuacgccgccgaccagaaguccacccagaacgccaucaacggcaucaccaacaaggucaacuccgucaucgagaagaugaacacccaguucaccgccgucggcaaggaguucaacaagcucgagcgccgcauggagaaccucaacaagaaggucgacgacggcuuccucgacaucuggaccuacaacgccgagcuccucguccuccucgagaacgagcgcacccucgacuuccacgacuccaacgucaagaaccucuacgagaaggucaagucccagcucaagaacaacgccaaggagaucggcaacggcugcuucgaguucuaccacaagugcaacaacgagugcauggaguccgucaagaacggcaccuacgacuaccccaaguacuccgaggaguccaagcucaaccgcgagaagaucgacggcgucaagcucgacuccaugggcgucuaccagauccucgccaucuacuccaccgucgccuccucccucguccuccucgucucccucggcgccaucuccuucuggaugugcuccaacggcucccuccagugccgcaucugcaucuga

SEQ ID NO: 96463 - RNA, 1701 nt, Artificial Sequence; identical to SEQ ID NO: 96291
  derived and/or modified CDS sequence (opt2) from hemagglutinin__InfluenzaA__ABB53614

SEQ ID NO: 96464 - RNA, 1701 nt, Artificial Sequence; identical to SEQ ID NO: 96291
  derived and/or modified CDS sequence (opt2) from hemagglutinin__InfluenzaA__ABB53625

SEQ ID NO: 96465 - RNA, 1701 nt, Artificial Sequence; identical to SEQ ID NO: 96318
  derived and/or modified CDS sequence (opt2) from hemagglutinin__InfluenzaA__ABB53652

SEQ ID NO: 96466 - RNA, 1701 nt, Artificial Sequence
  derived and/or modified CDS sequence (opt2) from hemagglutinin__InfluenzaA__ABB53663
augaagaccaucuucgcccucuccuacauccucugccucgucuucgcccagaagcuccccggcaacgacaacuccaccgccacccucugccucggccaccacgccguccccaacggcaccaucgucaagaccaucaccaacgaccagaucgaggucaccaacgccaccgagcucguccaguccuccuccaccggcggcaucugcgacuccccccaccagauccucgacggcgagaacugcacccucaucgacgcccuccucggcgacccccagugcgacggcuuccagaacaagaagugggaccucuucgucgagcgcuccaaggcccacuccaacugcuaccccuacgacguccccgacuacgccucccuccgcucccucgucgccuccuccggcacccucgaguucaacaacgaguccuucaacuggaccggcgucacccagaacggcaccuccuccgccugcaagcgccgcuccaacaacuccuucuucucccgccucaacuggcucacccaccucaaguucaaguaccccgcccucaacgucaccaugcccaacaacgagaacuucgacaagcucuacaucuggggcguccaccaccccggcaccgacaacgaccagaucucccucuacgcccaggccuccggccgcaucaccgucuccaccaagcgcucccagcagaccgucauccccaacaucggcucccgcccccgcguccgcgacauccccucccgcaucuccaucuacuggaccaucgucaagcccggcgacauccuccucaucaacuccaccggcaaccucaucgccccccgcggcuacuucaagauccgcuccggcaaguccuccaucaugcgcuccgacgcccccaucggcaagugcaacuccgagugcaucacccccaacggcuccauccccaacgacaagcccuuccagaacgucaaccgcaucaccuacggcgccugcccccgcuacgucaagcagaacacccucaagcucgccaccggcaugcgcaacguccccgagaagcagacccgcggcaucuucggcgccaucgccggcuucaucgagaacggcugggagggcauggucgacggcugguacggcuuccgccaccagaacuccgagggcaucggccaggccgccgaccucaaguccacccaggccgccaucaaccagaucaacggcaagcucaaccgccucaucggcaagaccaacgagaaguuccaccagaucgagaaggaguucuccgaggucgagggccgcauccaggaccucgagaaguacgucgaggacaccaagaucgaccucugguccuacaacgccgagcuccucgucgcccucgagaaccagcacaccaucgaccucaccgacuccgagaugaacaagcucuucgagcgcaccaagaagcagcuccgcgagaacgccgaggacaugggcaacggcugcuucaagaucuaccacaagugcgacaacgccugcaucggcuccauccgcaacggcaccuacgaccacgacgucuaccgcgacgaggcccucaacaaccgcuuccagaucaagggcgucgagcucaaguccggcuacaaggacuggauccucuggaucuccuucgccaucuccugcuuccuccucugcgucgcccuccucggcuucaucaugugggccugccagaagggcaacauccgcugcaacaucugcaucuga

SEQ ID NO: 96467 - RNA, 1701 nt, Artificial Sequence; identical to SEQ ID NO: 96291
  derived and/or modified CDS sequence (opt2) from hemagglutinin__InfluenzaA__ABB53685

SEQ ID NO: 96468 - RNA, 1701 nt, Artificial Sequence
  derived and/or modified CDS sequence (opt2) from hemagglutinin__InfluenzaA__ABB53696
augaagaccaucaucgcccucuccuacauccucugccucgucuucgcccagaagcuccccggcaacgacaacuccaccgccacccucugccucggccaccacgccguccccaacggcacccucgucaagaccaucaccaacgaccagaucgaggucaccaacgccaccgagcucguccaguccuccuccaccggccgcaucugcgacuccccccaccagauccucgacggcgagaacugcacccucaucgacgcccuccucggcgacccccacugcgacggcuuccagaacaaggagugggaccucuucgucgagcgcuccaaggccuacuccaacugcuaccccuacgacguccccgacuacgccucccuccgcucccucgucgccuccuccggcacccucgaguucaacaacgaguccuucaacuggaccggcgucgcccagaacggcaccuccuccgccugcaagcgccgcuccaacaaguccuucuucucccgccucaacuggcuccaccagcucaaguacaaguaccccgcccucaacgucaccaugcccaacaacgagaaguucgacaagcucuacaucuggggcguccaccaccccuccaccgacuccgaccagaucucccucuacgcccaggccuccggccgcgucaccgucuccaccaagcgcucccagcagaccgucauccccaacaucggcucccgccccuggguccgcggcgucuccucccgcaucuccaucuacuggaccaucgucaagcccggcgacauccuccucaucaacuccaccggcaaccucaucgccccccgcggcuacuucaagauccgcuccggcaaguccuccaucaugcgcuccgacgcccccaucggcaagugcaacuccgagugcaucacccccaacggcuccauccccaacgacaagcccuuccagaacgucaaccgcaucaccuacggcgccugcccccgcuacgucaagcagaacacccucaagcucgccaccggcaugcgcaacguccccgagaagcagacccgcggcaucuucggcgccaucgccggcuucaucgagaacggcugggagggcauggucgacggcugguacggcuuccgccaccagaacuccgagggcaccggccaggccgccgaccucaaguccacccaggccgccaucaaccagaucaacggcaagcucaaccgccucaucgagaagaccaacgagaaguuccaccagaucgagaaggaguucuccgaggucgagggccgcauccaggaccucgagaaguacgucgaggacaccaagaucgaccucugguccuacaacgccgagcuccucgucgcccucgagaaccagcacaccaucgaccucaccgacuccgagaugaacaagcucuucgagcgcaccaagaagcagcuccgcgagaacgccgaggacaugggcaacggcugcuucaagaucuaccacaagugcgacaacgccugcaucggcuccauccgcaacggcaccuacgaccacgacgucuaccgcgacgaggcccucaacaaccgcuuccagaucaagggcgucgagcucaaguccggcuacaaggacuggauccucuggaucuccuucgccaucuccugcuuccuccucugcaucgcccuccucggcuucaucaugugggccugccagaagggcaacauccgcugcaacgucugcaucuga

SEQ ID NO: 96469 - RNA, 1698 nt, Artificial Sequence; identical to SEQ ID NO: 96332
  derived and/or modified CDS sequence (opt2) from hemagglutinin__InfluenzaA__ABB53707

SEQ ID NO: 96470 - RNA, 1701 nt, Artificial Sequence; identical to SEQ ID NO: 96279
  derived and/or modified CDS sequence (opt2) from hemagglutinin__InfluenzaA__ABB53718

SEQ ID NO: 96471 - RNA, 1698 nt, Artificial Sequence
  derived and/or modified CDS sequence (opt2) from hemagglutinin__InfluenzaA__ABB53740
augaaggucaagcuccucguccuccucugcaccuucaccgccaccuacgccgacaccaucugcaucggcuaccacgccaacaacuccaccgacaccgucgacaccguccucgagaagaacgucaccgucacccacuccgucaaccuccucgaggacucccacaacggcaagcucugccuccucaagggcaucgccccccuccagcucggcaacugcuccgucgccggcuggauccucggcaaccccgagugcgagcuccucaucuccaaggaguccugguccuacaucgucgagacccccaaccccgagaacggcaccugcuaccccggcuacuucgccgacuacgaggagcuccgcgagcagcucuccuccgucuccuccuucgagcgcuucgagaucuuccccaaggaguccuccuggcccaaccacaccgucaccggcgucuccgccuccugcucccacaacggcaaguccuccuucuaccgcaaccuccucuggcucaccggcaagaacggccucuaccccaaccucuccaaguccuacgccaacaacaaggagaaggagguccucguccucuggggcguccaccacccccccaacaugggcgaccagcgcgcccucuaccacaccgagaacgccuacgucuccgucgucuccucccacuacucccgccgcuucacccccgagaucgccaagcgccccaagguccgcgaccaggagggccgcaucaacuacuacuggacccuccucgagcccggcgagaccaucaucuucgaggccaacggcaaccucaucgccccccgcuacgccuucgcccucucccgcggcuucggcuccggcaucaucaccuccaacgcccccauggacgagugcgacgccaagugccagaccccccagggcgccaucaacuccucccuccccuuccagaacguccaccccgucaccaucggcgagugccccaaguacguccgcuccaccaagcuccgcauggucaccggccuccgcaacauccccuccauccagucccgcggccucuucggcgccaucgccggcuucaucgagggcggcuggaccggcauggucgacggcugguacggcuaccaccaccagaacgagcagggcuccggcuacgccgccgaccagaaguccacccagaacgccaucaacggcaucaccaacaaggucaacuccgucaucgagaagaugaacacccaguucaccgccgucggcaaggaguucaacaagcucgagcgccgcauggagaaccucaacaagaaggucgacgacggcuuccucgacaucuggaccuacaacgccgagcuccucguccuccucgagaacgagcgcacccucgacuuccacgacuccaacgucaagaaccucuacgagaaggucaagucccagcucaagaacaacgccaaggagaucggcaacggcugcuucgaguucuaccacaagugcaacgacgagugcauggaguccgucaagaacggcaccuacgacuaccccaaguacuccgaggaguccaagcucaaccgcgagaagaucgacggcgucaagcucgaguccaugggcgucuaccagauccucgccaucuacuccaccgucgccuccucccucguccuccucgucucccucggcgccaucuccuucuggaugugcuccaacggcucccuccagugccgcaucugcaucuga

SEQ ID NO: 96472 - RNA, 1701 nt, Artificial Sequence
  derived and/or modified CDS sequence (opt2) from hemagglutinin__InfluenzaA__ABB53751
augaagaccaucaucgcccucuccuacaucuccugccucgucuucgcccagaaccuccccggcaacgacaacuccaccgccacccucugccucggccaccacgccguccccaacggcacccucgucaagaccaucaccaacgaccagaucgaggucaccaacgccaccgagcucguccaguccuccuccaccggccgcaucugcgacuccccccaccgcauccucgacggcaagaacugcacccucaucgacgcccuccucggcgacccccacugcgacggcuuccagaacgagaagugggaccucuucgucgagcgcuccaaggccuucuccaacugcuaccccuacgacguccccgacuacgccucccuccgcucccucgucgccuccuccggcacccucgaguucaucaacgagggcuucaacuggaccggcgucacccaguccggcggcuccuacgccugcaagcgcggcuccgacaacuccuucuucucccgccucaacuggcucuacaaguccgaguccaaguaccccguccucaacgucaccaugcccaacaacggcaacuucgacaagcucuacaucuggggcguccaccaccccuccaccgacaaggagcagaccaaccucuacguccgcgccuccggccgcgucaccgucuccaccaagcgcucccagcagaccaucauccccaacaucggcucccgccccuggguccgcggccucuccuccggcaucuccaucuacuggaccaucgucaagcccggcgacauccuccucaucaacuccaacggcaaccucaucgccccccgcggcuacuucaagauccgcaccggcaaguccuccauccuccgcuccgacgcccccaucggcaccugcuccuccgagugcaucacccccaacggcuccauccccaacgacaagcccuuccagaacgucaacaagaucaccuacggcgccugccccaaguacgucaagcagaacacccucaagcucgccaccggcaugcgcaacguccccgagaagcagacccgcggcaucuucggcgccaucgccggcuucaucgagaacggcugggagggcauggucgacggcugguacggcuuccgccaccagaacuccgagggcaccggccaggccgccgaccucaaguccacccaggccgccaucgaccagaucaacggcaagcucaaccgcgucaucgagaagaccaacgagaaguuccaccagaucgagaaggaguucuccgaggucgagggccgcauccaggaccucgagaaguacgucgaggacaccaagaucgaccucugguccuacaacgccgagcuccucgucgcccucgagaaccagcacaccaucgaccucaccgacuccgagaugaacaagcucuucgagaagacccgccgccagcuccgcgagaacgccgaggacaugggcaacggcugcuucaagaucuaccacaagugcgacaacgccugcaucggcuccauccgcaacggcaccuacgaccacgacgucuaccgcgacgaggcccucaacaaccgcuuccagaucaagggcgucgagcucaaguccggcuacaaggacuggauccucuggaucuccuucgccaucuccugcuuccuccucugcgucguccuccucggcuucaucaugugggccugccagaagggcaacauccgcugcaacaucugcaucuga

SEQ ID NO: 96473 - RNA, 1701 nt, Artificial Sequence
  derived and/or modified CDS sequence (opt2) from hemagglutinin__InfluenzaA__ABB60007
augaagaccaucaucgcccucuccuacauccucugccucgucuucgcccagaagcuccccggcaacgacaacuccaccgccacccucugccucggccaccacgccguccccaacggcacccucgucaagaccaucaccaacgaccagaucgaggucaccaacgccaccgagcucguccaguccuccuccaccgaccgcaucugcgacuccccccaccgcauccucgacggcgagaacugcacccucaucgacgcccuccucggcgacccccacugcgacggcuuccagaacaaggagugggaccucuucgucgagcgcuccaaggccuacuccaacugcuaccccuacgacguccccgacuacgccucccuccgcucccucgucgccuccuccggcacccucgaguucaacaacgaguccuucaacuggaccggcgucgcccagaacggcaccuccuacgccugcaagcgccgcuccaucaaguccuucuucucccgccucaacuggcuccaccagcucaaguacaaguaccccgcccucaacgucaccaugcccaacaacgacaaguucgacaagcucuacaucuggggcguccaccaccccuccaccgacuccgaccagaccucccucuacgcccaggccuccggccgcgucaccgucuccaccaagcgcucccagcagaccgucauccccaacaucggcucccgccccuggguccgcggcgucuccucccgcaucuccaucuacuggaccaucgucaagcccggcgacauccuccucaucaacuccaccggcaaccucaucgccccccgcggcuacuucaagauccgcuccggcaaguccuccaucaugcgcuccgacgcccccaucggcaagugcaacuccgagugcaucacccccaacggcuccauccccaacgacaagcccuuccagaacgucaaccgcaucaccuacggcgccugcccccgcuacgucaagcagaacacccucaagcucgccaccggcaugcgcaacguccccgagaagcagacccgcggcaucuucggcgccaucgccggcuucaucgagaacggcugggagggcauggucgacggcugguacggcuuccgccaccagaacuccgagggcaccggccaggccgccgaccucaaguccacccaggccgccaucaaccagaucaacggcaagcucaaccgccucaucgagaagaccaacgagaaguuccaccagaucgagaaggaguucuccgaggucgagggccgcauccaggaccucgagaaguacgucgaggacaccaagaucgaccucugguccuacaacgccgagcuccucgucgcccucgagaaccagcacaccaucgaccucaccgacuccgagaugaacaagcucuucgagcgcacccgcaagcagcuccgcgagaacgccgaggacaugggcaacggcugcuucaagaucuaccacaagugcgacaacgccugcaucggcuccauccgcaacggcaccuacgaccacgacgucuaccgcgacgaggcccucaacaaccgcuuccagaucaagggcgucgagcucaaguccggcuacaaggacuggauccucuggaucuccuucgccaucuccugcuuccuccucugcgucguccuccucggcuucaucaugugggccugccagaagggcaacauccgcugcaacaucugcaucuga

SEQ ID NO: 96474 - RNA, 1701 nt, Artificial Sequence
  derived and/or modified CDS sequence (opt2) from hemagglutinin__InfluenzaA__ABB77853
augaagaccaucaucgcccucuccuacaucuccugccucgucuucgcccagaagcuccccggcaacgacaacuccaccgccacccucugccucggccaccacgccguccccaacggcacccucgucaagaccaucaccaacgaccagaucgaggucaccaacgccaccgagcucguccaguccuccuccaccggccgcaucugcgacuccccccaccgcauccucgacggcgagaacugcacccucaucgacgcccuccucggcgacccccacugcgacggcuuccagaacaaggagugggaccucuucgucgagcgcuccaaggccuacuccaacugcuaccccuacgacguccccgacuacgccucccuccgcucccucgucgccuccuccggcacccucgaguucaacaacgaguccuucaacuggaccggcgucgcccagaacggcaccuccuacgccugcaagcgccgcuccaucaaguccuucuucucccgccucaacuggcuccaccagcucaaguacaaguaccccgcccucaacgucaccaugcccaacaacgacaaguucgacaagcucuacaucuggggcguccaccaccccuccaccgacuccgaccagaccucccucuacgcccaggccuccggccgcgucaccgucuccaccaagcgcucccagcagaccgucauccccaacaucggcucccgccccuggguccgcggcgucuccucccgcaucuccaucuacuggaccaucgucaagcccggcgacauccuccucaucaacuccaccggcaaccucaucgccccccgcggcuacuucaagauccgcuccggcaaguccuccaucaugcgcuccgacgcccccaucggcaagugcaacuccgagugcaucacccccgacggcuccauccccaacgacaagcccuuccagaacgucaaccgcaucaccuacggcgccugcccccgcuacgucaagcagaacacccucaagcucgccaccggcaugcgcaacguccccgagaagcagacccgcggcaucuucggcgccaucgccggcuucaucgagaacggcugggagggcauggucgacggcugguacggcuuccgccaccagaacuccgagggcaccggccaggccgccgaccucaaguccacccaggccgccaucaaccagaucaacggcaagcucaaccgccucaucgagaagaccaacgagaaguuccaccagaucgagaaggaguucuccgaggucgagggccgcauccaggaccucgagaaguacgucgaggacaccaagaucgaccucugguccuacaacgccgagcuccucgucgcccucgagaaccagcacaccaucgaccucaccgacuccgagaugaacaagcucuucgagcgcacccgcaagcagcuccgcgagaacgccgaggacaugggcaacggcugcuucaagaucuaccacaagugcgacaacgccugcaucggcuccauccgcaacggcaccuacgaccacgacgucuaccgcgacgaggcccucaacaaccgcuuccagaucaagggcgucgagcucaaguccggcuacaaggacuggauccucuggaucuccuucgccaucuccugcuuccuccucugcgucguccuccucggcuucaucaugugggccugccagaagggcaacauccgcugcaacaucugcaucuga

SEQ ID NO: 96475 - RNA, 1701 nt, Artificial Sequence
  derived and/or modified CDS sequence (opt2) from hemagglutinin__InfluenzaA__ABB79731
augaagaccaucaucgcccucuccuacauccucugccucgucuucgcccaggagcuccccggcaacgacaacuccaccgccacccucugccucggccaccacgccguccccaacggcaccaucgucaagaccaucaccaacgaccagaucgaggucaccaacgccaccgagcucguccagaacuccuccaccggcggcaucugcgacuccccccaccagauccucgacggcgagaacugcacccucaucgacgcccuccucggcgacccccagugcgacggcuuccagaacaagaagugggaccucuucgucgagcgcuccaaggccuacuccaacugcuaccccuacgacguccccgacuacgccucccuccgcucccucgucgccuccuccggcacccucgaguucaacaacgaguccuucaacuggaccggcgucacccagaacggcaccuccuccgccugcaagcgccgcuccaacaacuccuucuucucccgccucaacuggcucacccaccucaaguucaaguaccccgcccucaacgucaccaugcccaacaacgagaaguucgacaagcucuacaucuggggcguccaccaccccggcaccgacaacgaccagaccucccucuacgcccaggccuccggccgcaucaccgucuccaccaagcgcucccagcagaccgucauccccaacaucggcucccgcccccgcguccgcgacauccccucccgcaucuccaucuacuggaccaucgucaagcccggcgacauccuccucaucaacuccaccggcaaccucaucgccccccgcggcuacuucaagauccgcuccggcaaguccuccaucaugcgcuccgacgcccccaucggcaagugcaacuccgagugcaucacccccaacggcuccauccccaacgacaagcccuuccagaacgucaaccgcaucaccuacggcgccugcccccgcuacgucaagcagaacacccucaagcucgccaccggcaugcgcaacguccccgagaagcagacccgcggcaucuucggcgccaucgccggcuucaucgagaacggcugggagggcauggucgacggcugguacggcuuccgccaccagaacuccgagggcaucggccaggccgccgaccucaaguccacccaggccgccaucaaccagaucaacggcaagcucaaccgccucaucggcaagaccaacgagaaguuccaccagaucgagaaggaguucuccgaggucgagggccgcauccaggaccucgagaaguacgucgaggacaccaagaucgaccucugguccuacaacgccgagcuccucgucgcccucgagaaccagcacaccaucgaccucaccgacuccgagaugaacaagcucuucgagcgcaccaagaagcagcuccgcgagaacgccgaggacaugggcaacggcugcuucaagaucuaccacaagugcgacaacgccugcaucggcuccauccgcaacggcaccuacgaccacgacgucuaccgcgacgaggcccucaacaaccgcuuccagaucaagggcgucgagcucaaguccggcuacaaggacuggauccucuggaucuccuucgccaucuccugcuuccuccucugcgucgcccuccucggcuucaucaugugggccugccagaagggcaacauccgcugcaacaucugcaucuga

SEQ ID NO: 96476 - RNA, 1701 nt, Artificial Sequence
  derived and/or modified CDS sequence (opt2) from hemagglutinin__InfluenzaA__ABB79788
augaagaccaucaucgcccucuccuacaucuucugccucgucuucgcccagaagcuccccggcaacgacaacuccaccgccacccucugccucggccaccacgccguccccaacggcacccucgucaagaccaucaccaacgaccagaucgaggucaccaacgccaccgagcucguccaguccuccuccaccggccgcaucugcgacuccccccaccgcauccucgacggcaagaacugcacccucaucgacgcccuccucggcgacccccacugcgacggcuuccagaacgagaagugggaccucuucgucgagcgcuccaaggccuucuccaacugcuaccccuacgacguccccgacuacgccucccuccgcucccucgucgccuccuccggcacccucgaguucaucaacgagggcuucaacuggaccggcgucacccaguccggcggcuccuacgccugcaagcgcggcuccgucaacuccuucuucucccgccucaacuggcucuacgaguccgaguccaaguaccccguccucaacgucaccaugcccaacaacggcaaguucgacaagcucuacaucuggggcguccaccaccccaucaccgacaaggagcagaccaaccucuacguccgcgccuccggccgcgucaccgucuccaccaagcgcucccagcagaccgucauccccaacaucggcucccgccccuggguccgcggccucuccucccgcaucuccaucuacuggaccaucgucaagcccggcgacauccuccucaucaacuccaccggcaaccucaucgccccccgcggcuacuucaagauccgcaccggcaaguccuccaucaugcgcuccgacgcccccaucggcaccugcuccuccgagugcaucacccccaacggcuccauccccaacgacaagcccuuccagaacgucaacaagaucaccuacggcgccugcccccgcuacgucaagcagaacacccucaagcucgccaccggcaugcgcaacguccccgagaagcagacccgcggcaucuucggcgccaucgccggcuucaucgagaacggcugggagggcauggucgacggcugguacggcuuccgccaccagaacuccgagggcaccggccaggccgccgaccucaaguccacccaggccgccaucgaccagaucaacggcaagcucaaccgccucaucgagaagaccaacgagaaguuccaccagaucgagaaggaguucuccgaggucgagggccgcauccaggaccucgagaaguacgucgaggacaccaagaucgaccucugguccuacaacgccgagcuccucgucgcccucgagaaccagcacaccaucgaccucaccgacuccgagaugaacaagcucuucgagaagacccgcaagcagcuccgcgagaacgccgaggacaugggcaacggcugcuucaagaucuaccacaagugcgacaacgccugcaucggcuccauccgcaacggcaccuacgaccacgacgucuaccgcgacgaggcccucaacaaccgcuuccagaucaagggcgucgagcucaaguccggcuacaaggacuggauccucuggaucuccuucgccaucuccugcuuccuccucugcgucguccuccucggcuucaucaugugggccugccagaagggcaacauccgcugcaacaucugcaucuga

SEQ ID NO: 96477 - RNA, 1701 nt, Artificial Sequence
  derived and/or modified CDS sequence (opt2) from hemagglutinin__InfluenzaA__ABB79799
augaagaccaucaucgcccucuccuacaucuucugccucgucuucgcccagaagcuccccggcaacgacaacuccaccgccacccucugccucggccaccacgccguccccaacggcacccucgucaagaccaucaccaacgaccagaucgaggucaccaacgccaccgagcucguccaguccuccuccaccggccgcaucugcgacuccccccaccgcauccucgacggcaagaacugcacccucaucgacgcccuccucggcgacccccacugcgacggcuuccagaacgagaagugggaccucuucgucgagcgcuccaaggccuucuccaacugcuaccccuacgacguccccgacuacgccucccuccgcucccucgucgccuccuccggcacccucgaguucaucaacgagggcuucaacuggaccggcgucacccaguccggcggcuccuacgccugcaagcgcggcuccgucaacuccuucuucucccgccucaacuggcucuacgaguccgaguccaaguaccccguccucaacgucaccaugcccaacaacggcaaguucgacaagcucuacaucuggggcguccaccaccccuccaccgacaaggagcagaccaaccucuacguccgcgccuccggcaaggucaccgucuccaccaagcgcucccagcagaccgucauccccaacaucggcucccgccccuggguccgcggccucuccucccgcaucuccaucuacuggaccaucgucaagcccggcgacauccuccucaucaacuccaccggcaaccucaucgccccccgcggcuacuucaagauccgcaccggcaaguccuccaucaugcgcuccgacgcccccaucggcaccugcuccuccgagugcaucacccccaacggcuccauccccaacgacaagcccuuccagaacgucaacaagaucaccuacggcgccugcccccgcuacgucaagcagaacacccucaagcucgccaccggcaugcgcaacguccccgagaagcagacccgcggcaucuucggcgccaucgccggcuucaucgagaacggcugggagggcauggucgacggcugguacggcuuccgccaccagaacuccgagggcaccggccaggccgccgaccucaaguccacccaggccgccaucgaccagaucaacggcaagcucaaccgccucaucgagaagaccaacgagaaguuccaccagaucgagaaggaguucuccgaggucgagggccgcauccaggaccucgagaaguacgucgaggacaccaagaucgaccucugguccuacaacgccgagcuccucgucgcccucgagaaccagcacaccaucgaccucaccgacuccgagaugaacaagcucuucgagaagacccgcaagcagcuccgcgagaacgccgaggacaugggcaacggcugcuucaagaucuaccacaagugcgacaacgccugcaucggcuccauccgcaacggcaccuacgaccacgacgucuaccgcgacgaggcccucaacaaccgcuuccagaucaagggcgucgagcucaaguccggcuacaaggacuggauccucuggaucuccuucgccaucuccugcuuccuccucugcgucguccuccucggcuucaucaugugggccugccagaagggcaacauccgcugcaacaucugcaucuga

SEQ ID NO: 96478 - RNA, 1701 nt, Artificial Sequence
  derived and/or modified CDS sequence (opt2) from hemagglutinin__InfluenzaA__ABB79810
augaagaccaucaucgcccucuccuacauccucugccucgucuucgcccagaagcuccccggcaacgacaacuccaccgccacccucugccucggccaccacgccguccccaacggcacccucgucaagaccaucaccaacgaccagaucgaggucaccaacgccaccgagcucguccaguccuccuccaccggccgccucugcgacuccccccaccgcauccucgacggcaagaacugcacccucaucgacgcccuccucggcgacccccacugcgacggcuuccagaacaaggagugggaccucuucgucgagcgcuccaaggccuacuccaacugcuaccccuacgacguccccgacuacgccucccuccgcucccucgucgccuccuccggcacccucgaguucaucaacgaggacuucaacuggaccggcgucgcccaggacggcggcuccuacgccugccgccgcggcuccgucaacuccuucuucucccgccucaacuggcuccacaagcucgaguacaaguaccccgcccucaacgucaccaugcccaacaacggcaaguucgacaagcucuacaucuggggcguccaccaccccuccaccgacuccgaccagaccucccucuacguccgcgccuccggccgcgucaccgucuccaccaagcgcucccagcagaccgucauccccaacaucggcucccgccccuggguccgcggccaguccucccgcaucuccaucuacuggaccaucgucaagcccggcgacauccuccucaucgacuccaccggcaaccucaucgccccccgcggcuacuucaagauccgcaacggcaaguccuccaucaugcgcuccgacgcccccaucggcaacugcuccuccgagugcaucacccccaacggcuccauccccaacgacaagcccuuccagaacgucaaccgcaucaccuacggcgccugcccccgcuacgucaagcagcacacccucaagcucgccaccggcaugcgcaacguccccgagaagcagacccgcggcaucuucggcgccaucgccggcuucaucgagaacggcugggagggcauggucgacggcugguacggcuuccgccaccagaacuccgagggcaccggccaggccgccgaccucaaguccacccaggccgccaucgaccagaucaacggcaagcucaaccgccucaucgagaagaccaacgagaaguuccaccagaucgagaaggaguucuccgaggucgagggccgcauccaggaccucgagaaguacgucgaggacaccaagaucgaccucugguccuacaacgccgagcuccucgucgcccucgagaaccagcacaccaucgaccucaccgacuccgagaugaacaagcucuucgagcgcacccgcaagcagcuccgcgagaacgccgaggacaugggcaacggcugcuucaagaucuaccacaagugcgacaacgccugcaucggcuccauccgcaacggcaccuacgaccacgacgucuaccgcgacgaggcccucaacaaccgcuuccagaucaagggcgucgagcucaaguccggcuacaaggacuggauccucuggaucuccuucgccaucuccugcuuccuccucugcgucguccuccucggcuucaucaugugggccugccagaagggcaacauccgcugcaacaucugcaucuga

SEQ ID NO: 96479 - RNA, 1701 nt, Artificial Sequence
  derived and/or modified CDS sequence (opt2) from hemagglutinin__InfluenzaA__ABB79957
augaagaccaucaucgcccucuccuacauccucugccucgucuucgcccagaagcuccccggcaacgacaacuccaccgccacccucugccucggccaccacgccguccccaacggcacccucgucaagaccaucaccaacgaccagaucgaggucaccaacgccaccgagcucguccaguccuccuccaccggccgccucugcgacuccccccaccgcauccucgacggcaagaacugcacccucaucgacgcccuccucggcgacccccacugcgacggcuuccagaacaaggagugggaccucuucgucgagcgcuccaaggccuacuccaacugcuaccccuacgacguccccgacuacgccucccuccgcucccucgucgccuccuccggcacccucgaguucaucaacgaggacuucaacuggaccggcgucgcccaggacggcggcuccuacgccugccgccgcggcuccgucaacuccuucuucucccgccucaacuggcuccacaagcucgaguacaaguaccccgcccucaacgucaccaugcccaacaacggcaaguucgacaagcucuacaucuggggcguccaccaccccuccaccgacuccgaccagaccucccucuacguccgcgccuccggccgcgucaccgucuccaccaagcgcucccagcagaccgucauccccaacaucggcucccgccccuggguccgcggccaguccucccgcaucggcaucuacuggaccaucgucaagcccggcgacauccuccucaucaacuccaccggcaaccucaucgccccccgcggcuacuucaagauccgcaacggcaaguccuccaucaugcgcuccgacgcccccaucggcaacugcuccuccgagugcaucacccccaacggcuccauccccaacgacaagcccuuccagaacgucaaccgcaucaccuacggcgccugcccccgcuacgucaagcagcacacccucaagcucgccaccggcaugcgcaacguccccgagaagcagacccgcggcaucuucggcgccaucgccggcuucaucgagaacggcugggagggcauggucgacggcugguacggcuuccgccaccagaacuccgagggcaccggccaggccgccgaccucaaguccacccaggccgccaucgaccagaucaacggcaagcucaaccgccucaucgagaagaccaacgagaaguuccaccagaucgagaaggaguucuccgaggucgagggccgcauccaggaccucgagaaguacgucgaggacaccaagaucgaccucugguccuacaacgccgagcuccucgucgcccucgagaaccagcacaccaucgaccucaccgacuccgagaugaacaagcucuucgagcgcacccgcaagcagcuccgcgagaacgccgaggacaugggcaacggcugcuucaagaucuaccacaagugcgacaacgccugcaucggcuccauccgcaacggcaccuacgaccacgacgucuaccgcgacgaggcccucaacaaccgcuuccagaucaagggcgucgagcucaaguccggcuacaaggacuggauccucuggaucuccuucgccaucuccugcuuccuccucugcgucguccuccucggcuucaucaugugggccugccagaagggcaacauccgcugcaacaucugcaucuga

SEQ ID NO: 96480 - RNA, 1701 nt, Artificial Sequence
  derived and/or modified CDS sequence (opt2) from hemagglutinin__InfluenzaA__ABB79968
augaagaccaucaucgcccucuccuacauccucugccucgucuucgcccagaagcuccccggcaacgacaacuccaccgccacccucugccucggccaccacgccguccccaacggcacccucgucaagaccaucaccaacgaccagaucgaggucaccaacgccaccgagcucguccaguccuccuccaccggccgccucugcgacuccccccaccgcauccucgacggcaagaacugcacccucaucgacgcccuccucggcgacccccacugcgacggcuuccagaacaaggagugggaccucuucgucgagcgcuccaaggccuacuccaacugcuaccccuacgacguccccgacuacgccucccuccgcucccucgucgccuccuccggcacccucgaguucaucaacgaggacuucaacuggaccggcgucgcccaggacggcggcuccuacgccugccgccgcggcuccgucaacuccuucuucucccgccucaacuggcuccacaagcucgaguacaaguaccccgcccucaacgucaccaugcccaacaacggcaaguucgacaagcucuacaucuggggcguccaccaccccuccaccgacuccgaccagaccucccucuacguccgcgccuccggccgcgucaccgucuccaccaagcgcucccagcagaccgucauccccaacaucggcucccgccccuggguccgcggccaguccucccgcaucuccaucuacuggaccaucgucaagcccggcgacauccuccucaucaacuccaccggcaaccucaucgccccccgcggcuacuucaagauccgcaacggcaaguccuccaucaugcgcuccgacgcccccaucggcaacugcuccuccgagugcaucacccccaacggcuccauccccaacgacaagcccuuccagaacgucaaccgcaucaccuacggcgccugcccccgcuacgucaagcagcacacccucaagcucgccaccggcaugcgcaacguccccgagaagcagacccgcggcaucuucggcgccaucgccggcuucaucgagaacggcugggagggcauggucgacggcugguacggcuuccgccaccagaacuccgagggcaccggccaggccgccgaccucaaguccacccaggccgccaucgaccagaucaacggcaagcucaaccgccucaucgagaagaccaacgagaaguuccaccagaucgagaaggaguucuccgaggucgagggccgcauccaggaccucgagaaguacgucgaggacaccaagaucgaccucugguccuacaacgccgagcuccucgucgcccucgagaaccagcacaccaucgaccucaccgacuccgagaugaacaagcucuucgagcgcacccgcaagcagcuccgcgagaacgccgaggacaugggcaacggcugcuucaagaucuaccacaagugcgacaacgccugcaucggcuccauccgcaacggcaccuacgaccacgacgucuaccgcgacgaggcccucaacaaccgcuuccagaucaagggcgucgagcucaaguccggcuacaaggacuggauccucuggaucuccuucgccaucuccugcuuccuccucugcgucguccuccucggcuucaucaugugggccugccagaagggcaacauccgcugcaacaucugcaucuga

SEQ ID NO: 96481 - RNA, 1698 nt, Artificial Sequence
  derived and/or modified CDS sequence (opt2) from hemagglutinin__InfluenzaA__ABB79979
augaaggccaagcuccucguccuccucugcaccuucaccgccaccuacgccgacaccaucugcaucggcuaccacgccaacaacuccaccgacaccgucgacaccguccucgagaagaacgucaccgucacccacuccgucaaccuccucgaggacucccacaacggcaagcucugccuccucaagggcaucgccccccuccagcucggcaacugcuccgucgccggcuggauccucggcaaccccgagugcgagcuccucaucuccaaggaguccugguccuacaucgucgagacccccaaccccgagaacggcaccugcuaccccggcuacuucgccgacuacgaggagcuccgcgagcagcucuccuccgucuccuccuucgagcgcuucgagaucuuccccaagggcuccuccuggcccaaccacaccgucaccggcgucuccgccuccugcucccacaacggcaaguccuccuucuaccgcaaccuccucuggcucaccggcaagaacggccucuaccccaaccucuccauguccuacgucaacaacaaggagaaggagguccucguccucuggggcguccaccacccccccaacaucggcgaccagcgcgcccucuaccacaccgagaacgccuacgucuccgucgucuccucccacuacucccgccgcuucacccccgagaucgccaagcgccccaagguccgcgaccaggagggccgcaucaacuaccacuggacccuccucgagcccggcgacaccaucaucuucgaggccaacggcaaccucaucgcccccugguacgccuucgcccucucccgcggcuucggcuccggcaucaucaccuccaacgcccccauggacgagugcgacgccaagugccagaccccccagggcgccaucaacuccucccuccccuuccagaacguccaccccgucaccaucggcgagugccccaaguacguccgcuccgccaagcuccgcauggucaccggccuccgcaacauccccuccauccagucccgcggccucuucggcgccaucgccggcuucaucgagggcggcuggaccggcauggucgacggcugguacggcuaccaccaccagaacgagcagggcuccggcuacgccgccgaccagaaguccacccagaacgccaucaacggcaucaccaacaaggucaacuccgucaucgagaagaugaacacccaguucaccgccgucggcaaggaguucaacaagcucgagcgccgcauggagaaccucaacaagaaggucgacgacggcuuccucgacaucuggaccuacaacgccgagcuccucguccuccucgagaacgagcgcacccucgacuuccacgacuccaacgucaagaaccucuacgagaaggucaagucccagcucaagaacaacgccaaggagaucggcaacggcugcuucgaguucuaccacaagugcaacaacgagugcauggaguccgucaagaacggcaccuacgacuaccccaaguacuccgaggaguccaagcucaaccgcgagaagaucgacggcgucaagcucgaguccaugggcgucuaccagauccucgccaucuacuccaccgucgccuccucccucguccuccucgucucccucggcgccaucuccuucuggaugugcuccaacggcucccuccagugccgcaucugcaucuga

SEQ ID NO: 96482 - RNA, 1698 nt, Artificial Sequence
  derived and/or modified CDS sequence (opt2) from hemagglutinin__InfluenzaA__ABB79990
augaaggccaagcuccucguccuccucugcaccuucaccgccaccuacgccgacaccaucugcaucggcuaccacgccaacaacuccaccgacaccgucgacaccguccucgagaagaacgucaccgucacccacuccgucaaccuccucgaggacucccacaacggcaagcucugccuccucaagggcaucgccccccuccagcucggcaacugcuccgucgccggcuggauccucggcaaccccgagugcgagcuccucaucuccaaggaguccugguccuacaucgucgagacccccaaccccgagaacggcaccugcuaccccggcuacuucgccgacuacgaggagcuccgcgagcagcucuccuccgucuccuccuucgagcgcuucgagaucuuccccaagggcuccuccuggcccaaccacaccgucaccggcgucuccgccuccugcucccacaacggcaaguccuccuucuaccgcaaccuccucuggcucaccggcaagaacggccucuaccccaaccucuccauguccuacgucaacaacaaggagaaggagguccucguccucuggggcguccaccacccccccaacaucggcgaccagaaggcccucuaccacaccgagaacgccuacgucuccgucgucuccucccacuacucccgccgcuucacccccgagaucgccaagcgccccaagguccgcgaccaggagggccgcaucaacuacuacuggacccuccucgagcccggcgacaccaucaucuucgaggccaacggcaaccucaucgcccccugguacgccuucgcccucucccgcggcuucggcuccggcaucaucaccuccaacgcccccauggacgagugcgacgccaagugccagaccccccagggcgccaucaacuccucccuccccuuccagaacguccaccccgucaccaucggcgagugccccaaguacguccgcuccgccaagcuccgcauggucaccggccuccgcaacauccccuccauccagucccgcggccucuucggcgccaucgccggcuucaucgagggcggcuggaccggcauggucgacggcugguacggcuaccaccaccagaacgagcagggcuccggcuacgccgccgaccagaaguccacccagaacgccaucaacggcaucaccaacaaggucaacuccgucaucgagaagaugaacacccaguucaccgccgucggcaaggaguucaacaagcucgagcgccgcauggagaaccucaacaagaaggucgacgacggcuuccucgacaucuggaccuacaacgccgagcuccucguccuccucgagaacgagcgcacccucgacuuccacgacuccaacgucaagaaccucuacgagaaggucaagucccagcucaagaacaacgccaaggagaucggcaacggcugcuucgaguucuaccacaagugcaacaacgagugcauggaguccgucaagaacggcaccuacgacuaccccaaguacuccgaggaguccaagcucaaccgcgagaagaucgacggcgucaagcucgaguccaugggcgucuaccagauccucgccaucuacuccaccgucgccuccucccucguccuccucgucucccucggcgccaucuccuucuggaugugcuccaacggcucccuccagugccgcaucugcaucuga

SEQ ID NO: 96483 - RNA, 1701 nt, Artificial Sequence
  derived and/or modified CDS sequence (opt2) from hemagglutinin__InfluenzaA__ABB80001
augaagaccaucaucgcccucuccuacacccucugccucgucuucgcccagaagcuccccggcaacgacaacuccaccgccacccucugccucggccaccacgccguccccaacggcaccaucgucaagaccaucaccaacgaccagaucgaggucaccaacgccaccgagcucguccaguccuccuccaccggcggcaucugcgacuccccccaccagauccucgacggcgagaacugcacccucaucgacgcccuccucggcgacccccagugcgacggcuuccagaacaagaagugggaccucuucgucgagcgcuccaaggccuacuccaacugcuaccccuacgacguccccgacuacgccucccuccgcucccucgucgccuccuccggcacccucgaguucaacaacgaguccuucaacuggaccggcgucacccagaacggcaccuccuccgccugcaagcgccgcuccaacaacuccuucuucucccgccucaacuggcucacccaccucaaguucaaguaccccgcccucaacgucaccaugcccaacaacgagaaguucgacaagcucuacaucuggggcguccaccaccccggcaccgacaacgaccagaucucccucuacgcccaggccuccggccgcaucaccgucuccaccaagcgcucccagcagaccgucauccccaacaucggcucccgcccccgcguccgcgacauccccucccgcaucuccaucuacuggaccaucgucaagcccggcgacauccuccucaucaacuccaccggcaaccucaucgccccccgcggcuacuucaagauccgcuccggcaaguccuccaucaugcgcuccgacgcccccaucggcaagugcaacuccgagugcaucacccccaacggcuccauccccaacgacaagcccuuccagaacgucaaccgcaucaccuacggcgccugcccccgcuacgucaagcaguccacccucaagcucgccaccggcaugcgcaacguccccgagaagcagacccgcggcaucuucggcgccaucgccggcuucaucgagaacggcugggagggcauggucgacggcugguacggcuuccgccaccagaacuccgagggcaucggccaggccgccgaccucaaguccacccaggccgccaucaaccagaucaacggcaagcucaaccgccucaucggcaagaccaacgagaaguuccaccagaucgagaaggaguucuccgaggucgagggccgcauccaggaccucgagaaguacgucgaggacaccaagaucgaccucugguccuacaacgccgagcuccucgucgcccucgagaaccagcacaccaucgaccucaccgacuccgagaugaacaagcucuucgagcgcaccaagaagcagcuccgcgagaacgccgaggacaugggcaacggcugcuucaagaucuaccacaagugcgacaacgccugcaucggcuccauccgcaacggcaccuacgaccacgacgucuaccgcgacgaggcccucaacaaccgcuuccagaucaagggcgucgagcucaaguccggcuacaaggacuggauccucuggaucuccuucgccaucuccugcuuccuccucugcgucgcccuccucggcuucaucaugugggccugccagaagggcaacauccgcugcaacaucugcaucuga

SEQ ID NO: 96484 - RNA, 1701 nt, Artificial Sequence; identical to SEQ ID NO: 96279
  derived and/or modified CDS sequence (opt2) from hemagglutinin__InfluenzaA__ABB80012

SEQ ID NO: 96485 - RNA, 1701 nt, Artificial Sequence
  derived and/or modified CDS sequence (opt2) from hemagglutinin__InfluenzaA__ABB80023
augaagaccaucaucgcccucuccuacaucuucuaccucgcccucggccaggaccuccccggcaacgacaacuccaaggccacccucugccucggccaccacgccguccccaacggcacccucgucaagaccaucaccaacgaccagaccgaggucaccaacgccaccgagcucguccaguccuccuccaccggcaagaucugcaacaacccccaccgcauccucgacggcauggacugcacccucaucgacgcccuccucggcgacccccacugcgacgucuuccagaacgagaccugggaccucuucgucgagcgcuccaaggccuucuccaacugcuaccccuacgacguccccgacuacgccucccuccgcucccucgucgccuccuccggcacccucgaguucaucaccgagggcuucaccuggaccgaggucacccagaacggcggcuccaacgccugcaagcgcggccccgacuccggcuucuucucccgccucaacuggcucaccaaguccggccgcaccuaccccguccucaacgucaccaugcccaacaacgacaacuucgacaagcucuacaucuggggcguccaccaccccuccaccgaccaggagcagaccaaccucuacguccagaccuccggccgcgucaccgucuccacccgccgcucccagcagaccaucauccccaacaucggcucccgccccuggguccgcggccucuccucccgcaucuccaucuacuggaccaucgucaagcccggcgacguccucgucaucaacuccaacggcaaccucaucgccccccgcggcuacuucaagaugcgcaccggcaaguccuccaucaugcgcuccgacgcccccaucgacaccugcaucuccgagugcaucacccccaacggcuccauccccaacgacaagcccuuccagaacgucaacaagaucaccuacggcgccugccccaaguacgucaagcaggacacccucaagcucgccaccggcaugcgcaacguccccgagaagcagacccgcggccucuucggcgccaucgccggcuucaucgagaacggcugggagggcaugaucgacggcugguacggcuuccgccaccagaacuccgagggcaccggccaggccgccgaccucaaguccacccaggccgccaucgaccagaucaacggcaagcucaaccgcaucaucgagaagaccaacgagaaguuccaccagaucgagaaggaguucuccgaggucgagggccgcauccaggaccucgagaaguacgucgaggacaccaagaucgaccucugguccuacaacgccgagcuccucgucgcccucgagaaccagcacaccaucgaccucaccgacuccgagaugaacaagcucuucgagaagacccgccgccagcuccgcgagaacgccgaggacaugggcaacggcugcuucaagaucuaccacaagugcgacaacgccugcaucgaguccauccgcaacggcaccuacgaccacgacgucuaccgcgacgaggcccucaacaaccgcuuccagaucaagggcgucgagcucaaguccggcuacaaggacuggauccucuggaucuccuucgccaucuccugcuuccuccucugcgucguccuccucggcuucaucaugugggccugccagcgcggcaacauccgcugcaacaucugcaucuga

SEQ ID NO: 96486 - RNA, 1701 nt, Artificial Sequence
  derived and/or modified CDS sequence (opt2) from hemagglutinin__InfluenzaA__ABB80034
augaagaccaucaucgcccucuccuacaucuucugccucguccucggccaggaccuccccggcaacgacaacuccaccgccacccucugccucggccaccacgccguccccaacggcacccucgucaagaccaucaccgacgaccagaucgaggucaccaacgccaccgagcucguccaguccuccuccaccggcaagaucugcaacaacccccaccgcauccucgacggccucgacugcacccucaucgacgcccuccucggcgacccccacugcgacgucuuccagaacgagaccugggaccucuucgucgagcgcuccaaggccuucuccaacugcuaccccuacgacguccccgacuacgccucccuccgcucccucgucgccuccuccggcacccucgaguucaucaccgagggcuucaccuggaccggcgucacccagaacggcggcuccaacgccugcaagcgcggccccggcuccggcuucuucucccgccucaacuggcucaccaaguccggcuccaccuaccccguccucaacgucaccaugcccaacaacgacaacuucgacaagcucuacaucuggggcguccaccaccccuccaccaaccaggagcagaccucccucuacguccaggccuccggccgcgucaccgucuccacccgccgcucccagcagaccaucauccccaacaucggcucccgccccuggguccgcggccucuccucccgcaucuccaucuacuggaccaucgucaagcccggcgacguccucgucaucaacuccaacggcaaccucaucgccccccgcggcuacuucaagaugcgcaccggcaaguccuccaucaugcgcuccgacgccaccaucgacaccugcaucuccgagugcaucacccccaacggcuccauccccaacgacaagcccuuccagaacgucaacaagaucaccuacggcgccugccccaaguacgucaagcagaacacccucaagcucgccaccggcaugcgcaacguccccgagaagcagacccgcggccucuucggcgccaucgccggcuucaucgagaacggcugggagggcaugaucgacggcugguacggcuuccgccaccagaacuccgagggcaccggccaggccgccgaccucaaguccacccaggccgccaucgaccagaucaacggcaagcucaaccgcgucaucgagaagaccaacgagaaguuccaccagaucgagaaggaguucuccgaggucgagggccgcauccaggaccucgagaaguacgucgaggacaccaagaucgaccucugguccuacaacgccgagcuccucgucgcccucgagaaccagcacaccaucgaccucaccgacuccgagaugaacaagcucuucgagaagacccgccgccagcuccgcgagaacgccgaggacaugggcaacggcugcuucaagaucuaccacaagugcgacaacgccugcaucgaguccauccgcaacggcaccuacgaccacgacgucuaccgcgacgaggcccucaacaaccgcuuccagaucaagggcgucgagcucaaguccggcuacaaggacuggauccucuggaucuccuucgccaucuccugcuuccuccucugcgucguccuccucggcuucaucaugugggccugccagcgcggcaacauccgcugcaacaucugcaucuga

SEQ ID NO: 96487 - RNA, 1698 nt, Artificial Sequence; identical to SEQ ID NO: 96400
  derived and/or modified CDS sequence (opt2) from hemagglutinin__InfluenzaA__ABB80045

SEQ ID NO: 96488 - RNA, 1701 nt, Artificial Sequence
  derived and/or modified CDS sequence (opt2) from hemagglutinin__InfluenzaA__ABB80081
augaagaccaucaucgcccucuccuacaucuccugccucgucuucgcccagaagcuccccggcaacgacaacuccaccgccacccucugccucggccaccacgccguccccaacggcacccucgucaagaccaucaccaacgaccagaucgaggucaccaacgccaccgagcucguccaguccuccuccaccggccgcaucugcgacuccccccaccgcauccucgacggcgagaacugcacccucaucgacgcccuccucggcgacccccacugcgacggcuuccagaacaaggagugggaccucuucgucgagcgcuccaaggccuacuccaacugcuaccccuacgacguccccgacuacgccucccuccgcucccucgucgccuccuccggcacccucgaguucaacaacgaguccuucaacuggaccggcgucgcccagaacggcaccuccuacgccugcaagcgccgcuccaucaaguccuucuucucccgccucaacuggcuccaccagcucaaguacaaguaccccgcccucaacgucaccaugcccaacaacgacaaguucgacaagcucuacaucuggggcguccaccaccccuccaccgacuccgaccagaccucccucuacgcccaggccuccggccgcgucaccgucuccaccaagcgcucccagcagaccgucauccccaacaucggcucccgccccuggguccgcggcgucuccucccgcaucuccaucuacuggaccaucgucaagcccggcgacauccuccucaucaacuccaccggcaaccucaucgccccccgcggcuacuucaagauccgcuccggcaaguccuccaucaugcgcuccgacgcccccaucggcaagugcaacuccgagugcaucacccccaacggcuccauccccaacgacaagcccuuccagaacgucaaccgcaucaccuacggcgccugcccccgcuacgucaagcagaacacccucaagcucgccaccggcaugcgcaacguccccgagaagcagacccgcggcaucuucggcgccaucgccggcuucaucgagaacggcugggagggcauggucgacggcugguacggcuuccgccaccagaacuccgagggcaccggccaggccgccgaccucaaguccacccaggccgccaucaaccagaucaacggcaagcucaaccgccucaucgagaagaccaacgagaaguuccaccagaucgagaaggaguucuccgaggucgagggccgcauccaggaccucgagaaguacgucgaggacaccaagaucgaccucugguccuacaacgccgagcuccucgucgcccucgagaaccagcacaccaucgaccucaccgacuccgagaugaacaagcucuucgagcgcacccgcaagcagcuccgcgagaacgccgaggacaugggcaacggcugcuucaagaucuaccacaagugcgacaacgccugcaucggcuccauccgcaacggcaccuacgaccacgacgucuaccgcgacgaggcccucaacaaccgcuuccagaucaagggcgucgagcucaaguccggcuacaaggacuggauccucuggaucuccuucgccaucuccugcuuccuccucugcgucguccuccucggcuucaucaugugggccugccagaagggcaacauccgcugcaacaucugcaucuga

SEQ ID NO: 96489 - RNA, 1701 nt, Artificial Sequence
  derived and/or modified CDS sequence (opt2) from hemagglutinin__InfluenzaA__ABB80092
augaagaccaucaucgcccucuccuacaucuccugccucgucuucgcccagaagcuccccggcaacgacaacuccaccgccacccucugccucggccaccacgccguccccaacggcacccucgucaagaccaucaccaacgaccagaucgaggucaccaacgccaccgagcucguccaguccuccuccaccggccgcaucugcgacuccccccaccgcauccucgacggcgagaacugcacccucaucgacgcccuccucggcgacccccacugcgacggcuuccagaacaaggagugggaccucuucgucgagcgcuccaaggccuacuccaacugcuaccccuacgacguccccgacuacgccucccuccgcucccucgucgccuccuccggcacccucgaguucaacaacgaguccuucaacuggaccggcgucgcccagaacggcaccuccuacgccugcaagcgccgcuccaucaaguccuucuucucccgccucaacuggcuccaccagcucaaguacaaguaccccgcccucaacgucaccaugcccaacaacgacaaguucgacaagcucuacaucuggggcguccaccaccccuccaccgacuccgaccagaccucccucuacgcccaggccuccggccgcgucaccgucuccaccaagcgcucccagcagaccgucauccccaacaucggcucccgccccuggguccgcggcgucuccucccgcaucuccaucuacuggacccucgucaagcccggcgacauccuccucaucaacuccaccggcaaccucaucgccccccgcggcuacuucaagauccgcuccggcaaguccuccaucaugcgcuccgacgcccccaucggcaagugcaacuccgagugcaucacccccaacggcuccauccccaacgacaagcccuuccagaacgucaaccgcaucaccuacggcgccugcccccgcuacgucaagcagaacacccucaagcucgccaccggcaugcgcaacguccccgagaagcagacccgcggcaucuucggcgccaucgccggcuucaucgagaacggcugggagggcauggucgacggcugguacggcuuccgccaccagaacuccgagggcaccggccaggccgccgaccucaaguccacccaggccgccaucaaccagaucaacggcaagcucaaccgccucaucgagaagaccaacgagaaguuccaccagaucgagaaggaguucuccgaggucgagggccgcauccaggaccucgagaaguacgucgaggacaccaagaucgaccucugguccuacaacgccgagcuccucgucgcccucgagaaccagcacaccaucgaccucaccgacuccgagaugaacaagcucuucgagcgcacccgcaagcagcuccgcgagaacgccgaggacaugggcaacggcugcuucaagaucuaccacaagugcgacaacgccugcaucggcuccauccgcaacggcaccuacgaccacgacgucuaccgcgacgaggcccucaacaaccgcuuccagaucaagggcgucgagcucaaguccggcuacaaggacuggauccucuggaucuccuucgccaucuccugcuuccuccucugcgucguccuccucggcuucaucaugugggccugccagaagggcaacauccgcugcaacaucugcaucuga

SEQ ID NO: 96490 - RNA, 1701 nt, Artificial Sequence; identical to SEQ ID NO: 96291
  derived and/or modified CDS sequence (opt2) from hemagglutinin__InfluenzaA__ABB80137

SEQ ID NO: 96491 - RNA, 1701 nt, Artificial Sequence; identical to SEQ ID NO: 96488
  derived and/or modified CDS sequence (opt2) from hemagglutinin__InfluenzaA__ABB80159

SEQ ID NO: 96492 - RNA, 1701 nt, Artificial Sequence; identical to SEQ ID NO: 96059
  derived and/or modified CDS sequence (opt2) from hemagglutinin__InfluenzaA__ABB80185

SEQ ID NO: 96493 - RNA, 1701 nt, Artificial Sequence
  derived and/or modified CDS sequence (opt2) from hemagglutinin__InfluenzaA__ABB80207
augaagaccaucaucgcccucuccuacauccucugccucgucuucgcccagaagcuccccggcaacgacaacuccaccgccacccucugccucggccaccacgccguccccaacggcacccucgucaagaccaucaccaacgaccagaucgaggucaccaacgccaccgagcucguccaguccuccuccaccggccgcaucugcgacuccccccaccgcauccucgacggcgagaacugcacccucaucgacgcccuccucggcgacccccacugcgacgacuuccagaacaaggagugggaccucuucgucgagcgcuccaaggccuacuccaacugcuaccccuacgacguccccgacuacgccucccuccgcucccucgucgccuccuccggcacccucgaguucaacaacgaguccuucaacuggaccggcgucgcccagaacggcaccuccuacgccugcaagcgccgcuccaucaaguccuucuucucccgccucaacuggcuccaccagcucaaguacaaguaccccgcccucaacgucaccaugcccaacaacgacaaguucgacaagcucuacaucuggggcguccaccaccccuccaccgacuccgaccagaccucccucuacgcccaggccuccggccgcgucaccgucuccaccaagcgcucccagcagaccgucauccccaacaucggcucccgccccuggguccgcggcgucuccucccgcaucuccaucuacuggaccaucgucaagcccggcgacauccuccucaucaacuccaccggcaaccucaucgccccccgcggcuacuucaagauccgcuccggcaaguccuccaucaugcgcuccgacgcccccaucggcaagugcaacuccgagugcaucacccccaacggcuccauccccaacgacaagcccuuccagaacgucaaccgcaucaccuacggcgccugcccccgcuacgucaagcagaacacccucaagcucgccaccggcaugcgcaacguccccgagaagcagacccgcggcaucuucggcgccaucgccggcuucaucgagaacggcugggagggcauggucgacggcugguacggcuuccgccaccagaacuccgagggcaccggccaggccgccgaccucaaguccacccaggccgccaucaaccagaucaacggcaagcucaaccgccucaucgagaagaccaacgagaaguuccaccagaucgagaaggaguucuccgaggucgagggccgcauccaggaccucgagaaguacgucgaggacaccaagaucgaccucugguccuacaacgccgagcuccucgucgcccucgagaaccagcacaccaucgaccucaccgacuccgagaugaacaagcucuucgagcgcacccgcaagcagcuccgcgagaacgccgaggacaugggcaacggcugcuucaagaucuaccacaagugcgacaacgccugcaucggcuccauccgcaacggcaccuacgaccacgacgucuaccgcgacgaggcccucaacaaccgcuuccagaucaagggcgucgagcucaaguccggcuacaaggacuggauccucuggaucuccuucgccauguccugcuuccuccucugcgucguccuccucggcuucaucaugugggccugccagaagggcaacauccgcugcaacaucugcaucuga

SEQ ID NO: 96494 - RNA, 1701 nt, Artificial Sequence
  derived and/or modified CDS sequence (opt2) from hemagglutinin__InfluenzaA__ABB80229
augaagaccaucaucgcccucuccuacauccucugccucgucuucgcccagaagcuccccggcaacgacaacuccaccgccacccucugccucggccaccacgccguccccaacggcacccucgucaagaccaucaccaacgaccagaucgaggucaccaacgccaccgagcucguccaguccuccuccaccggccgcaucugcgacuccccccaccgcauccucgacggcgagaacugcacccucaucgacgcccuccucggcgacccccacugcgacggcuuccagaacaaggagugggaccucuucgucgagcgcuccaaggccuacuccaacugcuaccccuacgacguccccgacuacgccucccuccgcucccucgucgccuccuccggcacccucgaguucaacaacgaguccuucaacuggaccggcgucgcccagaacggcaccuccuacgccugcaagcgccgcuccaucaaguccuucuucucccgccucaacuggcuccaccagcucaaguacaaguaccccgcccucaacgucaccaugcccaacaacgacaaguucgacaagcucuacaucuggggcguccaccaccccuccaccgacuccgaccagaccucccucuacgcccaggccuccggccgcgucaccgucuccaccaagcgcucccagcagaccgucauccccaacaucggcucccgccccuggguccgcggcgucuccucccgcaucuccaucuacuggaccaucgucaagcccggcgacauccuccucaucaacuccaccggcaaccucaucgccccccgcggcuacuucaagauccgcuccggcaaguccuccaucaugcgcuccgacgcccccaucggcaagugcaacuccgagugcaucacccccaacggcuccauccccaacgacaagcccuuccagaacgucaaccgcaucaccuacggcgccugcccccgcuacgucaagcagaacacccucaagcucgccaccggcaugcgcaacguccccgagaagcagacccgcggcaucuucggcgccaucgccggcuucaucgagaacggcugggagggcauggucgacggcugguacggcuuccgccaccagaacuccgagggcaccggccaggccgccgaccucaaguccacccaggccgccaucaaccagaucaacggcaagcucaaccgccucaucgagaagaccaacgagaaguuccaccagaucgagaaggaguucuccgaggucgagggccgcauccaggaccucgagaaguacgucgaggacaccaagaucgaccucugguccuacaacgccgagcuccucgucgcccucgagaaccagcacaccaucgaccucaccgacuccgagaugaacaagcucuucgagcgcacccgcaagcagcuccgcgagaacgccgaggacaugggcaacggcugcuucaagaucuaccacaagugcgacaacgccugcaucggcuccauccgcaacggcaccuacgaccacgacgucuaccgcgacgaggcccucaacaaccgcuuccagaucaagggcgucgagcucaaguccggcuacaaggacuggauccucuggaucuccuucgccauguccugcuuccuccucugcgucguccuccucggcuucaucaugugggccugccagaagggcaacauccgcugcaacaucugcaucuga

SEQ ID NO: 96495 - RNA, 1701 nt, Artificial Sequence; identical to SEQ ID NO: 96488
  derived and/or modified CDS sequence (opt2) from hemagglutinin__InfluenzaA__ABB80240

SEQ ID NO: 96496 - RNA, 1701 nt, Artificial Sequence
  derived and/or modified CDS sequence (opt2) from hemagglutinin__InfluenzaA__ABB80251
augaagaccaucaucgcccucuccuacauccucugccucgucuucgcccagaagcuccccggcaacgacaacuccaccgccacccucugccucggccaccacgccguccccaacggcacccucgucaagaccaucaccaacgaccagaucgaggucaccaacgccaccgagcucguccaguccuccuccaccggccgcaucugcgacuccccccaccgcauccucgacggcgagaacugcacccucaucgacgcccuccucggcgacccccacugcgacggcuuccagaacaaggagugggaccucuucgucgagcgcuccaaggccuacuccaacugcuaccccuacgacguccccgacuacgccucccuccgcucccucgucgccuccuccggcacccucgaguucaacaacgaguccuucaacuggaccggcgucgcccagaacggcaccuccuccgccugcaagcgccgcuccaucaaguccuucuucucccgccucaacuggcuccaccagcucaaguacaaguaccccgcccucaacgucaccaugcccaacaacgacaaguucgacaagcucuacaucuggggcguccaccaccccuccaccgacuccgaccagaccucccucuacgcccaggccuccggccgcgucaccgucuccaccaagcgcucccagcagaccgucauccccaacaucggcucccgccccuggguccgcggcgucuccucccgcaucuccaucuacuggaccaucgucaagcccggcgacauccuccucaucaacuccaccggcaaccucaucgccccccgcggcuacuucaagauccgcuccggcaaguccuccaucaugcgcuccgacgcccccaucggcaagugcaacuccgagugcaucacccccaacggcuccauccccaacgacaagcccuuccagaacgucaaccgcaucaccuacggcgccugcccccgcuacgucaagcagaacacccucaagcucgccaccggcaugcgcaacguccccgagaagcagacccgcggcaucuucggcgccaucgccggcuucaucgagaacggcugggagggcauggucgacggcugguacggcuuccgccaccagaacuccgagggcaccggccaggccgccgaccucaaguccacccaggccgccaucaaccagaucaacggcaagcucaaccgccucaucgagaagaccaacgagaaguuccaccagaucgagaaggaguucuccgaggucgagggccgcauccaggaccucgagaaguacgucgaggacaccaagaucgaccucugguccuacaacgccgagcuccucgucgcccucgagaaccagcacaccaucgaccucaccgacuccgagaugaacaagcucuucgagcgcacccgcaagcagcuccgcgagaacgccgaggacaugggcaacggcugcuucaagaucuaccacaagugcgacaacgccugcaucggcuccauccgcaacggcaccuacgaccacgacgucuaccgcgacgaggcccucaacaaccgcuuccagaucaagggcgucgagcucaaguccggcuacaaggacuggauccucuggaucuccuucgccaucuccugcuuccuccucugcgucguccuccucggccucaucaugugggccugccagaagggcaacauccgcugcaacaucugcaucuga

SEQ ID NO: 96497 - RNA, 1701 nt, Artificial Sequence
  derived and/or modified CDS sequence (opt2) from hemagglutinin__InfluenzaA__ABB80492
augaagaccaucaucgcccucuccuacauccucugccucgucuucgcccagaagcuccccggcaacgacaacuccaccgccacccucugccucggccaccacgccguccccaacggcacccucgucaagaccaucaccaacgaccagaucgaggucaccaacgccaccgagcucguccagaacuccuccaccggccgcaucugcgacuccccccaccgcauccucgacggcgagaacugcacccucaucgacgcccuccucggcgacccccacugcgacggcuuccagaacaaggagugggaccucuucgucgagcgcuccaaggccuacuccaacugcuaccccuacgacguccccgacuacgccucccuccgcucccucgucgccuccuccggcacccucgaguucaacaacgaguccuucaacuggaccggcgucgcccagaacggcaccuccuacgccugcaagcgccgcuccaucaaguccuucuucucccgccucaacuggcuccaccagcucaaguacaaguaccccgcccucaacgucaccaugcccaacaacgacaaguucgacaagcucuacaucuggggcguccaccaccccuccaccgacuccgaccagaccucccucuacgcccaggccuccggccgcgucaccgucuccaccaagcgcucccagcagaccgucauccccaacaucggcucccgccccuggguccgcggcgucuccucccgcaucuccaucuacuggaccaucgucaagcccggcgacauccuccucaucaacuccaccggcaaccucaucgccccccgcggcuacuucaagauccgcuccggcaaguccuccaucaugcgcuccgacgcccccaucggcaagugcaacuccgagugcaucacccccaacggcuccauccccaacgacaagcccuuccagaacgucaaccgcaucaccuacggcgccugcccccgcuacgucaagcagaacacccucaagcucgccaccggcaugcgcaacguccccgagaagcagacccgcggcaucuucggcgccaucgccggcuucaucgagaacggcugggagggcauggucgacggcugguacggcuuccgccaccagaacuccgagggcaccggccaggccgccgaccucaaguccacccaggccgccaucaaccagaucaacggcaagcucaaccgccucaucgagaagaccaacgagaaguuccaccagaucgagaaggaguucuccgaggucgagggccgcauccaggaccucgagaaguacgucgaggacaccaagaucgaccucugguccuacaacgccgagcuccucgucgcccucgagaaccagcacaccaucgaccucaccgacuccgagaugaacaagcucuucgagcgcacccgcaagcagcuccgcgagaacgccgaggacaugggcaacggcugcuucaagaucuaccacaagugcgacaacgccugcaucggcuccauccgcaacggcaccuacgaccacgacgucuaccgcgacgaggcccucaacaaccgcuuccagaucaagggcgucgagcucaaguccggcuacaaggacuggauccucuggaucuccuucgccauguccugcuuccuccucugcgucguccuccucggcuucaucaugugggccugccagaagggcaacauccgcugcaacaucugcaucuga

SEQ ID NO: 96498 - RNA, 1701 nt, Artificial Sequence
  derived and/or modified CDS sequence (opt2) from hemagglutinin__InfluenzaA__ABB80503
augaagaccaucaucgcccucuccuacaucuccugccucgucuucgcccagaagcuccccggcaacgacaacaacaccgccacccucugccucggccaccacgccguccccaacggcacccucgucaagaccaucaccaacgaccagaucgaggucaccaacgccaccgagcucguccaguccuccuccaccggccgcaucugcgacuccccccaccgcauccucgacggcgagaacugcacccucaucgacgcccuccucggcgacccccacugcgacggcuuccagaacaaggagugggaccucuucgucgagcgcuccaaggccuacuccaacugcuaccccuacgacguccccgacuacgccucccuccgcucccucgucgccuccuccggcacccucgaguucaacaacgaguccuucaacuggaccggcgucgcccagaacggcaccuccuacgccugcaagcgccgcuccaucaaguccuucuucucccgccucaacuggcuccaccagcucaaguacaaguaccccgcccucaacgucaccaugcccaacaacgacaaguucgacaagcucuacaucuggggcguccaccaccccuccaccgacuccgaccagaccucccucuacgcccaggccuccggccgcgucaccgucuccaccaagcgcucccagcagaccgucauccccaacaucggcucccgccccuggguccgcggcgucuccucccgcaucuccaucuacuggaccaucgucaagcccggcgacauccuccucaucaacuccaccggcaaccucaucgccccccgcggcuacuucaagauccgcuccggcaaguccuccaucaugcgcuccgacgcccccaucggcaagugcaacuccgagugcaucacccccaacggcuccauccccaacgacaagcccuuccagaacgucaaccgcaucaccuacggcgccugcccccgcuacgucaagcagaacacccucaagcucgccaccggcaugcgcaacguccccgagaagcagacccgcggcaucuucggcgccaucgccggcuucaucgagaacggcugggagggcauggucgacggcugguacggcuuccgccaccagaacuccgagggcaccggccaggccgccgaccucaaguccacccaggccgccaucaaccagaucaacggcaagcucaaccgccucaucgagaagaccaacgagaaguuccaccagaucgagaaggaguucuccgaggucgagggccgcauccaggaccucgagaaguacgucgaggacaccaagaucgaccucugguccuacaacgccgagcuccucgucgcccucgagaaccagcacaccaucgaccucaccgacuccgagaugaacaagcucuucgagcgcacccgcaagcagcuccgcgagaacgccgaggacaugggcaacggcugcuucaagaucuaccacaagugcgacaacgccugcaucggcuccauccgcaacggcaccuacgaccacgacgucuaccgcgacgaggcccucaacaaccgcuuccagaucaagggcgucgagcuccgcuccggcuacaaggacuggauccucuggaucuccuucgccaucuccugcuuccuccucugcgucguccuccucggcuucaucaugugggccugccagaagggcaacauccgcugcaacaucugcaucuga

SEQ ID NO: 96499 - RNA, 1701 nt, Artificial Sequence; identical to SEQ ID NO: 96488
  derived and/or modified CDS sequence (opt2) from hemagglutinin__InfluenzaA__ABB80514

SEQ ID NO: 96500 - RNA, 1701 nt, Artificial Sequence
  derived and/or modified CDS sequence (opt2) from hemagglutinin__InfluenzaA__ABB80529
augaagaccaucaucgcccucuccuacaucuccugccucgucuucgcccagaagcuccccggcaacgacaacuccaccgccacccucugccucggccaccacgccguccccaacggcacccucgucaagaccaucaccaacgaccagaucgaggucaccaacgccaccgagcucguccaguccuccuccaccggccgcaucugcgacuccccccaccgcauccucgacggcgagaacugcacccucaucgacgcccuccucggcgacccccacugcgacggcuuccagaacaaggagugggaccucuucgucgagcgcuccaaggccuacuccaacugcuaccccuacgacguccccgacuacgccucccuccgcucccucgucgccuccuccggcacccucgaguucaacaacgaguccuucaacuggaccggcgucgcccagaacggcaccuccuacgccugcaagcgccgcuccaucaaguccuucuucucccgccucaacuggcuccaccagcucaaguacaaguaccccgcccucaacgucaccaugcccaacaacgacaaguucgacaagcucuacaucuggggcguccaccaccccuccaccgacuccgaccagaccucccucuacgcccaggccuccggccgcgucaccgucuccaccaagcgcucccagcagaccgucauccccaacaucggcucccgccccuggguccgcggcgucuccucccgcaucuccaucuacuggaccaucgucaagcccggcgacauccuccucaucaacuccaccggcaaccucaucgccccccgcggcuacuucaagauccgcuccggcaaguccuccaucaugcgcuccgacgcccccaucggcaagugcaacuccgagugcaucacccccaacggcuccauccccaacgacaagcccuuccagaacgucaaccgcaucaccuacggcgccugcccccgcuacgucaagcagaacacccucaagcucgccaccggcaugcgcaacguccccgacaagcagacccgcggcaucuucggcgccaucgccggcuucaucgagaacggcugggagggcauggucgacggcugguacggcuuccgccaccagaacuccgagggcaccggccaggccgccgaccucaaguccacccaggccgccaucaaccagaucaacggcaagcucaaccgccucaucgagaagaccaacgagaaguuccaccagaucgagaaggaguucuccgaggucgagggccgcauccaggaccucgagaaguacgucgaggacaccaagaucgaccucugguccuacaacgccgagcuccucgucgcccucgagaaccagcacaccaucgaccucaccgacuccgagaugaacaagcucuucgagcgcacccgcaagcagcuccgcgagaacgccgaggacaugggcaacggcugcuucaagaucuaccacaagugcgacaacgccugcaucggcuccauccgcaacggcaccuacgaccacgacgucuaccgcgacgaggcccucaacaaccgcuuccagaucaagggcgucgagcucaaguccggcuacaaggacuggauccucuggaucuccuucgccaucuccugcuuccuccucugcgucguccuccucggcuucaucaugugggccugccagaagggcaacauccgcugcaacaucugcaucuga

SEQ ID NO: 96501 - RNA, 1701 nt, Artificial Sequence
  derived and/or modified CDS sequence (opt2) from hemagglutinin__InfluenzaA__ABB80641
augaagaccaucaucgcccucuccuacauccucugccucgucuucgcccagaagauccccggcaacgacaacuccaccgccacccucugccucggccaccacgccguccccaacggcacccucgucaagaccaucaccaacgaccagaucgaggucaccaacgccaccgagcucguccaguccuccuccaccggccgcaucugcgacuccccccaccgcauccucgacggcgagaacugcacccucaucgacgcccuccucggcgacccccacugcgacggcuuccagaacaaggagugggaccucuucgucgagcgcuccaaggccuacuccaacugcuaccccuacgacgucuccgacuacgccucccuccgcucccucgucgccuccuccggcacccucgaguucaacaacgaguccuucaacuggaccggcgucgcccagaacggcaccuccuacgccugcaagcgccgcuccaucaaguccuucuucucccgccucaacuggcuccaccagcucaaguacaaguaccccgcccucaacgucaccaugcccaacaacgacaaguucgacaagcucuacaucuggggcguccaccaccccuccaccgacuccgaccagaccucccucuacgcccaggccuccggccgcgucaccgucuccaccaagcgcucccagcagaccgucauccccaacaucggcucccgccccuggguccgcggcgucuccucccgcaucuccaucuacuggaccaucgucaagcccggcgacauccuccucaucaacuccaccggcaaccucaucgccccccgcggcuacuucaagauccgcuccggcaaguccuccaucaugcgcuccgacgcccccaucggcaagugcaacuccgagugcaucacccccaacggcuccauccccaacgacaagcccuuccagaacgucaaccgcaucaccuacggcgccugcccccgcuacgucaagcagaacacccucaagcucgccaccggcaugcgcaacguccccgagaagcagacccgcggcaucuucggcgccaucgccggcuucaucgagaacggcugggagggcauggucgacggcugguacggcuuccgccaccagaacuccgagggcaccggccaggccgccgaccucaaguccacccaggccgccaucaaccagaucaacggcaagcucaaccgccucaucgagaagaccaacgagaaguuccaccagaucgagaaggaguucuccgaggucgagggccgcauccaggaccucgagaaguacgucgaggacaccaagaucgaccucugguccuacaacgccgagcuccucgucgcccucgagaaccagcacaccaucgaccucaccgacuccgagaugaacaagcucuucgagcgcacccgcaagcagcuccgcgagaacgccgaggacaugggcaacggcugcuucaagaucuaccacaagugcgacaacgccugcaucggcuccauccgcaacggcaccuacgaccacgacgucuaccgcgacgaggcccucaacaaccgcuuccagaucaagggcgucgagcucaaguccggcuacaaggacuggauccucuggaucuccuucgccaucuccugcuuccuccucugcgucguccuccucggcuucaucaugugggccugccagaagggcaacauccgcugcaacaucugcaucuga

SEQ ID NO: 96502 - RNA, 1701 nt, Artificial Sequence
  derived and/or modified CDS sequence (opt2) from hemagglutinin__InfluenzaA__ABB80661
augaagaccaucaucgcccucuccuacauccucugccucgucuucgcccagaagauccccggcaacgacaacuccaccgccacccucugccucggccaccacgccguccccaacggcacccucgucaagaccaucaccaacgaccagaucgaggucaccaacgccaccgagcucguccaguccuccuccaccggccgcaucugcgacuccccccaccgcauccucgacggcgagaacugcacccucaucgacgcccuccucggcgacccccacugcgacggcuuccagaacaaggagugggaccucuucgucgagcgcuccaaggccuacuccaacugcuaccccuacgacguccccgacuacgccucccuccgcucccucgucgccuccuccggcacccucgaguucaacaacgaguccuucaacuggaccggcgucgcccagaacggcaccuccuacgccugcaagcgccgcuccaucaaguccuucuucucccgccucaacuggcuccaccagcucaaguacaaguaccccgcccucaacgucaccaugcccaacaacgacaaguucgacaagcucuacaucuggggcguccaccaccccuccaccgacuccgaccaggccucccucuacgcccaggccuccggccgcgucaccgucuccaccaagcgcucccagcagaccgucauccccaacaucggcucccgccccuggguccgcggcgucuccucccgcaucuccaucuacuggaccaucgucaagcccggcgacauccuccucaucaacuccaccggcaaccucaucgccccccgcggcuacuucaagauccgcuccggcaaguccuccaucaugcgcuccgacgcccccaucggcaagugcaacuccgagugcaucacccccaacggcuccauccccaacgacaagcccuuccagaacgucaaccgcaucaccuacggcgccugcccccgcuacgucaagcagaacacccucaagcucgccaccggcaugcgcaacguccccgagaagcagacccgcggcaucuucggcgccaucgccggcuucaucgagaacggcugggagggcauggucgacggcugguacggcuuccgccaccagaacuccgagggcaccggccaggccgccgaccucaaguccacccaggccgccaucaaccagaucaacggcaagcucaaccgccucaucgagaagaccaacgagaaguuccaccagaucgagaaggaguucuccgaggucgagggccgcauccaggaccucgagaaguacgucgaggacaccaagaucgaccucugguccuacaacgccgagcuccucgucgcccucgagaaccagcacaccaucgaccucaccgacuccgagaugaacaagcucuucgagcgcacccgcaagcagcuccgcgagaacgccgaggacaugggcaacggcugcuucaagaucuaccacaagugcgacaacgccugcaucggcuccauccgcaacggcaccuacgaccacgacgucuaccgcgacgaggcccucaacaaccgcuuccagaucaagggcgucgagcucaaguccggcuacaaggacuggauccucuggaucuccuucgccaucuccugcuuccuccucugcgucguccuccucggcuucaucaugugggccugccagaagggcaacauccgcugcaacaucugcaucuga

SEQ ID NO: 96503 - RNA, 1701 nt, Artificial Sequence
  derived and/or modified CDS sequence (opt2) from hemagglutinin__InfluenzaA__ABB80672
augaagaccaucaucgcccucuccuacauccucugccucgucuucgcccagaagcuccccggcaacgacaacuccaccgccacccucugccucggccaccacgccguccccaacggcacccucgucaagaccaucaccaacgaccagaucgaggucaccaacgccaccgagcucguccagggcuccuccaccggccgcaucugcgacuccccccaccagauccucgacggcaagaacugcacccucaucgacgcccuccucggcgacccccacugcgacggcuuccagaacaaggagugggaccucuucgucgagcgcuccaccgccuacuccaacugcuaccccuacgacguccccgacuacgccucccuccgcucccucgucgccuccuccggcacccucgaguucaccaaggagggcuucaacuggaccggcgucgcccaggacggcaccuccuacgccugcaagcgcggcuccgucaaguccuucuucucccgccucaacuggcuccacaagcucgaguacaaguaccccgcccucaacgucaccaugcccaacaacgacaaguucgacaagcucuacaucuggggcguccaccaccccuccaccgacuccgaccagaccucccucuacguccaggccuccggccgcgucaccgucuccaccaagcgcucccagcagaccgucauccccaacaucggcucccgccccuggguccgcggcgucuccucccgcaucuccaucuacuggaccaucgucaagcccggcgacauccuccucaucaacuccaccggcaaccucaucgccccccgcggcuacuucaagauccgcuccggcaaguccuccaucaugcgcuccgacgcccccaucgacaacugcaacuccgagugcaucacccccaacggcuccauccccaacgacaagcccuuccagaacgucaaccgcaucaccuacggcgccugcccccgcuacgucaagcagaacacccucaagcucgccaccggcaugcgcaacguccccgagaagcagacccgcggcaucuucggcgccaucgccggcuucaucgagaacggcugggagggcauggucgacggcugguacggcuuccgccaccagaacuccgagggcaccggccaggccgccgaccucaaguccacccaggccgccaucaaccagaucaacggcaagcucaaccgccucaucgagaagaccaacgagaaguuccaccagaucgagaaggaguucuccgaggucgagggccgcauccaggaccucgagaaguacgucgaggacaccaagaucgaccucugguccuacaacgccgagcuccucgucgcccucgagaaccagcacaccaucgaccucaccgacuccgagaugaacaagcucuucgagcgcacccgcaagcagcuccgcgagaacgccgaggacaugggcaacggcugcuucaagaucuaccacaagugcgacaacgccugcaucggcuccauccgcaacggcaccuacgaccacgacgucuaccgcgacgaggcccucaacaaccgcuuccagaucaagggcgucgagcucaaguccggcuacaaggacuggauccucuggaucuccuucgccaucuccugcuuccuccucugcgucguccuccucggcuucaucaugugggccugccagaagggcaacauccgcugcaacaucugcaucuga

SEQ ID NO: 96504 - RNA, 1701 nt, Artificial Sequence
  derived and/or modified CDS sequence (opt2) from hemagglutinin__InfluenzaA__ABB80682
augaagaccaucaucgcccucuccuacaucuccugccucgucuucgcccagaagcuccccggcaacgacaacuccaccgccacccucugccucggccaccacgccguccccaacggcacccucgucaagaccaucaccaacgaccagaucgaggucaccaacgccaccgagcucguccaguccuccuccaccggccgcaucugcgacuccccccaccgcauccucgacggcgagaacugcacccucaucgacgcccuccucggcgacccccacugcgacggcuuccagaacaaggagugggaccucuucgucgagcgcuccaaggccuacuccaacugcuaccccuacgacguccccgacuacgccucccuccgcucccucgucgccuccuccggcacccucgaguucaacaacgaguccuucaacuggaccggcgucgcccagaacggcaccuccuacgccugcaagcgccgcuccaucaaguccuucuucucccgccucaacuggcuccaccagcucaaguacaaguaccccgcccucaacgucaccaugcccaacaacgacaaguucgacaagcucuacaucuggggcguccaccaccccuccaccgacuccgaccagaccucccucuacgcccaggccuccggccgcgucaccgucuccaccaagcgcucccagcagaccgucauccccaacaucggcucccgccccuggguccgcggcgucuccucccgcaucuccaucuacuggaccaucgucaagcccggcgacauccuccucaucaacuccaccggcaaccucaucgccccccgcggcuacuucaagauccgcuccggcaaguccuccaucaugcgcuccgacgcccccaucggcaagugcaacuccgagugcaucacccccaacggcuccauccccaacgacaagcccuuccagaacgucaaccgcaucaccuacggcgccugcccccgcuacgucaagcagaacacccucaagcucgccaccggcaugcgcaacguccccgagaagcagacccgcggcaucuucggcgccaucgccggcuucaucgagaacggcugggagggcauggucgacggcugguacggcuuccgccaccagaacuccgagggcaccggccaggccgccgaccucaaguccacccaggccgccaucaaccagaucaacggcaagcucaaccgccucaucgagaagaccaacgagaaguuccaccagaucgagaaggaguucuccgaggucgagggccgcauccaggaccucgagaaguacgucgaggacaccaagaucgaccucugguccuacaacgccgagcuccucgucgcccucgagaaccagcacaccaucgaccucaccgacuccgagaugaacaagcuccucgagcgcacccgcaagcagcuccgcgagaacgccgaggacaugggcaacggcugcuucaagaucuaccacaagugcgacaacgccugcaucggcuccauccgcaacggcaccuacgaccacgacgucuaccgcgacgaggcccucaacaaccgcuuccagaucaagggcgucgagcucaaguccggcuacaaggacuggauccucuggaucuccuucgccaucuccugcuuccuccucugcgucguccuccucggcuucaucaugugggccugccagaagggcaacauccgcugcaacaucugcaucuga

SEQ ID NO: 96505 - RNA, 1701 nt, Artificial Sequence
  derived and/or modified CDS sequence (opt2) from hemagglutinin__InfluenzaA__ABB80693
augaagaccaucaucgcccucuccuacaucuccugccucgucuucgcccagaagcuccccggcaacgacaacuccaccgccacccucugccucggccaccacgccguccccaacggcacccucgucaagaccaucaccaacgaccagaucgaggucaccaacgccaccgagcucguccaguccuccuccaccggccgcaugugcgacuccccccaccgcauccucgacggcgagaacugcacccucaucgacgcccuccucggcgacccccacugcgacggcuuccagaacaaggagugggaccucuucgucgagcgcuccaaggccuacuccaacugcuaccccuacgacguccccgacuacgccucccuccgcucccucgucgccuccuccggcacccucgaguucaacaacgaguccuucaacuggaccggcgucgcccagaacggcaccuccuacgccugcaagcgccgcuccaucaaguccuucuucucccgccucaacuggcuccaccagcucaaguacaaguaccccgcccucaacgucaccaugcccaacaacgacaaguucgacaagcucuacaucuggggcguccaccaccccuccaccgacuccgaccagaccucccucuacgcccaggccuccggccgcgucaccgucuccaccaagcgcucccagcagaccgucauccccaacaucggcucccgccccuggguccgcggcgucuccucccgcaucuccaucuacuggaccaucgucaagcccggcgacauccuccucaucaacuccaccggcaaccucaucgccccccgcggcuacuucaagauccgcuccggcaaguccuccaucaugcgcuccgacgcccccaucggcaagugcaacuccgagugcaucacccccaacggcuccauccccaacgacaagcccuuccagaacgucaaccgcaucaccuacggcgccugcccccgcuacgucaagcagaacacccucaagcucgccaccggcaugcgcaacguccccgagaagcagacccgcggcaucuucggcgccaucgccggcuucaucgagaacggcugggagggcauggucgacggcugguacggcuuccgccaccagaacuccgagggcaccggccaggccgccgaccucaaguccacccaggccgccaucaaccagaucaacggcaagcucaaccgccucaucgagaagaccaacgagaaguuccaccagaucgagaaggaguucuccgaggucgagggccgcauccaggaccucgagaaguacgucgaggacaccaagaucgaccucugguccuacaacgccgagcuccucgucgcccucgagaaccagcacaccaucgaccucaccgacuccgagaugaacaagcucuucgagcgcacccgcaagcagcuccgcgagaacgccgaggacaugggcaacggcugcuucaagaucuaccacaagugcgacaacgccugcaucggcuccauccgcaacggcaccuacgaccacgacgucuaccgcgacgaggcccucaacaaccgcuuccagaucaagggcgucgagcucaaguccggcuacaaggacuggauccucuggaucuccuucgccaucuccugcuuccuccucugcgucguccuccucggcuucaucaugugggccugccagaagggcaacauccgcugcaacaucugcaucuga

SEQ ID NO: 96506 - RNA, 1701 nt, Artificial Sequence
  derived and/or modified CDS sequence (opt2) from hemagglutinin__InfluenzaA__ABB80704
augaagaccaucaucgcccucuccuacauccucugccucgucuucgcccagaagauccccggcaacgacaacuccaccgccacccucugccucggccaccacgccguccccaacggcacccucgucaagaccaucaccaacgaccagaucgaggucaccaacgccaccgagcucguccaguccuccuccaccggccgcaucugcgacuccccccaccgcauccucgacggcgagaacugcacccucaucgacgcccuccucggcgacccccacugcgacggcuuccagaacaaggagugggaccucuucgucgagcgcuccaaggccuacuccaacugcuaccccuacgacguccccgacuacgccucccuccgcucccucgucgccuccuccggcacccucgaguucaacaacgaguccuucaacuggaccggcgucgcccagaacggcaccuccuacgccugcaagcgccgcuccaucaaguccuucuucucccgccucaacuggcuccaccagcucaaguacaaguaccccgcccucaacgucaccaugcccaacaacgacaaguucgacaagcucuacaucuggggcguccaccaccccuccaccgacuccgaccagaccucccucuacgcccaggccuccggccgcgucaccgucuccaccaagcgcucccagcagaccgucauccccaacaucggcucccgccccuggguccgcggcgucuccucccgcaucuccaucuacuggaccaucgucaagcccggcgacauccuccucaucaacuccaccggcaaccucaucgccccccgcggcuacuucaagauccgcuccggcaaguccuccaucaugcgcuccgacgcccccaucggcaagugcaacuccgagugcaucacccccaacggcuccauccccaacgacaagcccuuccagaacgucaaccgcaucaccuacggcgccugcccccgcuacgucaagcagaacacccucaagcucgccaccggcaugcgcaacguccccgagaagcagacccgcggcaucuucggcgccaucgccggcuucaucgagaacggcugggagggcauggucgacggcugguacggcuuccgccaccagaacuccgagggcaccggccaggccgccgaccucaaguccacccaggccgccaucaaccagaucaacggcaagcucaaccgccucaucgagaagaccaacgagaaguuccaccagaucgagaaggaguucuccgaggucgagggccgcauccaggaccucgagaaguacgucgaggacaccaagaucgaccucugguccuacaacgccgagcuccucgucgcccucgagaaccagcacaccaucgaccucaccgacuccgagaugaacaagcucuucgagcgcacccgcaagcagcuccgcgagaacgccgaggacaugggcaacggcugcuucaagaucuaccacaagugcgacaacgccugcaucggcuccauccgcaacggcaccuacgaccacgacgucuaccgcgacgaggcccucaacaaccgcuuccagaucaagggcgucgagcucaaguccggcuacaaggacuggauccucuggaucuccuucgccaucuccugcuuccuccucugcgucguccuccucggcuucaucaugugggccugccagaagggcaacauccgcugcaacaucugcaucuga

SEQ ID NO: 96507 - RNA, 1701 nt, Artificial Sequence; identical to SEQ ID NO: 96488
  derived and/or modified CDS sequence (opt2) from hemagglutinin__InfluenzaA__ABB80715

SEQ ID NO: 96508 - RNA, 1701 nt, Artificial Sequence
  derived and/or modified CDS sequence (opt2) from hemagglutinin__InfluenzaA__ABB80724
augaagaccaucaucgcccucuccuacauccucugccucgucuucgcccagaagcuccccggcaacgacaacuccaccgccacccucugccucggccaccacgccguccccaacggcacccucgucaagaccaucaccaacgaccagaucgaggucaccaacgccaccgagcucguccaguccuccuccaccggccgcaucugcgacuccccccaccgcauccucgacggcgagaacugcacccucaucgacgcccuccucggcgacccccacugcgacggcuuccagaacaaggagugggaccucuucgucgagcgcuccaaggccuacuccaacugcuaccccuacgacguccccgacuacgccucccuccgcucccucgucgccuccuccggcacccucgaguucaacaacgaguccuucaacuggaccggcgucgcccagaacggcaccuccuacgccugcaagcgccgcuccaucaaguccuucuucucccgccucaacuggcuccaccagcucaaguacaaguaccccgcccucaacgucaccaugcccaacaacgacaaguucgacaagcucuacaucuggggcguccaccaccccuccaccgacuccgaccaggccucccucuacgcccaggccuccggccgcgucaccgucuccaccaagcgcucccagcagaccgucauccccaacaucggcucccgccccuggguccgcggcgucuccucccgcaucuccaucuacuggaccaucgucaagcccggcgacauccuccucaucaacuccaccggcaaccucaucgccccccgcggcuacuucaagauccgcuccggcaaguccuccaucaugcgcuccgacgcccccaucggcaagugcaacuccgagugcaucacccccaacggcuccauccccaacgacaagcccuuccagaacgucaaccgcaucaccuacggcgccugcccccgcuacgucaagcagaacacccucaagcucgccaccggcaugcgcaacguccccgagaagcagacccgcggcaucuucggcgccaucgccggcuucaucgagaacggcugggagggcauggucgacggcugguacggcuuccgccaccagaacuccgagggcaccggccaggccgccgaccucaaguccacccaggccgccaucaaccagaucaacggcaagcucaaccgccucaucgagaagaccaacgagaaguuccaccagaucgagaaggaguucuccgaggucgagggccgcauccaggaccucgagaaguacgucgaggacaccaagaucgaccucugguccuacaacgccgagcuccucgucgcccucgagaaccagcacaccaucgaccucaccgacuccgagaugaacaagcucuucgagcgcacccgcaagcagcuccgcgagaacgccgaggacaugggcaacggcugcuucaagaucuaccacaagugcgacaacgccugcaucggcuccauccgcaacggcaccuacgaccacgacgucuaccgcgacgaggcccucaacaaccgcuuccagaucaagggcgucgagcucaaguccggcuacaaggacuggauccucuggaucuccuucgccauguccugcuuccuccucugcgucguccuccucggcuucaucaugugggccugccagaagggcaacauccgcugcaacaucugcaucuga

SEQ ID NO: 96509 - RNA, 1701 nt, Artificial Sequence; identical to SEQ ID NO: 96494
  derived and/or modified CDS sequence (opt2) from hemagglutinin__InfluenzaA__ABB80737

SEQ ID NO: 96510 - RNA, 1701 nt, Artificial Sequence
  derived and/or modified CDS sequence (opt2) from hemagglutinin__InfluenzaA__ABB80748
augaagaccaucaucgcccucuccuacaucuccugccucgucuucgcccagaagcuccccggcaacgacaacuccaccgccacccucugccucggccaccacgccguccccaacggcacccucgucaagaccaucaccaacgaccagaucgaggucaccaacgccaccgagcucguccaguccuccuccaccggccgcaucugcgacuccccccaccgcauccucgacggcgagaacugcacccucaucgacgcccuccucggcgacccccacugcgacggcuuccagaacaaggagugggaccucuucgucgagcgcuccaaggccuacuccaacugcuaccccuacgacguccccgacuacgccucccuccgcucccucgucgccuccuccggcacccucgaguucaacaacgaguccuucaacuggaccggcgucgcccagaacggcaccuccuacgccugcaagcgccgcuccaucaaguccuucuucucccgccucaacuggcuccaccagcucaaguacaaguaccccgcccucaacgucaccaugcccaacaacgacaaguucgacaagcucuacaucuggggcguccaccaccccuccaccgacuccgaccagaccucccucuacgcccaggccuccggccgcgucaccgucuccacccagcgcucccagcagaccgucauccccaacaucggcucccgccccuggguccgcggcgucuccucccgcaucuccaucuacuggaccaucgucaagcccggcgacauccuccucaucaacuccaccggcaaccucaucgccccccgcggcuacuucaagauccgcuccggcaaguccuccaucaugcgcuccgacgcccccaucggcaagugcaacuccgagugcaucacccccaacggcuccauccccaacgacaagcccuuccagaacgucaaccgcaucaccuacggcgccugcccccgcuacgucaagcagaacacccucaagcucgccaccggcaugcgcaacguccccgagaagcagacccgcggcaucuucggcgccaucgccggcuucaucgagaacggcugggagggcauggucgacggcugguacggcuuccgccaccagaacuccgagggcaccggccaggccgccgaccucaaguccacccaggccgccaucaaccagaucaacggcaagcucaaccgccucaucgagaagaccaacgagaaguuccaccagaucgagaaggaguucuccgaggucgagggccgcauccaggaccucgaggaguacgucgaggacaccaagaucgaccucugguccuacaacgccgagcuccucgucgcccucgagaaccagcacaccaucgaccucaccgacuccgagaugaacaagcucuucgagcgcacccgcaagcagcuccgcgagaacgccgaggacaugggcaacggcugcuucaagaucuaccacaagugcgacaacgccugcaucggcuccauccgcaacggcaccuacgaccacgacgucuaccgcgacgaggcccucaacaaccgcuuccagaucaagggcgucgagcucaaguccggcuacaaggacuggauccucuggaucuccuucgccaucuccugcuuccuccucugcgucguccuccucggcuucaucaugugggccugccagaagggcaacauccgcugcaacaucugcaucuga

SEQ ID NO: 96511 - RNA, 1701 nt, Artificial Sequence
  derived and/or modified CDS sequence (opt2) from hemagglutinin__InfluenzaA__ABB82183
augaagaccaucaucgcccucuccuacauccucugccucgucuucgcccagaagcuccccggcaacgacaacuccaccgccacccucugccucggccaccacgccguccccaacggcacccucgucaagaccaucaccaacgaccagaucgaggucaccaacgccaccgagcucguccaguccuccuccaccggccgcaucugcgacuccccccaccagauccucgacggcgagaacugcacccucaucgacgcccuccucggcgacccccacugcgacggcuuccagaacaaggagugggaccucuucgucgagcgcuccaaggccuacuccaacugcuaccccuacgacguccccgacuacgccucccuccgcucccucgucgccuccuccggcacccucgaguucaacaacgaguccuucaacuggaccggcgucgcccagaacggcaccuccuccgccugcaagcgccgcuccaacaaguccuucuucucccgccucaacuggcuccaccagcucaaguacaaguaccccgcccucaacgucaccaugcccaacaacgagaaguucgacaagcucuacaucuggggcguccaccaccccuccaccgacuccgaccagaucucccucuacgcccaggccuccggccgcgucaccgucuccaccaagcgcucccagcagaccgucauccccaacaucggcucccgccccuggguccgcggcgucuccucccgcaucuccaucuacuggaccaucgucaagcccggcgacauccuccucaucaacuccaccggcaaccucaucgccccccgcggcuacuucaagauccgcuccggcaaguccuccgucaugcgcuccgacgccuccaucggccgcugcaacuccgagugcaucacccccaacggcuccauccccaacgacaagcccuuccagaacgucaaccgcaucaccuacggcgccugcccccgcuacgucaagcagaacacccucaagcucgccaccggcaugcgcaacguccccgagaagcagacccgcggcaucuucggcgccaucgccggcuucaucgagaacggcugggagggcauggucgacggcugguacggcuuccgccaccagaacuccgagggcaccggccaggccgccgaccucaaguccacccaggccgccaucaaccagaucaacggcaagcucaaccgccucaucgagaagaccaacgagaaguuccaccagaucgagaaggaguucuccgaggucgagggccgcauccaggaccucgagaaguacgucgaggacaccaagaucgaccucugguccuacaacgccgagcuccucgucgcccucgagaaccagcacaccaucgaccucaccgacuccgagaugaacaagcucuucgagcgcaccaagaagcagcuccgcgagaacgccgaggacaugggcaacggcugcuucaagaucuaccacaagugcgacaacgccugcaucggcuccauccgcaacggcaccuacgaccacgacgucuaccgcgacgaggcccucaacaaccgcuuccagaucaagggcgucgagcucaaguccggcuacaaggacuggauccucuggaucuccuucgccaucuccugcuuccuccucugcgucguccuccucggcuucaucaugugggccugccagaagggcaacauccgcugcaacaucugcaucuga

SEQ ID NO: 96512 - RNA, 1698 nt, Artificial Sequence; identical to SEQ ID NO: 96332
  derived and/or modified CDS sequence (opt2) from hemagglutinin__InfluenzaA__ABB82194

SEQ ID NO: 96513 - RNA, 1698 nt, Artificial Sequence
  derived and/or modified CDS sequence (opt2) from hemagglutinin__InfluenzaA__ABB82205
augaaggucaagcuccucguccuccucugcaccuucaccgccaccuacgccgacaccaucugcaucggcuaccacgccaacaacuccaccgacaccgucgacaccguccucgagaagaacgucaccgucacccacuccgucaaccuccucgaggacucccacaacggcaagcucugccuccucaagggcaucgccccccuccagcucggcaacugcuccgucgccggcuggauccucggcaaccccgagugcgagcuccucaucuccaaggaguccugguccuacaucgucgagacccccaaccccgagaacggcaccugcuaccccggcuacuucgccgacuacgaggagcuccgcgagcagcucuccuccgucuccuccuucgagcgcuucgagaucuuccccaaggaguccuccuggcccaaccacaccgucaccggcgucuccgccuccugcucccacaacggcaaguccuccuucuacaagaaccuccucuggcucaccggcaagaacggccucuaccccaaccucuccaaguccuacgccaacuccaaggagaaggagguccucguccucuggggcguccaccacccccccaacaucggcgaccagcgcgcccucuaccacaccgagaacgccuacgucuccgucgucuccucccacuacucccgccgcuucacccccgagaucgccaagcgccccaagguccgcgaccaggagggccgcaucaacuacuacuggacccuccucgagcccggcgacaccaucaucuucgaggccaacggcaaccucaucgccccccgcuacgccuucgcccucucccgcggcuucggcuccggcaucaucaccuccaacgcccccauggacgagugcgacgccaagugccagaccccccagggcgccaucaacuccucccuccccuuccagaacguccaccccgucaccaucggcgagugccccaaguacguccgcuccgccaagcuccgcauggucaccggccuccgcaacauccccuccauccagucccgcggccucuucggcgccaucgccggcuucaucgagggcggcuggaccggcauggucgacggcugguacggcuaccaccaccagaacgagcagggcuccggcuacgccgccgaccagaaguccacccagaacgccaucaacggcaucaccaacaaggucaacuccgucaucgagaagaugaacacccaguucaccgccgucggcaaggaguucaacaagcucgagcgccgcauggagaaccucaacaagaaggucgacgacggcuuccucgacaucuggaccuacaacgccgagcuccucguccuccucgagaacgagcgcacccucgacuuccacgacuccaacgucaagaaccucuacgagaaggucaagucccagcucaagaacaacgccaaggagaucggcaacggcugcuucgaguucuaccacaagugcaacgacgagugcauggaguccgucaagaacggcaccuacgacuaccccaaguacuccgaggaguccaagcucaaccgcgagaagaucgacggcgucaagcucgaguccaugggcgucuaccagauccucgccaucuacuccaccgucgccuccucccucguccuccucgucucccucggcgccaucuccuucuggaugugcuccaacggcucccuccagugccgcaucugcaucuga

SEQ ID NO: 96514 - RNA, 1698 nt, Artificial Sequence
  derived and/or modified CDS sequence (opt2) from hemagglutinin__InfluenzaA__ABB82216
augaaggucaagcuccucguccuccucugcaccuucaccgccaccuacgccgacaccaucugcaucggcuaccacgccaacaacuccaccgacaccgucgacaccguccucgagaagaacgucaccgucacccacuccgucaaccuccucgaggacucccacaacggcaagcucugccuccucaagggcaucgccccccuccagcucggcaacugcuccgucgccggcuggauccucggcaaccccgagugcgagcuccucaucuccaaggaguccugguccuacaucgucgagacccccaaccccgagaacggcaccugcuaccccggcuacuucgccgacuacgaggagcuccgcgagcagcucuccuccgucuccuccuucgagcgcuucgagaucuuccccaaggaguccuccuggcccaaccacaccgucaccggcgucuccuccuccugcucccacaacggcaaguccuccuucuaccgcaaccuccucuggcucaccggcaagaacggccucuaccccaaccucuccaaguccuacgucaacaacaaggagaaggagguccucguccucuggggcguccaccacccccccaacaucggcgaccagcgcgcccucuaccacaccgagaacgccuacgucuccgucgucuccucccacuacucccgccgcuucacccccgagaucgccaagcgccccaagguccgcgaccaggagggccgcaucaacuacuacuggacccuccucgagcccggcgacaccaucaucuucgaggccaacggcaaccucaucgccccccgcuacgccuucgcccucucccgcggcuucggcuccggcaucaucaccuccaacgcccccauggacgagugcgacgccaagugccagaccccccagggcgccaucaacuccucccuccccuuccagaacguccaccccgucaccaucggcgagugccccaaguacguccgcuccgccaagcuccgcauggucaccggccuccgcaacauccccuccauccagucccgcggccucuucggcgccaucgccggcuucaucgagggcggcuggaccggcauggucgacggcugguacggcuaccaccaccagaacgagcagggcuccggcuacgccgccgaccagaaguccacccagaacgccaucaacggcaucaccaacaaggucaacuccgucaucgagaagaugaacacccaguucaccgccgucggcaaggaguucaacaagcucgagcgccgcauggagaaccucaacaagaaggucgacgacggcuuccucgacaucuggaccuacaacgccgagcuccucguccuccucgagaacgagcgcacccucgacuuccacgacuccaacgucaagaaccucuacgagaaggucaagucccagcucaagaacaacgccaaggagaucggcaacggcugcuucgaguucuaccacaagugcaacgacgagugcauggaguccgucaagaacggcaccuacgacuaccccaaguacuccgaggaguccaagcucaaccgcgagaagaucgacggcgucaagcucgaguccaugggcgucuaccagauccucgccaucuacuccaccgucgccuccucccucguccuccucgucucccucggcgccaucuccuucuggaugugcuccaacggcucccuccagugccgcaucugcaucuga

SEQ ID NO: 96515 - RNA, 1701 nt, Artificial Sequence
  derived and/or modified CDS sequence (opt2) from hemagglutinin__InfluenzaA__ABB82227
augaagaccaucaucgcccucuccuacaucuucugccucacccucggccaggaccuccccggcaacgacaacuccaaggccacccucugccucggccaccacgccguccccaacggcacccucgucaagaccaucaccgacgaccagaccgaggucaccaacgccaccgagcucguccaguccuccuccaccggcaagaucugcaacaacccccaccgcauccucgacggcauggacugcacccucaucgacgcccuccucggcgacccccacugcgacgucuuccagaacgagaccugggaccucuucgucgagcgcuccaaggccuucuccaacugcuaccccuacgacguccccgacuacgccucccuccgcucccucgccgccuccuccggcacccucgaguucaucaccgagggcuucaccuggaccggcgucacccagaacggcggcuccaacgccugcaagcgcggccccggcuccggcuucuucucccgccucaacuggcucaccaaguccggcaacaccuaccccguccucaacgucaccaugcccaacaacgacaacuucgacaagcucuacaucuggggcguccaccaccccuccaccgaccaggagcagaccucccucuacguccaggccuccggccgcgucaccgucuccacccgccgcucccagcagaccaucauccccaacaucggcucccgccccuggguccgcggccucuccucccgcaucuccaucuacuggaccaucgucaagcccggcgacguccucgucaucaacuccaacggcaaccucaucgccccccgcggcuacuucaagaugcgcaccggcaaguccuccaucaugcgcuccgacgcccccaucgacaccugcaucuccgagugcaucacccccaacggcuccauccccaacgacaagcccuuccagaacaucaacaagaucaccuacggcgccugccccaaguacgucaagcagaacacccucaagcucgccaccggcaugcgcaacguccccgagaagcagacccgcggccucuucggcgccaucgccggcuucaucgagaacggcugggagggcaugaucgacggcugguacggcuuccgccaccagaacuccgagggcaccggccaggccgccgaccucaaguccacccaggccgccaucgaccagaucaacggcaagcucaaccgcaucaucgagaagaccaacgagaaguuccaccagaucgagaaggaguucuccgaggucgagggccgcauccaggaccucgagaaguacgucgaggacaccaagaucgaccucugguccuacaacgccgagcuccucgucgccauggagaaccagcacaccaucgaccucaccgacuccgagaugaacaagcucuucgagaagacccgccgccagcuccgcgagaacgccgaggacaugggcaacggcugcuucaagaucuaccacaagugcgacaacgccugcaucgaguccauccgcaacggcaccuacgaccacgacgucuaccgcgacgaggcccucaacaaccgcuuccagaucaagggcgucgagcucaaguccggcuacaaggacuggauccucuggaucuccuucgccaucuccugcuuccuccucugcgucguccuccucggcuucaucaugugggccugccagcgcggcaacauccgcugcaacaucugcaucuga

SEQ ID NO: 96516 - RNA, 1698 nt, Artificial Sequence
  derived and/or modified CDS sequence (opt2) from hemagglutinin__InfluenzaA__ABB83026
augaaggucaagcuccucauccuccucugcaccuucaccgccaccuacgccgacaccaucugcaucggcuaccacgccaacaacuccaccgacaccgucgacaccguccucgagaagaacgucaccgucacccacuccgucaaccuccucgaggacucccacaacggcaagcucugccuccucaagggcaucgccccccuccagcucggcaacugcuccgucgccggcuggauccucggcaaccccgagugcgagcuccucaucuccaaggaguccugguccuacaucgucgagacccccaaccccgagaacggcaccugcuaccccggcuacuucgccgacuacgaggagcuccgcgagcagcucuccuccgucuccuccuucgagcgcuucgagaucuuccccaaggaguccuccuggcccaaccacaccgucaccggcgucuccgccuccugcucccacaacggcaaguccuccuucuaccgcaaccuccucuggcucaccgagaagaacggccucuaccccaaccucuccaaguccuacgccaacaacaaggagaaggagguccucauccucuggggcguccaccacccccccaacaucggcgaccagcgcacccucuaccacaccgagaacgccuacgucuccgucgucuccucccacuacucccgccgcuucacccccgagaucaccaagcgccccaagguccgcgaccaggagggccgcaucaacuacuacuggacccuccucgagcccggcgacaccaucaucuucgaggccaacggcaaccucaucgcccccugguacgccuucgcccucucccgcggcuucggcuccggcaucaucaccuccaacgcccccauggacgagugcgacgccaagugccagaccccccagggcgccaucaacuccucccuccccuuccagaacguccaccccgucaccaucggcgagugccccaaguacguccgcuccgccaagcuccgcauggucaccggccuccgcaacauccccuccauccagucccgcggccucuucggcgccaucgccggcuucaucgagggcggcuggaccggcauggucgacggcugguacggcuaccaccaccagaacgagcagggcuccggcuacgccgccgaccagaaguccacccagaacgccaucaacggcaucaccaacaaggucaacuccgucaucgagaagaugaacacccaguucaccgccgucggcaaggaguucaacaagcucgagcgccgcauggagaaccucaacaagaaggucgacgacggcuuccucgacaucuggaccuacaacgccgagcuccucguccuccucgagaacgagcgcacccucgacuuccacgacuccaacgucaagaaccucuacgagaaggucaagucccagcucaagaacaacgccaaggagaucggcaacggcugcuucgaguucuaccacaagugcaacaacgagugcauggaguccgucaagaacggcaccuacgacuaccccaaguacuccgaggaguccaagcucaaccgcgagaagaucgacggcgucaagcucgaguccaugggcgucuaccagauccucgccaucuacuccaccgucgccuccucccucguccuccucgucucccucggcgccaucuccuucuggaugugcuccaacggcucccuccagugccgcaucugcaucuga

SEQ ID NO: 96517 - RNA, 1698 nt, Artificial Sequence
  derived and/or modified CDS sequence (opt2) from hemagglutinin__InfluenzaA__ABB83127
augaaggucaagcuccucauccuccucugcaccuucaccgccaccuacgccgacaccaucugcaucggcuaccacgccaacaacuccaccgacaccgucgacaccguccucgagaagaacgucaccgucacccacuccgucaaccuccucgaggacucccacaacggcaagcucugccuccucaagggcaucgccccccuccagcucggcaacugcuccgucgccggcuggauccucggcaaccccgagugcgagcuccucaucuccaaggaguccugguccuacaucgucgagacccccaaccccgagaacggcgccugcuaccccggcuacuucgccgacuacgaggagcuccgcgagcagcucuccuccgucuccuccuucgagcgcuucgagaucuuccccaaggaguccuccuggcccaaccacaccgucaccggcgucuccgccuccugcucccacaacggcaaguccuccuucuaccgcaaccuccucuggcucaccggcaagaacggccucuaccccaaccucuccaaguccuacgccaacaacaaggagaaggagguccucauccucuggggcguccaccacccccccaacaucggcgaccagcgcacccucuaccacaccgagaacgccuacgucuccgucgucuccucccacuacucccgccgcuucacccccgagaucaccaagcgccccaagguccgcgaccaggagggccgcaucaacuacuacuggacccuccucgagcccggcgacaccaucaucuucgaggccaacggcaaccucaucgcccccugguacgccuucgcccucucccgcggcuucggcuccggcaucaucaucuccaacgcccccauggacgagugcgacgccaagugccagaccccccagggcgccaucaacuccucccuccccuuccagaacguccaccccgucaccaucggcgagugccccaaguacguccgcuccgccaagcuccgcauggucaccggccuccgcaacauccccuccauccagucccgcggccucuucggcgccaucgccggcuucaucgagggcggcuggaccggcauggucgacggcugguacggcuaccaccaccagaacgagcagggcuccggcuacgccgccgaccagaaguccacccagaacgccaucaacggcaucaccaacaaggucaacuccgucaucgagaagaugaacacccaguucaccgccgucggcaaggaguucaacaagcucgagcgccgcauggagaaccucaacaagaaggucgacgacggcuuccucgacaucuggaccuacaacgccgagcuccucguccuccucgagaacgagcgcacccucgacuuccacgacuccaacgucaagaaccucuacgagaaggucaagucccagcucaagaacaacgccaaggagaucggcaacggcugcuucgaguucuaccacaagugcaacaacgagugcauggaguccgucaagaacggcaccuacgacuaccccaaguacuccgaggaguccaagcucaaccgcgagaagaucgacggcgucaagcucgacuccaugggcgucuaccagauccucgccaucuacuccaccgucgccuccucccucguccuccucgucucccucggcgccaucuccuucuggaugugcuccaacggcucccuccagugccgcaucugcaucuga

SEQ ID NO: 96518 - RNA, 1698 nt, Artificial Sequence
  derived and/or modified CDS sequence (opt2) from hemagglutinin__InfluenzaA__ABB83138
augaaggucaagcuccucauccuccucugcaccuucaccgccaccuacgccgacaccaucugcaucggcuaccacgccaacaacuccaccgacaccgucgacaccguccucgagaagaacgucaccgucacccacuccgucaaccuccucgaggacucccacaacggcaagcucugccuccucaagggcaucgccccccuccagcucggcaacugcuccgucgccggcuggauccucggcaaccccgagugcgagcuccucaucuccaaggaguccugguccuacaucgucgagacccccaaccccgagaacggcgccugcuaccccggcuacuucgccgacuacgaggagcuccgcgagcagcucuccuccaucuccuccuucgagcgcuucgagaucuuccccaaggaguccuccuggcccaaccacaccgucaccggcgucuccgccuccugcucccacaacggcaaguccuccuucuaccgcaaccuccucuggcucaccggcaagaacggccucuaccccaaccucuccaaguccuacgccaacaacaaggagaaggagguccucauccucuggggcguccaccacccccccaacaucggcgaccagcgcacccucuaccacaccgagaacgccuacgucuccgucgucuccucccacuacucccgccgcuucacccccgagaucaccaagcgccccaagguccgcgaccaggagggccgcaucaacuacuacuggacccuccucgagcccggcgacaccaucaucuucgaggccaacggcaaccucaucgcccccugguacgccuucgcccucucccgcggcuucggcuccggcaucaucaccuccaacgcccccauggacgagugcgacgccaagugccagaccccccagggcgccaucaacuccucccuccccuuccagaacguccaccccgucaccaucggcgagugccccaaguacguccgcuccgccaagcuccgcauggucaccggccuccgcaacauccccuccauccagucccgcggccucuucggcgccaucgccggcuucaucgagggcggcuggaccggcauggucgacggcugguacggcuaccaccaccagaacgagcagggcuccggcuacgccgccgaccagaaguccacccagaacgccaucaacggcaucaccaacaaggucaacuccgucaucgagaagaugaacacccaguucaccgccgucggcaaggaguucaacaagcucgagcgccgcauggagaaccucaacaagaaggucgacgacggcuuccucgacaucuggaccuacaacgccgagcuccucguccuccucgagaacgagcgcacccucgacuuccacgacuccaacgucaagaaccucuacgagaaggucaagucccagcucaagaacaacgccaaggagaucggcaacggcugcuucgaguucuaccacaagugcaacaacgagugcauggaguccgucaagaacggcaccuacgacuaccccaaguacuccgaggaguccaagcucaaccgcgagaagaucgacggcgucaagcucgacuccaugggcgucuaccagauccucgccaucuacuccaccgucgccuccucccucguccuccucgucucccucggcgccaucuccuucuggaugugcuccaacggcucccuccagugccgcaucugcaucuga

SEQ ID NO: 96519 - RNA, 1701 nt, Artificial Sequence
  derived and/or modified CDS sequence (opt2) from hemagglutinin__InfluenzaA__ABB86877
augaaggccauccuccucauccuccucuacaccuucaccgccaccaacgccgacacccucugcaucggcuaccacgccaacaacuccaccgacaccgucgacaccguccucgagaagaacgucaccgucacccacuccgucaaccuccucgaggaccgccacaacggcaagcucugcaaccucggcggcaucgccccccucuaccucggcaacugcaacaucgccggcuggcuccucggcaaccccgagugcgagcuccucuucaccgucuccuccugguccuacaucgucgagaccuccaacuccgacaacggcaccugcuaccccggcgacuucaucaacuacgaggagcuccgcgagcagcucuccuccauguccuccuacgagcgcuucgagaucuuccccaaggaguccuccuggcccaaccacgagaccaaccgcggcgucaccgccgccugccccuacgccggcgccaacuccuucuaccgcaaccucaucuggcucgucaagaagggcaacuccuaccccaagaucaacaaguccuacgucaacaacaaggagaaggagguccucguccucuggggcauccaccacccccccaccuccgccgaccagcagucccucuaccagaacgccgacgccuacgucuccgucgaguccuccaaguacaacaagaaguucaagcccgagaucgccacccgccccaagguccgcggccaggccggccgcaugaacuacuacuggacccucgucgagcccggcgacaccaucaccuucgaggccaccggcaaccucgucgucccccgcuacgccuucgccaugaaccgcggcuccggcuccggcaucaucaucuccgacacccccguccacgacugcaacaccaccugccagacccccaagggcgccaucaacaccucccuccccuuccagaacguccaccccgucaccaucggcgagugccccaaguacgucaaguccaccaagcuccgcauggccaccggccuccgcaacauccccuccauccagucccgcggccucuucgaggccaucgccggcuucaucgagggcggcuggaccggcaugaucgacggcugguacggcuaccaccaccagaacgagcagggcuccggcuacgccgccgaccgcaaguccacccagaacgccaucgacggcaucaccaacaaggucaacuccgucaucgagaagaugaacacccaguucaccgccgucggcaaggaguucaaccaccucgagaagcgcaucgagaaccucaacaagaaggucgacgacggcuuccucgacgucuggaccuacaacgccgagcuccucguccuccucgagaacgagcgcacccucgacuuccacgacuccaacgucaagaaccucuacgagaagguccgcucccagcuccgcaacaacgccaaggagaucggcaacggcugcuucgaguucuaccacaagugcgacgacaccugcauggaguccguccgcaacggcaccuacgacuaccucaaguacuccgaggaguccaagcucaaccgcgagaagaucgagggcgucaagcucgacuccgcccgcaucuaccagauccucgccaucuacuccaccgucgccuccucccucguccuccucgucucccucggcgccaucuccuucuggaugugcuccaacggcucccuccagugccgcaucugcaucuga

SEQ ID NO: 96520 - RNA, 1701 nt, Artificial Sequence
  derived and/or modified CDS sequence (opt2) from hemagglutinin__InfluenzaA__ABB86887
augaaggccauccuccucauccuccucuacaccuucaccgccaccaacgccgacacccucugcaucggcuaccacgccaacaacuccaccgacaccgucgacaccguccucgagaagaacgucaccgucacccacuccgucaaccuccucgaggaccgccacaacggcaagcucugcaaccucggcggcaucgccccccucuaccucggcaacugcaacaucgccggcuggcuccucggcaaccccgagugcgagcuccucuucaccgucuccuccugguccuacaucgucgagaccuccaacuccgacaacggcaccugcuaccccggcgacuucaucaacuacgaggagcuccgcgagcagcucuccuccauguccuccuacgagcgcuucgagaucuuccccaaggaguccuccuggcccaaccacgagaccaaccgcggcgucaccgccgccugccccuacgccggcgccaacuccuucuaccgcaaccucaucuggcucgucaagaagggcaacuccuaccccaagaucaacaaguccuacgucaacaacaaggagaaggagguccucguccucuggggcauccaccacccccccaccuccgccgaccagcagucccucuaccagaacgccgacgccuacgucuccgucgaguccuccaaguacaacaagaaguucaagcccgagaucgccacccgccccaagguccgcggccaggccggccgcaugaacuacuacuggacccucgucgagcccggcgacaccaucaccuucgaggccaccggcaaccucgucgucccccgcuacgccuucgccaugaagcgcggcuccggcuccggcaucaucaucuccgacacccccguccacgacugcaacaccaccugccagacccccaagggcgccaucaacaccucccuccccuuccagaacauccaccccgucaccaucggcgagugccccaaguacgucaaguccaccaagcuccgcauggccaccggccuccgcaacauccccuccauccagucccgcggccucuucggcgccaucgccggcuucaucgagggcggcuggaccggcaugaucgacggcugguacggcuaccaccaccagaacgagcagggcuccggcuacgccgccgaccgcaaguccacccagaacgccaucgacggcaucaccaacaaggucaacuccgucaucgagaagaugaacacccaguucaccgccgucggcaaggaguucaaccaccucgagaagcgcaucgagaaccucaacaagaaggucgacgacggcuuccucgacgucuggaccuacaacgccgagcuccucguccuccucgagaacgagcgcacccucgacuuccacgacuccaacgucaagaaccucuacgagaagguccgcucccagcuccgcaacaacgccaaggagaucggcaacggcugcuucgaguucuaccacaagugcgacgacaccugcauggaguccguccgcaacggcaccuacgacuaccucaaguacuccgaggaguccaagcucaaccgcgagaagaucgagggcgucaagcucgacuccgcccgcaucuaccagauccucgccaucuacuccaccgucgccuccucccucguccuccucgucucccucggcgccaucuccuucuggaugugcuccaacggcucccuccagugccgcaucugcaucuga

SEQ ID NO: 96521 - RNA, 1698 nt, Artificial Sequence
  derived and/or modified CDS sequence (opt2) from hemagglutinin__InfluenzaA__ABB86899
augaaggucaagcuccucauccuccucugcaccuucaccgccaccuacgccgacaccaucugcaucggcuaccacgccaacaacuccaccgacaccgucgacaccguccucgagaagaacgucaccgucacccacuccgucaaccuccucgaggacucccacaacggcaagcucugccuccucaagggcaucgccccccuccagcucggcaacugcuccgucgccggcuggauccucggcaaccccgagugcgagcuccucaucuccaaggaguccugguccuacaucgucgagacccccaaccccgagaacggcgccugcuaccccggccacuucgccgacuacgaggagcuccgcgagcagcucuccuccgucuccuccuucgagcgcuucgagaucuuccccaaggaguccuccuggcccaaccacaccaucaccggcgucuccgccuccugcucccacaacggcaagcgcuccuucuaccgcaaccuccucuggcucaccggcaagaacggccucuaccccaaccucuccaaguccuacgccaacaacaaggagaaggagguccucauccucuggggcguccaccacccccccaacaucggcgaccagcgcacccucuaccacaccgagaacgccuacgucuccgucgucuccucccacuacucccgccgcuucacccccgagaucaccaagcgccccaagguccgcgaccaggagggccgcaucaacuacuacuggacccuccucgagcccggcgacaccaucaucuucgaggccaacggcaaccucaucgcccccugguacgccuucgcccucucccgcggcuucggcuccggcaucaucaccuccaacgcccccauggacgagugcgacgccaagugccagaccccccagggcgccaucaacuccucccuccccuuccagaacguccaccccgucaccaucggcgagugccccaaguacguccgcuccgccaagcuccgcauggucaccggccuccgcaacauccccuccauccagucccgcggccucuucggcgccaucgccggcuucaucgagggcggcuggaccggcauggucgacggcugguacggcuaccaccaccagaacgagcagggcuccggcuacgccgccgaccagaaguccacccagaacgccaucaacggcaucaccaacaaggucaacuccgucaucgagaagaugaacacccaguucaccgccgucggcaaggaguucuccaagcucgagcgccgcauggagaaccucaacaagaaggucgacgacggcuuccucgacaucuggaccuacaacgccgagcuccucguccuccucgagaacgagcgcacccucgacuuccacgacuccaacgucaagaaccucuacgagaaggucaagggccagcucaagaacaacgccaaggagaucggcaacggcugcuucgaguucuaccacaagugcaacaacgagugcauggaguccgucaagaacggcaccuacgacuaccccaaguacuccgaggaguccaagcucaaccgcgagaagaucgacggcgucaagcucgacuccaugggcgucuaccagauccucgccaucuacuccaccgucgccuccucccucauccuccucgucucccucggcgccaucuccuucuggaugugcuccaacggcucccuccagugccgcaucugcaucuga

SEQ ID NO: 96522 - RNA, 1701 nt, Artificial Sequence
  derived and/or modified CDS sequence (opt2) from hemagglutinin__InfluenzaA__ABB86907
augaaggccauccuccucguccuccucuacaccuucaccuccaccaacgccgacacccucugcaucggcuaccacgccaacaacuccaccgacaccgucgacaccguccucgagaagaacgucaccgucacccacuccgucaaccuccucgaggacaagcacaacggcaagcucugccgccucggcggcaucgccccccuccaccucggcaagugcaacaucgccggcuggcuccucggcaaccccgagugcgaccuccuccucaccgucuccuccugguccuacaucgucgagaccuccaacuccuacaacggcaccugcuaccccggcgacuucaccaacuacgaggagcuccgcgagcagcucuccuccgucuccuccuucgagcgcuucgagaucuuccccaaggccuccuccuggcccaaccacgagaccaaccgcggcgucaccgccgccugcccccacgccggcaccaacuccuucuaccgcaaccucaucuggcucgucaagaagggcaacaccuaccccaagcucuccaaguccuacgucaacaacaagggcaaggagguccucguccucuggggcauccaccaccccuccaccuccaccgaccagcagucccucuaccagaacgccgacaccuacgucuucgucggcaccuccaaguacaacaagaaguucaagcccgagaucgccguccgccccaaggucaaggaccaggccggccgcaugaacuacuacuggacccucgucgagcccggcgacaccaucaccuucgaggccaccggcaaccucgucgucccccgcuacgccuucgccaugaaccgcggccacggcuccggcaucaucaucuccgacacccccguccacgacugcaacaccaccugccagacccccaagggcgccaucaacaccucccuccccuuccagaacguccaccccgucaccaucggcaagugccccaaguacgucaaguccacccgccuccgcauggccaccggccuccgcaacauccccuccauccagucccgcggccucuucggcgccaucgccggcuucaucgagggcggcuggaccggcaugaucgacggcugguacggcuaccaccaccagaacggccagggcuccggcuacgccgccgaccagaaguccacccagaacgccaucgacggcaucaccaacaaggucaacuccgucaucgagaagaugaacacccaguucaccgccgucggcaaggaguucaaccaccucgagaagcgcaucgagaaccucaacaagaaggucgacgacggcuuccucgacgucuggaccuacaacgccgagcuccucguccuccucgagaacgagcgcacccucgacuuccacgacuccaacgucaagaaccucuacgagaagguccgccgccagcucaagaacaacgccaaggagaucggcaacggcugcuucgaguucuaccacaacugcgacgacgccugcauggaguccgucaagaacggcaccuacgacuaccccaaguacuccgaggagucccgccucaaccgcgaggagaucaacggcaucaagcucgacuccacccgcaucuaccagauccucgccaucuacuccaccgucgccuccuccuccguccuccucgucucccucggcgccaucuccuucuggaugugcuccaacggcucccuccagugccgcaucugcaucuga

SEQ ID NO: 96523 - RNA, 1698 nt, Artificial Sequence
  derived and/or modified CDS sequence (opt2) from hemagglutinin__InfluenzaA__ABB86917
augaaggucaagcuccucauccuccucugcaccuucaccgccaccuacgccgaccccaucugcaucggcuaccacgccaacaacuccaccgacaccgucgacaccguccucgagaagaacgucgccgucacccacuccgucaaccuccucgaggacucccacaacggcaagcucugccuccucaagggcaucgccccccuccagcucggcaacugcuccgucgccggcuggauccucggcaaccccgagugcgagcuccucaucuccaaggaguccugguccuacaucgucgagacccccaaccccgagaacggcgccugcuaccccggcuacuucgccgacuacgaggagcuccgcgagcagcucuccuccgucuccuccuucgagcgcuucgagaucuuccccaaggaguccuccuggcccaaccacaccgucaccggcgucuccgccuccugcucccacaacggcaaguccuccuucuaccgcaaccuccucuggcucaccggcaagaacggccucuaccccaaccucuccaaguccuacgccaacaacaaggagaaggagguccucauccucuggggcguccaccacccccccaacaucggcgaccagcgcacccucuaccacaccgagaacgccuacgucuccgucgucuccucccacuacucccgccgcuucacccccgagaucaccaagcgccccaagguccgcgaccaggagggccgcaucaacuacuacuggacccuccucgagcccggcgacaccaucaucuucgaggccaacggcaaccucaucgcccccugguacgccuucgcccucucccgcggcuucggcuccggcaucaucaccuccaacgcccccauggacgagugcgacgccaagugccagaccccccagggcgccaucaacuccucccuccccuuccagaacguccaccccgucaccaucggcgagugccccaaguacguccgcuccgccaagcuccgcauggucaccggccuccgcaacauccccuccauccagucccgcggccucuucggcgccaucgccggcuucaucgagggcggcuggaccggcauggucgacggcugguacggcuaccaccaccagaacgagcagggcuccggcuacgccgccgaccagaaguccacccagaacgccaucaacggcaucaccaacaaggucaacuccgucaucgagaagaugaacacccaguucaccgccgucggcaaggaguucaacaagcucgagcgccgcauggagaaccucaacaagaaggucgacgacggcuuccucgacaucuggaccuacaacgccgagcuccucguccuccucgagaacgagcgcacccucgacuuccacgacuccaacgucaagaaccucuacgagaaggucaagucccagcucaagaacaacgccaaggagaucggcaacggcugcuucgaguucuaccacaagugcaacaacgagugcauggaguccgucaagaacggcaccuacgacuaccccaaguacuccgaggaguccaagcucaaccgcgagaagaucgacggcgucaagcucgacuccaugggcgucuaccagauccucgccaucuacuccaccgucgccuccucccucguccuccucgucucccucggcgccaucuccuucuggaugugcuccaacggcucccuccagugccgcaucugcaucuga

SEQ ID NO: 96524 - RNA, 1698 nt, Artificial Sequence
  derived and/or modified CDS sequence (opt2) from hemagglutinin__InfluenzaA__ABB86929
augaaggucaagcuccucauccuccucuacaccuucaccgccaccuacgccgacaccaucugcaucggcuaccacgccaacaacuccaccgacaccgucgacaccguccucgagaagaacgucaccgucacccacuccgucaaccuccucgaggacucccacaacggcaagcucugccuccucaagggcaucgccccccuccagcucggcaacugcuccgucgccggcuggauccucggcaaccccgagugcgagcuccucaucuccaaggaguccugguccuacaucgucgagacccccaaccccgagaacggcgccugcuaccccggccacuucgccgacuacgaggagcuccgcgagcagcucuccuccgucuccuccuucgagcgcuucgagaucuuccccaaggaguccuccuggcccaaccacaccaucaccggcgucuccgccuccugcucccacaacggcaagcgcuccuucuaccgcaaccuccucuggcucaccggcaagaacggccucuaccccaaccucuccaaguccuacgccaacaacaaggagaaggagguccucauccucuggggcguccaccacccccccaacaucggcgaccagcgcacccucuaccacaccgagaacgccuacgucuccgucgucuccucccacuacucccgccgcuucacccccgagaucaccaagcgccccaagguccgcgaccaggagggccgcaucaacuacuacuggacccuccucgagcccggcgacaccaucaucuucgaggccaacggcaaccucaucgcccccugguacgccuucgcccucucccgcggcuucggcuccggcaucaucaccuccaacgcccccauggacgagugcgacgccaagugccagaccccccagggcgccaucaacuccucccuccccuuccagaacguccaccccgucaccaucggcgagugccccaaguacguccgcuccgccaagcuccgcauggucaccggccuccgcaacauccccuccauccagucccgcggccucuucggcgccaucgccggcuucaucgagggcggcuggaccggcauggucgacggcugguacggcuaccaccaccagaacgagcagggcuccggcuacgccgccgaccagaaguccacccagaacgccaucaacggcaucaccaacaaggucaacuccgucaucgagaagaugaacacccaguucaccgccgucggcaaggaguucuccaagcucgagcgccgcauggagaaccucaacaagaaggucgacgacggcuuccucgacaucuggaccuacaacgccgagcuccucguccuccucgagaacgagcgcacccucgacuuccacgacuccaacgucaagaaccucuacgagaaggucaagggccagcucaagaacaacgccaaggagaucggcaacggcugcuucgaguucuaccacaagugcaacaacgagugcauggaguccgucaagaacggcaccuacgacuaccccaaguacuccgaggaguccaagcucaaccgcgagaagaucgacggcgucaagcucgacuccaugggcgucuaccagauccucgccaucuacuccaccgucgccuccucccucauccuccucgucucccucggcgccaucuccuucuggaugugcuccaacggcucccuccagugccgcaucugcaucuga

SEQ ID NO: 96525 - RNA, 1701 nt, Artificial Sequence
  derived and/or modified CDS sequence (opt2) from hemagglutinin__InfluenzaA__ABB86937
augaaggccauccuccucguccuccucuacaccuucaccuccaccaacgccgacacccucugcaucggcuaccacgccaacaacuccaccgacaccgucgacaccguccucgagaagaacgucaccgucacccacuccgucaaccuccucgaggacaagcacaacggccgccucugcaagcucggcggcaucgccccccuccaccucggcaagugcaacaucgccggcuggcuccucggcaaccccgagugcgagcuccucuucaccgucuccuccugguccuacaucgucgagaccuccaacuccuacaacggcaccugcuaccccggcgacuucaucaacuacgaggagcuccgcgagcagcucuccuccgucuccuccuucgagcgcuucgagaucuuccccaaggccuccuccuggcccaaccacgagaccaaccgcggcgucaccgccgccugcccccacgccggcaccaacuccuucuaccgcaaccucaucuggcucgucaagaagggcaacaccuaccccaagaucuccaaguccuacgucaacaacaagggcaaggagguccucguccucuggggcauccaccaccccuccaccuccaacgaccagcagucccucuaccagaacgccgacaccuacgucuucgucggccccuccaaguacaacaagaaguucaagcccgagaucgccacccgccccaagguccgcgaccaggccggccgcaugaacuacuacuggacccucgucgagcccggcgacaccaucaccuucgaggccaccggcaaccucgucgucccccgcuacgccuucgccaugaaccgcggcuccgaguccggcaucaucaucuccgacacccccguccacgacugcaacaccaccugccagacccccaagggcgccaucaacaccucccuccccuuccagaacguccaccccgucaccaucggcgagugccccaaguacgucaaguccacccgccuccgcauggccaccggccuccgcaacauccccuccauccagucccgcggccucuucggcgccaucgccggcuucaucgaggagggcuggaccggcaugaucgacggcugguacggcuaccaccaccagaacggccagggcuccggcuacgccgccgaccagaaguccacccagaacgccaucgacggcaucaccaacaaggucaacuccgucaucgagaagaugaacacccaguucaccgccgucggcaaggaguucaaccaccucgagaagcgcaucgagaaccucaacaagaaggucgacgacggcuuccucgacgucuggaccuacaacgccgagcuccucguccuccucgagaacgagcgcacccucgacuuccacgacuccaacgucaagaaccucuacgagaagguccgccgccagcucaagaacaacgccaaggagaucggcaacggcugcuucgaguucuaccacaagugcgacgacgccugcauggaguccgucaagaacggcaccuacgacuaccccaaguacuccgaggagucccgccucaaccgcgaggagaucaacggcaucaagcucgacuccacccgcaucuaccagauccucgccaucuacuccaccgucgccuccuccuccguccuccucgucucccucggcgccaucuccuucuggaugugcuccaacggcucccuccagugccgcaucugcaucuga

SEQ ID NO: 96526 - RNA, 1701 nt, Artificial Sequence
  derived and/or modified CDS sequence (opt2) from hemagglutinin__InfluenzaA__ABB86946
augaaggccauccuccucguccuccucuacaccuucaccgccgccaacgccgacacccucugcaucggcuaccacgccaacaacuccaccgacaccgucgacaccguccucgagaagaacgucaccgucacccacuccgucaaccuccucgaggaccgccacaacggcaagcucugcaagcuccgcggcaucgccccccuccaccucggcaagugcaacaucgccggcuggcuccucggcaaccccgagugcgagucccucuccaccgucuccuccugguccuacaucgucgagaccuccaacuccgacaacggcaccugcuaccccggcgacuucaucaacuacgaggagcuccgcgagcagcucuccuccgucuccuccuucgagcgcuucgagaucuuccccaaggccuccuccuggcccaaccacgagaccaaccgcggcaccaccgccgccugccccuacgccggcgccaacuccuucuaccgcaaccucaucuggcucgucaagaagggcaacuccuaccccaagcucaacaaguccuacgucaacaacaagggcaaggagguccucguccucuggggcauccaccaccccuccaccuccaacgagcagcagucccucuaccagaacgccgacaccuacgucuucgucggcuccuccaaguacaacaagaaguucaagcccgagaucgccacccgccccaagguccgcgaccaggccggccgcaugaacuacuacuggacccucaucgagcccggcgacaccaucaccuucgaggccaccggcaaccucgucgucccccgcuacgccuucgccaugaaccgcggcuccggcuccggcaucaucaucuccgacacccccguccacgacugcaacaccaccugccagacccccaagggcgccaucaacaccucccuccccuuccagaacguccaccccgucaccaucggcgagugccccaaguacgucaaguccaccaagcuccgcauggccaccggccuccgcaacauccccuccauccagucccgcggccucuucggcgccaucgccggcuucaucgagggcggcuggaccggcaugaucgacggcugguacggcuaccaccaccagaacgagcagggcuccggcuacgccgccgaccagaaguccacccagaacgccaucgacggcaucaccaacaaggucaacuccgucaucgagaagaugaacacccaguucaccgccgucggcaaggaguucaaccaccucgagaagcgcaucgagaaccucaacaagaaggucgacgacggcuuccucgacgucuggaccuacaacgccgagcuccucguccuccucgagaacgagcgcacccucgacuuccacgacuccaacgucaagaaccucuacgagaagguccgcucccagcucaagaacaacgccaaggagaucggcaacggcugcuucgaguucuaccacaagugcgacgacgccugcauggaguccgucaagaacggcaccuacgacuaccccaaguacuccgaggagucccgccucaaccgcgaggagaucgacggcaucaagcucgacuccacccgcaucuaccagauccucgccaucuacuccaccgucgccuccuccuccguccuccucgucucccucggcgccaucuccuucuggaugugcuccaacggcucccuccagugccgcaucugcaucuga

SEQ ID NO: 96527 - RNA, 1701 nt, Artificial Sequence
  derived and/or modified CDS sequence (opt2) from hemagglutinin__InfluenzaA__ABB96319
augaagaccaucaucgcccucuccuacaucuucugccaggucuucgcccagaaccuccccggcaacgacaacuccaccgccacccucugccucggccaccacgccguccccaacggcacccucgucaagaccaucaccaacgaccagaucgaggucaccaacgccaccgagcucguccaguccuccuccaccggccgcaucugcgacaacccccaccgcauccucgacggcaagaacugcacccucaucgacgcccuccucggcgacccccacugcgacggcuuccagaacgagaagugggaccucuucgucgagcgcuccaaggccuucuccaacugcuaccccuacgacguccccgacuacgccucccuccgcucccucgucgccuccuccggcacccucgaguucuucaacgagggcuucaacuggaccggcgucacccagaacggcggcuccuacgccugcaagcgcggccccgacaacuccuucuucucccgccucaacuggcucuacaaguccgaguccaccuaccccguccucaacgucaccaugcccaacaacgacaacuucgacaagcucuacaucuggggcguccaccaccccuccaccgacaaggagcagaccaaccucuacguccaggccuccggccgcgucaccgucuccaccaagcgcucccagcagaccaucauccccaacgucggcccccgccccuggguccgcggccucuccucccgcaucuccaucuacuggaccaucgucaagcccggcgacguccuccucaucaacuccaacggcaaccucaucgccccccgcggcuacuucaagauccgcaccggcaaguccuccaucaugcgcuccgacgcccccaucggcaccugcuccuccgagugcaucacccccaacggcuccauccccaacgacaagcccuuccagaacgucaacaagaucaccuacggcgccugccccaaguacgucaagcagaacacccucaagcucgccaccggcaugcgcaacguccccgagaagcagacccgcggcaucuucggcgccaucgccggcuucaucgagaacggcugggagggcaugaucgacggcugguacggcuuccgccaccagaacuccgagggcaccggccaggccgccgaccucaaguccacccaggccgccaucgaccagaucaacggcaagcucaaccgcgucaucgagaagaccaacgagaaguuccaccagaucgagaaggaguucuccgaggucgagggccgcauccaggaccucgagaaguacgucgaggacaccaagaucgaccucugguccuacaacgccgagcuccucgucgcccucgagaaccagcacaccaucgaccucaccgacuccgagaugaacaagcucuucgagaagacccgccgccagcuccgcgagaacgccgaggacaugggcaacggcugcuucaagaucuaccacaagugcgacaacgccugcaucggcuccauccgcaacggcaccuacgaccacgacgucuaccgcgacgaggcccucaacaaccgcuuccagaucaagggcgucgagcucaaguccggcuacaaggacuggauccucuggaucuccuucgccaucuccugcuuccuccucugcgucguccuccucggcuucaucaugugggccugccagaagggcaacauccgcugcaacaucugcaucuga

SEQ ID NO: 96528 - RNA, 1701 nt, Artificial Sequence
  derived and/or modified CDS sequence (opt2) from hemagglutinin__InfluenzaA__ABB96330
augaagaccaucaucgcccucuccuacaucuucugccaggucuucgcccagaaccuccccggcaacgacaacuccaccgccacccucugccucggccaccacgccguccccaacggcacccucgucaagaccaucaccaacgaccagaucgaggucaccaacgccaccgagcucguccaguccuccuccaccggccgcaucugcgacaacccccaccgcauccucgacggcaagaacugcacccucaucgacgcccuccucggcgacccccacugcgacggcuuccagaacgagaagugggaccucuucgucgagcgcuccaaggccuucuccaacugcuaccccuacgacguccccgacuacgccucccuccgcucccucgucgccuccuccggcacccucgaguucuucaacgagggcuucaacuggaccggcgucacccagaacggcggcuccuacgccugcaagcgcggccccgacaacuccuucuucucccgccucaacuggcucuacaaguccgaguccaccuaccccguccucaacgucaccaugcccaacaacgacaacuucgacaagcucuacaucuggggcguccaccaccccuccaccgacaaggagcagaccaaccucuacguccaggccuccggccgcgucaccgucuccaccaagcgcucccagcagaccaucauccccaacgucggcucccgccccuggguccgcggccucuccucccgcaucuccaucuacuggaccaucgucaagcccggcgacguccuccucaucaacuccaacggcaaccucaucgccccccgcggcuacuucaagauccgcaccggcaaguccuccaucaugcgcuccgacgcccccaucggcaccugcuccuccgagugcaucacccccaacggcuccauccccaacgaccgccccuuccagaacgucaacaagaucaccuacggcgccugccccaaguacgucaagcagaacacccucaagcucgccaccggcaugcgcaacguccccgagaagcagacccgcggcaucuucggcgccaucgccggcuucaucgagaacggcugggagggcauggucgacggcugguacggcuuccgccaccagaacuccgagggcaccggccaggccgccgaccucaaguccacccaggccgccaucgaccagaucaacggcaagcucaaccgcgucaucgagaagaccaacgagaaguuccaccagaucgagaaggaguucuccgaggucgagggccgcauccagaaccucgagaaguacgucgaggacaccaagaucgaccucugguccuacaacgccgagcuccucgucgcccucgagaaccagcacaccaucgaccucaccgacuccgagaugaacaagcucuucgagaagacccgccgccagcuccgcgagaacgccgaggacaugggcaacggcugcuucaagaucuaccacaagugcgacaacgccugcaucggcuccauccgcaacggcaccuacgaccacgacgucuaccgcgacgaggcccucaacaaccgcuuccagaucaagggcgucgagcucaaguccggcuacaaggacuggauccucuggaucuccuucgccaucuccugcuuccuccucugcgucguccuccucggcuucaucaugugggccugccagaagggcaacauccgcugcaacaucugcaucuga

SEQ ID NO: 96529 - RNA, 1701 nt, Artificial Sequence
  derived and/or modified CDS sequence (opt2) from hemagglutinin__InfluenzaA__ABB96341
augaagaccaucaucgcccucuccuacaucuucugccaggucuucgcccagaaccuccccggcaacgacaacuccaccgccacccucugccucggccaccacgccguccccaacggcacccucgucaagaccaucaccaacgaccagaucgaggucaccaacgccaccgagcucguccaguccuccuccaccggccgcaucugcgacaacccccaccgcauccucgacggcaagaacugcacccucaucgacgcccuccucggcgacccccacugcgacggcuuccagaacgagaagugggaccucuucgucgagcgcuccaaggccuucuccaacugcuaccccuacgacguccccgacuacgccucccuccgcucccucgucgccuccuccggcacccucgaguucuucaacgagggcuucaacuggaccggcgucacccagaacggcggcuccuacgccugcaagaagggccccgacaacuccuucuucucccgccucaacuggcucuacaaguccgaguccaccuaccccguccucaacgucaccaugcccaacaacgacaacuucgacaagcucuacaucuggggcguccaccaccccuccaccgacaaggagcagaccaaccucuacguccaggccuccggccgcgucaccgucuccaccaagcgcucccagcagaccaucauccccaacgucggcucccgccccuggguccgcggccucuccucccgcaucuccaucuacuggaccaucgucaagcccggcgacguccuccucaucaacuccaacggcaaccucaucgccccccgcggcuacuucaagauccgcaccggcaaguccuccaucaugcgcuccgacgcccccaucggcaccugcuccuccgagugcaucacccccaacggcuccauccccaacgacaagcccuuccagaacgucaacaagaucaccuacggcgccugccccaaguacgucaagcagaacacccucaagcucgccaccggcaugcgcaacguccccgagaagcagacccgcggcaucuucggcgccaucgccggcuucaucgagaacggcugggagggcaugaucgacggcugguacggcuuccgccaccagaacuccgagggcaccggccaggccgccgaccucaaguccacccaggccgccaucgaccagaucaacggcaagcucaaccgcgucaucgagaagaccaacgagaaguuccaccagaucgagaaggaguucuccgaggucgagggccgcauccaggaccucgagaaguacgucgaggacaccaagaucgaccucugguccuacaacgccgagcuccucgucgcccucgagaaccagcacaccaucgaccucaccgacuccgagaugaacaagcucuucgagaagacccgccgccagcuccgcgagaacgccgaggacaugggcaacggcugcuucaagaucuaccacaagugcgacaacgccugcaucggcuccauccgcaacggcaccuacgaccacgacgucuaccgcgacgaggcccucaacaaccgcuuccagaucaagggcgucgagcucaaguccggcuacaaggacuggauccucuggaucuccuucgccaucuccugcuuccuccucugcgucguccuccucggcuucaucaugugggccugccagaagggcaacauccgcugcaacaucugcaucuga

SEQ ID NO: 96530 - RNA, 1701 nt, Artificial Sequence
  derived and/or modified CDS sequence (opt2) from hemagglutinin__InfluenzaA__ABB96395
augaagaccaucaucgcccucuccuacaucuucugccaggucuucgcccagaaccuccccggcaacgacaacuccaccgccacccucugccucggccaccacgccguccccaacggcacccucgucaagaccaucaccaacgaccagaucgaggucaccaacgccaccgagcucguccaguccuccuccaccggccgcaucugcgacuccccccaccgcauccucgacggcaagaacugcacccucauggacgcccuccucggcgacccccacugcgacggcuuccagaacgagaagugggaccucuucgucgagcgcuccaaggccuucuccaacugcuaccccuacgacguccccgacuacgccucccuccgcucccucgucgccuccuccggcacccucgaguucaucaacgagggcuucaacuggaccggcgucacccagaacggcggcuccuacgccugcaagcgcggccccgacaacuccuucuucucccgccucaacuggcucuacaaguccgaguccaccuaccccguccucaacgucaccaugcccaacaacgacaacuucgacaagcucuacaucuggggcguccaccaccccuccaccgacaaggagcagaccaaccucuacguccaggccuccggccgcgucaccgucuccaccaagcgcucccagcagaccaucauccccaacgucggcucccgccccuggguccgcggccucuccucccgcaucuccaucuacuggaccaucgucaagcccggcgacauccuccucaucaacuccaacggcaaccucaucgccccccgcggcuacuucaagauccgcaccggcaaguccuccaucaugcgcuccgacgcccccaucggcaccugcuccuccgagugcaucacccccaacggcuccauccccaacgacaagcccuuccagaacgucaacaagaucaccuacggcgccugccccaaguacgucaagcagaacacccucaagcucgccaccggcaugcgcaacguccccgagaagcagacccgcggcaucuucggcgccaucgccggcuucaucgagaacggcugggagggcaugaucgacggcugguacggcuuccgccaccagaacuccgagggcaccggccaggccgccgaccucaaguccacccaggccgccaucgaccagaucaacggcaagcucaaccgcgucaucgagcgcaccaacgagaaguuccaccagaucgagaaggaguucuccgaggucgagggccgcauccaggaccucgagaaguacgucgaggacaccaagaucgaccucugguccuacaacgccgagcuccucgucgcccucgagaaccagcacaccaucgaccucaccgacuccgagaugaacaagcucuucgagaagacccgccgccagcuccgcgagaacgccgaggacaugggcaacggcugcuucaagaucuaccacaagugcgacaacgccugcaucggcuccauccgcaacggcaccuacgaccacgacgucuaccgcgacgaggcccucaacaaccgcuuccagaucaagggcgucgagcucaaguccggcuacaaggacuggauccucuggaucuccuucgccaucuccugcuuccuccucugcgucguccuccucggcuucaucaugugggccugccagaagggcaacauccgcugcaacaucugcaucuga

SEQ ID NO: 96531 - RNA, 1698 nt, Artificial Sequence
  derived and/or modified CDS sequence (opt2) from hemagglutinin__InfluenzaA__ABB96487
augaaggucaagcuccucauccuccucugcaccuucaccgccaccuacgccgacaccaucugcaucggcuaccacgccaacaacuccaccgacaccgucgacaccguccucgagaagaacgucaccgucacccacuccgucaaccuccucgaggacucccacaacggcaagcucugccuccucaagggcaucgccccccuccagcucggcaacugcuccgucgccggcuggauccucggcaaccccgagugcgagcuccucaucuccaaggaguccugguccuacaucgucgagacccccaaccccgagaacggcgccugcuaccccggcuacuucgccgacuacgaggagcuccgcgagcagcucuccuccgucuccuccuucgagcgcuucgagaucuuccccaagaaguccuccuggcccaaccacaccgucaccggcgucuccgccuccugcucccacgacggcaaguccuccuucuaccgcaaccuccucuggcucaccggcaagaacggccucuaccccaaccucuccaaguccuacgccaacaacaaggagaaggagguccucauccucuggggcguccaccacccccccaacaucggcgaccagcgcacccucuaccacaccgagaacgccuacgucuccgucgucuccucccacuacucccgccgcuucacccccgagaucaccaagcgccccaagguccgcgaccaggagggccgcaucaacuacuacuggacccuccucgagcccggcgacaccaucaucuucgaggccaacggcaaccucaucgcccccugguacgccuucgcccucucccgcggcuucggcuccggcaucaucaccuccaacgcccccauggacgagugcgacgccaagugccagaccccccagggcgccaucaacuccucccuccccuuccagaacguccaccccgucaccaucggcgagugccccaaguacguccgcuccgccaagcuccgcauggucaccggccuccgcaacauccccuccauccagucccgcggccucuucggcgccaucgccggcuucaucgagggcggcuggaccggcauggucgacggcugguacggcuaccaccaccagaacgagcagggcuccggcuacgccgccgaccagaaguccacccagaacgccaucaacggcaucaccaacaaggucaacuccgucaucgagaagaugaacacccaguucaccgccgucggcaaggaguucaacaagcucgagcgccgcauggagaaccucaacaagaaggucgacgacggcuuccucgacaucuggaccuacaacgccgagcuccucguccuccucgagaacgagcgcacccucgacuuccacgacuccaacgucaagaaccucuacgagaaggucaagucccagcucaagaacaacgccaaggagaucggcaacggcugcuucgaguucuaccacaagugcaacaacgagugcauggaguccgucaagaacggcaccuacgacuaccccaaguacuccgaggaguccaagcucaaccgcgagaagaucgacggcgucaagcucgacuccaugggcgucuaccagauccucgccaucuacuccaccgucgccuccucccucguccuccucgucucccucggcgccaucuccuucuggaugugcuccaacggcucccuccagugccgcaucugcaucuga

SEQ ID NO: 96532 - RNA, 1701 nt, Artificial Sequence
  derived and/or modified CDS sequence (opt2) from hemagglutinin__InfluenzaA__ABB96520
augaagaccaucaucgcccucuccuacaucuucugccucgcccucggccaggaccuccccggcaacggcaacuccaccgccacccucugccucggccaccacgccguccccaacggcacccucgucaagaccaucaccgacgaccagaucgaggucaccaacgccaccgagcucguccaguccuccuccaccggcaagaucugcaacaacccccaccgcauccucgacggcaucgacugcacccucaucgacgcccuccucggcgacccccacugcgacgucuuccagaacgagaccugggaccucuucgucgagcgcuccaaggccuucuccaacugcuaccccuacgacguccccgacuacgccucccuccgcucccucgucgccuccuccggcacccucgaguucaucaccgagggcuucaccuggaccggcgucacccagaacggcggcuccaacgccugcaagcgcggccccggcuccggcuucuucucccgccucaacuggcucaccaaguccggcuccaccuaccccguccucaacgucaccaugcccaacaacgacaacuucgacaagcucuacaucuggggcguccaccaccccuccaccgaccaggagcagaccucccucuacguccaggccuccggccgcgucaccgucuccacccgccgcucccagcagaccaucauccccaacaucggcucccgccccuggguccgcggccucuccucccgcaucuccaucuacuggaccaucgucaagcccggcgacguccucgucaucaacuccaacggcaaccucaucgccccccgcggcuacuucaagaugcgcaccggcaaguccuccaucaugcgcuccgacgcccccaucgacaccugcaucuccgagugcaucacccccaacggcuccauccccaacgacaagcccuuccagaacgucaacaagaucaccuacggcgccugccccaaguacgucaagcagaagacccucaagcucgccaccggcaugcgcaacauccccgagaagaagacccgcggcaucuucggcgccaucgccggcuucaucgagaacggcugggagggcaugaucgacggcugguacggcuuccgccaccagaacuccgagggcaccggccaggccgccgaccucaaguccacccaggccgccaucgaccagaucaacggcaagcucaaccgcgucaucgagaagaccaacgagaaguuccaccagaucgagaaggaguucuccgaggucgagggccgcauccaggaccucgagaaguacgucgaggacaccaagaucgaccucugguccuacaacgccgagcuccucgucgcccucgagaaccagcacaccaucgaccucaccgacuccgagaugaacaagcucuucgagaagacccgccgccagcuccgcgagaacgccgaggacaugggcaacggcugcuucaagaucuaccacaagugcgacaacgccugcaucgaguccauccgcaacggcaccuacgaccacgacgucuaccgcgacgaggcccucaacaaccgcuuccagaucaagggcgucgagcucaaguccggcuacaaggacuggauccucuggaucuccuucgccaucuccugcuuccuccucugcgucguccuccucggcuucaucaugugggccugccagcgcggcaacauccgcugcaacaucugcaucuga

SEQ ID NO: 96533 - RNA, 1701 nt, Artificial Sequence
  derived and/or modified CDS sequence (opt2) from hemagglutinin__InfluenzaA__ABB96531
augaagaccaucaucgcccucuccuacauccucugccucgucuccgcccagaagauccccggcaacgacuccuccaccgccacccucugccucggccaccacgccguccccaacggcacccucgucaagaccaucaccaacgaccagaucgaggucaccaacgccaccgagcucguccaguccuccuccaccggccgcaucugcgacuccccccaccgcauccucgacggcgagaacugcacccucaucgacgcccuccucggcgacccccacugcgacggcuuccagaacaaggagugggaccucuucgucgagcgcuccaaggccuacuccaacugcuaccccuacgacguccccgacuacgccucccuccgcucccucgucgccuccuccggcacccucgaguucaacaacgaguccuucaacuggaccggcgucgcccagaacggcaccuccuacgccugcaagcgccgcuccaucaaguccuucuucucccgccucaacuggcuccaccagcucaaguacaaguaccccgcccucaacgucaccaugcccaacaacgacaaguucgacaagcucuacaucuggggcguccaccaccccuccaccgacuccgaccagaccucccucuacgcccaggccuccggccgcgucaccgucuccaccaagcgcucccagcagaccgucauccccaacaucggcucccgccccuggguccgcggcgucuccucccgcaucuccaucuacuggaccaucgucaagcccggcgacauccuccucaucaacuccaccggcaaccucaucgccccccgcggcuacuucaagauccgcuccggcaaguccuccaucaugcgcuccgacgcccccaucggcaagugcaacuccgagugcaucacccccaacggcuccauccccaacgacaagcccuuccagaacgucaaccgcaucaccuacggcgccugcccccgcuacgucaagcagaacacccucaagcucgccaccggcaugcgcaacguccccgagaagcagacccgcggcaucuucggcgccaucgccggcuucaucgagaacggcugggagggcauggucgacggcugguacggcuuccgccaccagaacuccgagggcaccggccaggccgccgaccucaaguccacccaggccgccaucaaccagaucaacggcaagcucaaccgccucaucgagaagaccaacgagaaguuccaccagaucgagaaggaguucuccgaggucgagggccgcauccaggaccucgagaaguacgucgaggacaccaagaucgaccucugguccuacaacgccgagcuccucgucgcccucgagaaccagcacaccaucgaccucaccgacuccgagaugaacaagcucuucgagcgcacccgcaagcagcuccgcgagaacgccgaggacaugggcaacggcugcuucaagaucuaccacaagugcgacaacgccugcaucggcuccauccgcaacggcaccuacgaccacgacgucuaccgcgacgaggcccucaacaaccgcuuccagaucaagggcgucgagcucaaguccggcuacaaggacuggauccucuggaucuccuucgccaucuccugcuuccuccucugcgucguccuccucggcuucaucaugugggccugccagaagggcaacauccgcugcaacaucugcaucuga

SEQ ID NO: 96534 - RNA, 1701 nt, Artificial Sequence
  derived and/or modified CDS sequence (opt2) from hemagglutinin__InfluenzaA__ABC02234
augaagaccaucaucgcccucuccuacauccucugccucgucuucgcccagaagcuccccggcaacgacaacuccaccgccacccucugccucggccaccacgccguccccaacggcacccucgucaagaccaucaccaacgaccagaucgaggucaccaacgccaccgagcucguccaguccuccuccaccggccgcaucugcgacuccccccaccgcauccucgacggcgagaacugcacccucaucgacgcccuccucggcgacccccacugcgacggcuuccagaacaaggagugggaccucuucgucgagcgcuccaaggccuacuccaacugcuaccccuacgacguccccgacuacgccucccuccgcucccucgucgccuccuccggcacccucgaguucaacaacgaguccuucaacuggaccggcgucgcccagaacggcaccuccuacgccugcaagcgccgcuccaucaaguccuucuucucccgccucaacuggcuccaccagcucaaguacaaguaccccgcccucaacgucaccaugcccaacaacgacaaguucgacaagcucuacaucuggggcguccaccaccccuccaccgacuccgaccagaccucccucuacgcccaggccuccggccgcgucaccgucuccaccaagaucucccagcagaccgucauccccaacaucggcucccgccccuggguccgcggcgucuccucccgcaucuccaucuacuggaccaucgucaagcccggcgacauccuccucaucaacuccaccggcaaccucaucgccccccgcggcuacuucaagauccgcuccggcaaguccuccaucaugcgcuccgacgcccccaucggcaagugcaacuccgagugcaucacccccaacggcuccauccccaacgacaagcccuuccagaacgucaaccgcaucaccuacggcgccugcccccgcuacgucaagcagaacacccucaagcucgccaccggcaugcgcaacguccccgagaagcagacccgcggcaucuucggcgccaucgccggcuucaucgagaacggcugggagggcauggucgacggcugguacggcuuccgccaccagaacuccgagggcaccggccaggccgccgaccucaaguccacccaggccgccaucaaccagaucaacggcaagcucaaccgccucaucgagaagaccaacgagaaguuccaccagaucgagaaggaguucuccgaggucgagggccgcauccaggaccucgagaaguacgucgaggacaccaagaucgaccucugguccuacaacgccgagcuccucgucgcccucgagaaccagcacaccaucgaccucaccgacuccgagaugaacaagcucuucgagcgcacccgcaagcagcuccgcgagaacgccgaggacaugggcaacggcugcuucaagaucuaccacaagugcgacaacgccugcaucggcuccauccgcaacggcaccuacgaccacgacgucuaccgcgacgaggcccucaacaaccgcuuccagaucaagggcgucgagcucaaguccggcuacaaggacuggauccucuggaucuccuucgccauguccugcuuccucuucugcgucguccuccucggcuucaucaugugggccugccagaagggcaacauccgcugcaacaucugcaucuga

SEQ ID NO: 96535 - RNA, 1701 nt, Artificial Sequence
  derived and/or modified CDS sequence (opt2) from hemagglutinin__InfluenzaA__ABC02255
augaagaccaucaucgcccucuccuacaucuucugccucguccucgcccaggaccuccccggcaacgacaacuccaccgccacccucugccucggccaccacgccguccccaacggcacccucgucaagaccaucaccaacgaccagaucgaggucaccaacgccaccgagcucguccaguccuccuccaccggcaagaucugcaacaacccccaccgcauccucgacggcaucaacugcacccucaucgacgcccuccucggcgacccccacugcgacggcuuccagaacgagaagugggaccucuucgucgagcgcuccaaggccuucuccaacugcuaccccuacgacguccccgacuacgccucccuccgcucccucgucgccuccuccggcacccucgaguucaucaacgagggcuucaacuggaccggcgucacccagaacggcggcuccaacgccugcaagcgcggccccgacuccggcuucuucucccgccucaacuggcucuacaaguccggcuccaccuaccccguccucaacgucaccaugcccaacaacgacaacuucgacaagcucuacaucuggggcguccaccaccccuccaccgaccaggagcagaccaaccucuacguccaggccuccggccgcgucaccgucuccaccaagcgcucccagcagaccaucauccccaacgucggcucccgccccuggguccgcggccucuccucccgcaucuccaucuacuggaccaucgucaagcccggcgacauccucgucaucaacuccaacggcaaccucaucgccccccgcggccacuucaagaugcgcaccggcaaguccuccaucaugcgcuccgacgcccccaucggcaccugcuccuccgagugcaucacccccaacggcuccauccccaacgacaagcccuuccagaacgucaacaagaucaccuacggcgccugccccaaguacgucaagcagaacacccucaagcucgccaccggcaugcgcaacguccccgagaagcagacccgcggcaucuucggcgccaucgccggcuucaucgagaacggcugggagggcaugaucgacggcugguacggcuuccgccaccagaacuccgagggcaccggccaggccgccgaccucaaguccacccaggccgccaucgaccagaucaacggcaagcucaaccgcgucaucgagaagaccaacgagaaguuccaccagaucgagaaggaguucuccgaggucgagggccgcauccaggaccucgagaaguacgucgaggacaccaagaucgaccucugguccuacaacgccgagcuccucgucgcccucgagaaccagcacaccaucgaccucaccgacuccgagaugaacaagcucuucgagaagacccgccgccagcuccgcgagaacgccgaggacaugggcaacggcugcuucaagaucuaccacaagugcgacaacgccugcaucggcuccauccgcaacggcaccuacgaccacgacgucuaccgcgacgaggcccucaacaaccgcuuccagaucaagggcgucgagcucaaguccggcuacaaggacuggauccucuggaucuccuucgccaucuccugcuuccuccucugcgucguccuccucggcuucaucaugugggccugccagaagggcaacauccgcugcaacaucugcaucuga

SEQ ID NO: 96536 - RNA, 1701 nt, Artificial Sequence
  derived and/or modified CDS sequence (opt2) from hemagglutinin__InfluenzaA__ABC02266
augaagaccaucaucgcccucuccuacaucuucugccucgucuucgcccaggaccuccccggcaacgacaacuccaccgccacccucugccucggccaccacgccguccccaacggcacccucgucaagaccaucaccaacgaccagaucgaggucaccaacgccaccgagcucguccaguccuccuccaccggcaagaucugcgacaacccccaccgcauccucgacggcaucaacugcacccucaucgacgcccuccucggcgacccccacugcgacggcuuccagaacgagaagugggaccucuucgucgagcgcuccaaggccuucuccaacugcuaccccuacgacguccccgacuacgccucccuccgcucccucgucgccuccuccggcacccucgaguucaucaacgagggcuucaacuggaccggcgucacccagaacggcggcucccgcgccugcaagcgcggccccgacaacggcuucuucucccgccucaacuggcucuacaaguccggcuccaccuaccccguccagaacgucaccaugcccaacaacgacaacuccgacaagcucuacaucuggggcguccaccaccccuccaccgacaaggagcagaccgaccucuacguccaggccuccggcaaggucaccgucuccaccaagcgcucccagcagaccgucauccccaacgucggcucccgccccuggguccgcggccucuccucccgcgucuccaucuacuggaccaucgucaagcccggcgacauccucgucaucaacuccaacggcaaccucaucgccccccgcggcuacuucaagaugcgcaccggcaaguccuccaucaugcgcuccgacgcccccaucggcaccugcuccuccgagugcaucacccccaacggcuccauccccaacgacaagcccuuccagaacgucaacaagaucaccuacggcgccugccccaaguacgucaagcagaacacccucaagcucgccaccggcaugcgcaacguccccgagaagcagacccgcggcaucuucggcgccaucgccggcuucaucgagaacggcugggagggcaugaucgacggcugguacggcuuccgccaccagaacuccgagggcaccggccaggccgccgaccucaaguccacccaggccgccaucgaccagaucaacggcaagcucaaccgcgucaucgagaagaccaacgagaaguuccaccagaucgagaaggaguucuccgaggucgagggccgcauccaggaccucgagaaguacgucgaggacaccaagaucgaccucugguccuacaacgccgagcuccucgucgcccucgagaaccagcacaccaucgaccucaccgacuccgagaugaacaagcucuucgagaagacccgccgccagcuccgcgagaacgccgaggacaugggcaacggcugcuucaagaucuaccacaagugcgacaacgccugcaucggcuccauccgcaacggcaccuacgaccacgacgucuaccgcgacgaggcccucaacaaccgcuuccagaucaagggcgucgagcucaaguccggcuacaaggacuggauccucuggaucuccuucgccaucuccugcuuccuccucugcgucguccuccucggcuucaucaugugggccugccagaagggcaacauccgcugcaacaucugcaucuga

SEQ ID NO: 96537 - RNA, 1701 nt, Artificial Sequence
  derived and/or modified CDS sequence (opt2) from hemagglutinin__InfluenzaA__ABC02288
augaagaccaucaucgcccucuccuacauccucugccucgucuucgcccagaagauccccggcaacgacaacuccaccgccacccucugccucggccaccacgccguccccaacggcacccucgucaagaccaucaccaacgaccagaucgaggucaccaacgccaccgagcucguccaguccuccuccaccggccgcaucugcgacuccccccaccgcauccucgacggcgagaacugcacccucaucgacgcccuccucggcgacccccacugcgacggcuuccagaacaaggagugggaccucuucgucgagcgcuccaaggccuacuccaacugcuaccccuacgacguccccgacuacgccucccuccgcucccucgucgccuccuccggcacccucgaguucaacaacgaguccuucaacuggaccggcgucgcccagaacggcaccuccuacgccugcaagcgccgcuccaucaaguccuucuucucccgccucaacuggcuccaccagcucaaguacaaguaccccgcccucaacgucaccaugcccaacaacgacaaguucgacaagcucuacaucuggggcguccaccaccccuccaccgacuccgaccagaccucccucuacgcccaggccuccggccgcgucaccgucuccaccaagcgcucccagcagaccgucauccccaacaucggcucccgccccuggguccgcggcgucuccucccgcaucuccaucuacuggaccaucgucaagcccggcgacauccuccucaucaacuccaccggcaaccucaucgccccccgcggcuacuucaagauccgcuccggcaaguccuccaucaugcgcuccgacgcccccaucggcaagugcaacuccgagugcaucacccccaacggcuccauccccaacgacaagcccuuccagaacgucaaccgcaucaccuacggcgccugcccccgcuacgucaagcagaacacccucaagcucgccaccggcaugcgcaacguccccgagaagcagacccgcggcaucuucggcgccaucgccggcuucaucgagaacggcugggagggcauggucgacggcugguacggcuuccgccaccagaacuccgagggcaccggccaggccgccgaccucaaguccacccaggccgccaucaaccagaucaacggcaagcucaaccgccucaucgagaagaccaacgagaaguuccaccagaucgagaaggaguucuccgaggucgagggccgcauccaggaccucgagaaguacgucgaggacaccaagaucgaccucugguccuacaacgccgagcuccucgucgcccucgagaaccagcacaccaucgaccucaccgacuccgagaugaacaagcucuucgagcgcacccgcaagcagcuccgcgagaacgccgaggacaugggcaacggcugcuucaagaucuaccacaagugcgacaacgccugcaucggcuccauccgcaacggcaccuacgaccacgacgucuaccgcgacgaggcccucaacaaccgcuuccagaucaagggcgucgagcucaaguccggccacaaggacuggauccucuggaucuccuucgccaucuccugcuuccuccucugcgucguccuccucggcuucaucaugugggccugccagaagggcaacauccgcugcaacaucugcaucuga

SEQ ID NO: 96538 - RNA, 1701 nt, Artificial Sequence; identical to SEQ ID NO: 96506
  derived and/or modified CDS sequence (opt2) from hemagglutinin__InfluenzaA__ABC02299

SEQ ID NO: 96539 - RNA, 1701 nt, Artificial Sequence; identical to SEQ ID NO: 96530
  derived and/or modified CDS sequence (opt2) from hemagglutinin__InfluenzaA__ABC02310

SEQ ID NO: 96540 - RNA, 1701 nt, Artificial Sequence; identical to SEQ ID NO: 96535
  derived and/or modified CDS sequence (opt2) from hemagglutinin__InfluenzaA__ABC02321

SEQ ID NO: 96541 - RNA, 1701 nt, Artificial Sequence; identical to SEQ ID NO: 96341
  derived and/or modified CDS sequence (opt2) from hemagglutinin__InfluenzaA__ABC02332

SEQ ID NO: 96542 - RNA, 1701 nt, Artificial Sequence
  derived and/or modified CDS sequence (opt2) from hemagglutinin__InfluenzaA__ABC39805
augaagaccaucaucgcccucuccuacauccucugccucgucuucgcccagaaccuccccggcaacgacaacuccaccgccacccucugccucggccaccacgccguccccaacggcacccucgucaagaccaucaccaacgaccagaucgaggucaccaacgccaccgagcucguccaguccuccuccgccggccgcaucugcgacuccccccaccgcauccucgacggcaagaacugcacccucaucgacgcccuccucggcgacccccacugcgacggcuuccagaacgagaagugggaccucuucgucgagcgcuccaaggccuucuccaacugcuaccccuacgacguccaggacuacgccucccuccgcucccucgucgccuccuccggcacccucgaguucaucaacgagggcuucaacuggaccggcgucacccaguccggcggcuccuacgccugcaagcgcggcuccggcaacuccuucuucucccgccucaacuggcucuacaaguccgaguccaaguaccccgcccucaacgucaccaugcccaacaacggcaacuucgacaagcucuacaucuggggcguccaccaccccuccaccgacaaggagcagaccaaccucuacguccgcgccuccggccgcgucaccgucuccaccaagcgcucccagcagaccgucauccccaacaucggcccccgccccuggguccgcggccucuccucccgcaucuccaucuacuggaccaucgucaagcccggcgacauccuccucaucaacuccuccggcaaccucaucgccccccgcggcuacuucaagauccgcaccggcaaguccuccaucaugcgcuccgacgcccccaucggcaccugcuccuccgagugcaucacccccaacggcuccauccccaacgacaagcccuuccagaacgucaacaagaucaccuacggcgccugccccaaguacgucaagcagaacacccucaagcucgccaccggcaugcgcaacauccccgagaagcagacccgcggcaucuucggcgccaucgccggcuucaucgagaacggcugggagggcauggucgacggcugguacggcuuccgccaccagaacuccgagggcaccggccaggccgccgaccucaaguccacccaggccgccaucgaccagaucaacggcaagcucaaccgcgucaucgagaagaccaacgagaaguuccaccagaucgagaaggaguucuccgaggucgagggccgcauccaggaccucgagaaguacgucgaggacaccaagaucgaccucugguccuacaacgccgagcuccucgucgcccucgagaaccagcacaccaucgaccucaccgacuccgagaugaacaagcucuucgagaagacccgccgccagcuccgcgagaacgccgaggacaugggcaacggcugcuucaagaucuaccacaagugcgacaacgccugcaucggcuccauccgcaacggcaccuacgaccacgacgucuaccgcgacgaggcccucaacaaccgcuuccagaucaagggcgucgagcucaaguccggcuacaaggacuggauccucuggaucuccuucgccaucuccugcuuccuccucugcgucguccuccucggcuucaucaugugggccugccagaagggcaacauccgcugcaacaucugcaucuga

SEQ ID NO: 96543 - RNA, 1698 nt, Artificial Sequence
  derived and/or modified CDS sequence (opt2) from hemagglutinin__InfluenzaA__ABC40522
augaaggucaagcuccucauccuccucugcaccuucaccgccaccuacgccgacaccaucugcaucggcuaccacgccaacaacuccaccgacaccgucgacaccguccucgagaagaacgucaccgucacccacuccgucaaccuccucgaggacucccacaacggcaagcucugccuccucaagggcaucgccccccuccagcucggcaacugcuccgucgccggcuggauccucggcaaccccgagugcgagcuccucaucuccaaggaguccugguccuacaucgucgagacccccaaccccgagaacggcgccugcuaccccggcuacuucgccgacuacgaggagcuccgcgagcagcucuccuccgucuccuccuucgagcgcuucgagaucuuccccaaggaguccuccuggcccaaccacaccgucaccggcgucuccgccuccugcucccacaacggcaaguccuccuucuacaagaaccuccucuggcucaccggcaagaacggccucuaccccaaccucuccaaguccuacgccaacaacaaggagaaggagguccucauccucuggggcguccaccacccccccaacaucggcgaccagcgcacccucuaccacaccgagaacgccuacgucuccgucgucuccucccacuacucccgccgcuucacccccgagaucaccaagcgccccaagguccgcgaccaggagggccgcaucaacuacuacuggacccuccucgagcccggcgacaccaucaucuucgaggccaacggcaaccucaucgcccccugguacgccuucgcccucucccgcggcuucggcuccggcaucaucaccuccaacgcccccauggacgagugcgacgccaagugccagaccccccagggcgccaucaacuccucccuccccuuccagaacguccaccccgucaccaucggcgagugccccaaguacguccgcuccgccaagcuccgcauggucaccggccuccgcaacauccccuccauccagucccgcggccucuucggcgccaucgccggcuucaucgagggcggcuggaccggcauggucgacggcugguacggcuaccaccaccagaacgagcagggcuccggcuacgccgccgaccagaaguccacccagaacgccaucaacggcaucaccaacaaggucaacuccgucaucgagaagaugaacacccaguucaccgccgucggcaaggaguucaacaagcucgagcgccgcauggagaaccucaacaagaaggucgacgacggcuuccucgacaucuggaccuacaacgccgagcuccucguccuccucgagaacgagcgcacccucgacuuccacgacuccaacgucaagaaccucuacgagaaggucaagucccagcucaagaacaacgccaaggagaucggcaacggcugcuucgaguucuaccacaagugcaacaacgagugcauggaguccgucaagaacggcaccuacgacuaccccaaguacuccgaggaguccaagcucaaccgcgagaagaucgacggcgucaagcucgacuccaugggcgucuaccagauccucgccaucuacuccaccgucgccuccucccucguccuccucgucucccucggcgccaucuccuucuggaugugcuccaacggcucccuccagugccgcaucugcaucuga

SEQ ID NO: 96544 - RNA, 1698 nt, Artificial Sequence; identical to SEQ ID NO: 96332
  derived and/or modified CDS sequence (opt2) from hemagglutinin__InfluenzaA__ABC40533

SEQ ID NO: 96545 - RNA, 1701 nt, Artificial Sequence
  derived and/or modified CDS sequence (opt2) from hemagglutinin__InfluenzaA__ABC40555
augaagaccaucaucgcccucuccuacaucuucugccucgucuucgcccagaaccucccccgcaacgacaaguccaccgccacccucugccucggccaccacgccguccccaacggcacccucgucaagaccaucaccaacgaccagaucgaggucaccaacgccaccgagcucguccaguccuccuccaccggccgcaucugcgacuccccccaccgcauccucgacggcaagaacugcacccucgucgacgcccuccucggcgacccccacugcgacggcuuccagaacgagaagugggaccucuucgucgagcgcuccaaggccuucuccaacugcuaccccuacgacguccccgacuacgccucccuccgcucccucgucgccuccuccggcacccucgaguucaucaacgaguccuucaacuggaccggcgucacccaguccggcggcuccuacgccugcaagcgcggcuccgacaacuccuucuucucccgccucaacuggcucuacgaguccgaguccaaguaccccguccucaacgucaccaugcccaacaacggcaacuucgacaagcucuacaucuggggcguccaccaccccuccaccgacaaggagcagaccaaccucuacguccgcgccuccggccgcgucaccgucuccaccaagcgcucccagcagaccaucauccccaacaucggcucccgccccuggguccgcggccucuccucccgcaucuccaucuacuggaccaucgucaagcccggcgacauccuccucaucaacuccaacggcaaccucaucgccccccgcggcuacuucaagauccgcaccggcaaguccuccaucaugcgcuccgacgcccccaucggcaccugcuccuccgagugcaucacccccaacggcuccauccccaacgacaagcccuuccagaacgucaacaagaucaccuacggcgccugccccaaguacgucaagcagaacacccucaagcucgccaccggcaugcgcaacguccccgagaagcagacccgcggcaucuucggcgccaucgccggcuucaucgagaacggcugggagggcauggucgacggcugguacggcuuccgccaccagaacuccgagggcaccggccaggccgccgaccucaaguccacccaggccgccaucgaccagaucaacggcaagcucaaccgcgucaucgagaagaccaacgagaaguuccaccagaucgagaaggaguucuccgaggucgagggccgcauccaggaccucgagaaguacgucgaggacaccaagaucgaccucugguccuacaacgccgagcuccucgucgcccucgagaaccagcacaccaucgaccucaccgacuccgagaugaacaagcucuucgagaagacccgccgccagcuccgcgagaacgccgaggacaugggcaacggcugcuucaagaucuaccacaagugcgacaacgccugcaucggcuccauccgcaacggcaccuacgaccacgacgucuaccgcgacgaggcccucaacaaccgcuuccagaucaagggcgucgagcucaaguccggcuacaaggacuggauccucuggaucuccuucgccaucuccugcuuccuccucugcgucguccuccucggcuucaucaugugggccugccagaagggcaacauccgcugcaacaucugcaucuga

SEQ ID NO: 96546 - RNA, 1701 nt, Artificial Sequence
  derived and/or modified CDS sequence (opt2) from hemagglutinin__InfluenzaA__ABC40608
augaagaccaucaucgcccucuccuacauccucugccucgucuucgcccagaagcuccccggcaacgacaacuccaccgccacccucugccucggccaccacgccguccccaacggcacccucgucaagaccaucaccaacgaccagaucgaggucaccaacgccaccgagcucguccaguccuccuccaccggccgcaucugcgacuccccccaccgcauccucgacggcgagaacugcacccucaucgacgcccuccucggcgacccccacugcgacggcuuccagaacaaggagugggaccucuucgucgagcgcuccaaggccuacuccaacugcuaccccuacgacguccccgacuacgccucccuccgcucccucgucgccuccuccggcacccucgaguucaacaacgaguccuucaacuggaccggcgucgcccagaacggcaccuccuccgccugcaagcgccgcuccaucaaguccuucuucucccgccucaacuggcuccaccagcucaaguacaaguaccccgcccucaacgucaccaugcccaacaacgacaaguucgacaagcucuacaucuggggcguccaccaccccuccaccgacuccgaccagaccucccucuacgcccaggccuccggccgcgucaccgucuccacccgccgcucccagcagaccgucauccccaacaucggcucccgccccuggguccgcggcgucuccucccgcaucuccaucuacuggaccaucgucaagcccggcgacauccuccucaucaacuccaccggcaaccucaucgccccccgcggcuacuucaagauccgcuccggcaaguccuccaucaugcgcuccgacgcccccaucggcaagugcaacuccgagugcaucacccccaacggcuccauccccaacgacaagcccuuccaguccgucaaccgcaucaccuacggcgccugcccccgcuacgucaagcagaacacccucaagcucgccaccggcaugcgcaacguccccgagaagcagacccgcggcaucuucggcgccaucgccggcuucaucgagaacggcugggagggcauggucgacggcugguacggcuuccgccaccagaacuccgagggcaccggccaggccgccgaccucaaguccacccaggccgccaucaaccagaucaacggcaagcucaaccgccucaucgagaagaccaacgagaaguuccaccagaucgagaaggaguucuccgaggucgagggccgcauccaggaccucgagaaguacgucgaggacaccaagaucgaccucugguccuacaacgccgagcuccucgucgcccucgagaaccagcacaccaucgaccucaccgacuccgagaugaacaagcucuucgagcgcacccgcaagcagcuccgcgagaacgccgaggacaugggcaacggcugcuucaagaucuaccacaagugcgacaacgccugcaucggcuccauccgcaacggcaccuacgaccacgacgucuaccgcgacgaggcccucaacaaccgcuuccagaucaagggcgucgagcucaaguccggcuacaaggacuggauccucuggaucuccuucgccaucuccugcuuccuccucugcgucguccuccucggcuucaucaugugggccugccagaagggcaacauccgcugcaacaucugcaucuga

SEQ ID NO: 96547 - RNA, 1701 nt, Artificial Sequence
  derived and/or modified CDS sequence (opt2) from hemagglutinin__InfluenzaA__ABC40619
augaagaccaucaucgcccucuccuacaucuucugccucguccucggccaggacuucuccggcaacgacaacuccaccgccacccucugccucggccaccacgccguccccaacggcacccucgucaagaccaucaccaacgaccagaucgaggucaccaacgccaccgagcucguccaguccuccuccaccggcaagaucugcaacaacccccaccgcauccucgacggcaucgacugcacccucaucgacgcccuccucggcgacccccacugcgacggcuuccagaacgagaccugggaccucuucgucgagcgcuccaaggccuucuccaacugcuaccccuacgacguccccgacuacgccucccuccgcucccucgucgccuccuccggcacccucgaguucaucaacgagggcuucaacuggaccggcgucacccagaacggcggcuccaacgccugcaagcgcggccccgacuccggcuucuucucccgccucaacuggcucuacaaguccggcuccaccuaccccguccucaacgucuccaugcccaacaacgacaacuucgacaagcucuacaucuggggcguccaccaccccuccaccgaccaggagcagaccaaccucuacguccaggccuccggccgcgucaccgucuccaccaagcgcucccagcagaccaucauccccaacaucggcucccgccccuggguccgcggccucuccucccgcaucuccaucuacuggaccaucgucaagcccggcgacauccucgucaucaacuccaacggcaaccucaucgccccccgcggcuacuucaagaugcgcaccggcaaguccuccaucaugcgcuccgacgcccccaucggcaccugcaucuccgagugcaucacccccaacggcuccauccccaacgacaagcccuuccagaacgucaacaagaucaccuacggcgccugccccaaguacgucaagcagaacacccucaagcucgccaccggcaugcgcaacguccccgagaagcagacccgcggcaucuucggcgccaucgccggcuucaucgagaacggcugggagggcaugaucgacggcugguacggcuuccgccaccagaacuccgagggcaccggccaggccgccgaccucaaguccacccaggccgccaucgaccagaucaacggcaagcucaaccgcaucaucgagaagaccaacgagaaguuccaccagaucgagaaggaguucuccgaggucgagggccgcauccaggaccucgagaaguacgucgaggacaccaagaucgaccucugguccuacaacgccgagcuccucgucgcccucgagaaccagcacaccaucgaccucaccgacuccgagaugaacaagcucuucgagaagacccgccgccagcuccgcgagaacgccgaggacaugggcaacggcugcuucaagaucuaccacaagugcgacaacgccugcaucggcuccauccgcaacggcaccuacgaccacgacgucuaccgcgacgaggcccucaacaaccgcuuccagaucaagggcgucgagcucaaguccggcuacaaggacuggauccucuggaucuccuucgccaucuccugcuuccuccucugcgucguccuccucggcuucaucaugugggccugccagaagggcaacauccgcugcaacaucugcaucuga

SEQ ID NO: 96548 - RNA, 1698 nt, Artificial Sequence
  derived and/or modified CDS sequence (opt2) from hemagglutinin__InfluenzaA__ABC40631
augaaggucaagcuccucauccuccucugcaccuucaccgccaccuacgccgacaccaucugcaucggcuaccacgccaacaacuccaccgacaccgucgacaccguccucgagaagaacgucaccgucacccacuccgucaaccuccucgaggacucccacaacggcaagcucugccuccucaagggcaucgccccccuccagcucggcaacugcuccgucgccggcuggauccucggcaaccccgagugcgagcuccucaucuccaaggaguccugguccuacaucgucgagacccccaaccccgagaacggcaccugcuaccccggcuacuucgccgacuacgaggagcuccgcgagcagcucuccuccgucuccuccuucgagcgcuucgagaucuuccccaaggaguccuccuggcccaaccacaccgucaccggcgucuccgccuccugcucccacaacggcaaguccuccuucuaccgcaaccuccucuggcucaccggcaagaacggccucuaccccaaccucuccaaguccuacgccaacaacaaggagaaggagguccucauccucuggggcguccaccacccccccaacaucggcgaccagcgcacccucuaccacaccgagaacgccuacgucuccgucgucuccucccacuacucccgccgcuucacccccgagaucaccaagcgccccaagguccgcgaccaggagggccgcaucaacuacuacuggacccuccucgagcccggcgacaccaucaucuucgaggccaacggcaaccucaucgcccccugguacgccuucgcccucucccgcggcuucggcuccggcaucaucaccuccaacgcccccauggacgagugcgacgccaagugccagaccccccagggcgccaucaacuccucccuccccuuccagaacguccaccccgucaccaucggcgagugccccaaguacguccgcuccgccaagcuccgcauggucaccggccuccgcaacauccccuccauccagucccgcggccucuucggcgccaucgccggcuucaucgagggcggcuggaccggcauggucgacggcugguacggcuaccaccaccagaacgagcagggcuccggcuacgccgccgaccagaaguccacccagaacgccaucaacggcaucaccaacaaggucaacuccgucaucgagaagaugaacacccaguucaccgccgucggcaaggaguucaacaagcucgagcgccgcauggagaaccucaacaagaaggucgacgacggcuuccucgacaucuggaccuacaacgccgagcuccucguccuccucgagaacgagcgcacccucgacuuccacgacuccaacgucaagaaccucuacgagaaggucaagucccagcucaagaacaacgccaaggagaucggcaacggcugcuucgaguucuaccacaagugcaacaacgagugcauggaguccgucaagaacggcaccuacgacuaccccaaguacuccgaggaguccaagcucaaccgcgagaagaucgacggcgucaagcucgaguccaugggcgucuaccagauccucgccaucuacuccaccgucgccuccucccucguccuccucgucucccucggcgccaucuccuucuggaugugcuccaacggcucccuccagugccgcaucugcaucuga

SEQ ID NO: 96549 - RNA, 1701 nt, Artificial Sequence
  derived and/or modified CDS sequence (opt2) from hemagglutinin__InfluenzaA__ABC41692
augaagaccaucaucgcccucuccuacauccucugccucgucuucgcccagaagccccccggcaacgacaacuccaccgccacccucugccucggccaccacgccguccccaacggcaccaucgucaagaccaucaccaacgaccagaucgaggucaccaacgccaccgagcucguccaguccuccuccaccggcggcaucugcgacuccccccaccagauccucgacggcgagaacugcacccucaucgacgcccuccucggcgacccccagugcgacggcuuccagaacaagaagugggaccucuucgucgagcgcuccaaggccuacuccaacugcuaccccuacgacguccccgaccacgccucccuccgcucccucgucgccuccuccggcacccucgaguucaacaacgaguccuucgacuggaccggcgucacccagaacggcaccuccuccgccugcaagcgccgcuccaacaaguccuucuucucccgccucaacuggcucacccaccucaaguacaaguaccccgcccucaacgucaccaugcccaacaacgagaaguucgacaagcucuacaucuggggcguccaccaccccggcaccgacuccgaccagaucucccucuacgcccaggccuccggccgcaucaccgucuccaccaagcgcucccagcagaccgucauccccaacaucggcucccgcccccgcguccgcgacgucuccucccgcaucuccaucuacuggaccaucgucaagcccggcgacauccuccucaucaacuccaccggcaaccucaucgccccccgcggcuacuucaagauccgcuccggcaaguccuccaucaugcgcuccgacgcccccaucggcaagugcaacuccgagugcaucacccccaacggcuccauccccaacgacaagcccuuccagaacgucaaccgcaucaccuacggcgccugcccccgcuacgucaagcagaacacccucaagcucgccaccggcaugcgcaacguccccgagaagcagacccgcggcaucuucggcgccaucgccggcuucaucgagaacggcugggagggcauggucgacggcugguacggcuuccgccaccagaacuccgagggcaccggccaggccgccgaccucaaguccacccaggccgccaucaaccagaucaacggcaagcucaaccgccucaucggcaagaccaacgagaaguuccaccagaucgagaaggaguucuccgaggucgagggccgcauccaggaccucgagaaguacgucgaggacaccaagaucgaccucugguccuacaacgccgagcuccucgucgcccucgagaaccagcacaccaucgaccucaccgacuccgagaugaacaagcucuucgagcgcaccaagaagcagcuccgcgagaacgccgaggacaugggcaacggcugcuucaagaucuaccacaagugcgacaacgccugcaucggcuccauccgcaacggcaccuacgaccacgacgucuaccgcgacgaggcccucaacaaccgcuuccagaucaagggcgucgagcucaaguccggcuacaaggacuggauccucuggaucuccuucgccaucuccugcuuccuccucugcgucgcccuccucggcuucaucaugugggccugccagaagggcaacauccgcugcaacaucugcaucuga

SEQ ID NO: 96550 - RNA, 1698 nt, Artificial Sequence; identical to SEQ ID NO: 96335
  derived and/or modified CDS sequence (opt2) from hemagglutinin__InfluenzaA__ABC41714

SEQ ID NO: 96551 - RNA, 1701 nt, Artificial Sequence
  derived and/or modified CDS sequence (opt2) from hemagglutinin__InfluenzaA__ABC41725
augaagaccaccaucgcccucuccuacauccucugccucgucuucgcccagaagcuccccggcaacgacaacuccaccgccacccucugccucggccaccacgccguccccaacggcaccaucgucaagaccaucaccaacgaccagaucgaggucaccaacgccaccgagcucguccaguccuccuccaccggcggcaucugcgacuccccccaccagauccucgacggcgagaacugcacccucaucgacgcccuccucggcgacccccagugcgacggcuuccagaacaagaagugggaccucuucgucgagcgcuccaaggccuacuccaacugcuaccccuacgacguccccgaccacgccucccuccgcucccucgucgccuccuccggcacccucgaguucaacaacgaguccuucgacuggaccggcgucacccagaacggcaccuccuccgccugcaagcgccgcuccaacaaguccuucuucucccgccucaacuggcucacccaccucaaguacaaguaccccgcccucaacgucaccaugcccaacaacgagaaguucgacaagcucuacaucuggggcguccaccaccccggcaccgacuccgaccagaucucccucuacgcccaggccuccggccgcaucaccgucuccaccaagcgcucccagcagaccgucauccccaacaucggcucccgcccccgcguccgcgacgucuccucccgcaucuccaucuacuggaccaucgucaagcccggcgacauccuccucaucaacuccaccggcaaccucaucgccccccgcggcuacuucaagauccgcuccggcaaguccuccaucaugcgcuccgacgcccccaucggcaagugcaacuccgagugcaucacccccaacggcuccauccccaacgacaagcccuuccagaacgucaaccgcaucaccuacggcgccugcccccgcuacgucaagcagaacacccucaagcucgccaccggcaugcgcaacguccccgagaagcagacccgcggcaucuucggcgccaucgccggcuucaucgagaacggcugggagggcauggucgacggcugguacggcuuccgccaccagaacuccgagggcaccggccaggccgccgaccucaaguccacccaggccgccaucaaccagaucaacggcaagcucaaccgccucaucggcaagaccaacgagaaguuccaccagaucgagaaggaguucuccgaggucgagggccgcauccaggaccucgagaaguacgucgaggacaccaagaucgaccucugguccuacaacgccgagcuccucgucgcccucgagaaccagcacaccaucgaccucaccgacuccgagaugaacaagcucuucgagcgcaccaagaagcagcuccgcgagaacgccgaggacaugggcaacggcugcuucaagaucuaccacaagugcgacaacgccugcaucggcuccauccgcaacggcaccuacgaccacgacgucuaccgcgacgaggcccucaacaaccgcuuccagaucaagggcgucgagcucaaguccggcuacaaggacuggauccucuggaucuccuucgccaucuccugcuuccuccucugcgucgcccuccucggcuucaucaugugggccugccagaagggcaacauccgcugcaacaucugcaucuga

SEQ ID NO: 96552 - RNA, 1701 nt, Artificial Sequence
  derived and/or modified CDS sequence (opt2) from hemagglutinin__InfluenzaA__ABC41736
augaagaccaucaucgcccucuccuacauccucugccucgucuucgcccagaagcuccccggcaacgacaacuccaccgccacccucugccucggccaccacgccguccccaacggcaccaucgucaagaccaucaccaacgaccagaucgaggucaccaacgccaccgagcucguccaguccuccuccaccggcggcaucugcgacuccccccaccagauccucgacggcgagaacugcacccucaucgacgcccuccucggcgacccccagugcgacggcuuccagaacaagaagugggaccucuucgucgagcgcuccaaggccuacuccaacugcuaccccuacgacguccccgaccacgccucccuccgcucccucgucgccuccuccggcacccucgaguucaacaacgaguccuucgacuggaccggcgucacccagaacggcaccuccuccgccugcaagcgccgcuccaacaaguccuucuucucccgccucaacuggcucacccaccucaaguacaaguaccccgcccucaacgucaccaugcccaacaacgagaaguucgacaagcucuacaucuggggcguccaccaccccggcaccgacuccgaccagaucucccucuacgcccaggccuccggccgcaucaccgucuccaccaagcgcucccagcagaccgucauccccaacaucggcucccgcccccgcguccgcgacgucuccucccgcaucuccaucuacuggaccaucgucaagcccggcgacauccuccucaucaacuccaccggcaaccucaucgccccccgcggcuacuucaagauccgcuccggcaaguccuccaucaugcgcuccgacgcccccaucggcaagugcaacuccgagugcaucacccccaacggcuccauccccaacgacaagcccuuccagaacgucaaccgcaucaccuacggcgccugcccccgcuacgucaagcagaacacccucaagcucgccaccggcaugcgcaacguccccgagaagcagacccgcggcaucuucggcgccaucgccggcuucaucgagaacggcugggagggcauggucgacggcugguacggcuuccgccaccagaacuccgagggcaccggccaggccgccgaccucaaguccacccaggccgccaucaaccagaucaacggcaagcucaaccgccucaucggcaagaccaacgagaaguuccaccagaucgagaaggaguucuccgaggucgagggccgcauccaggaccucgagaaguacgucgaggacaccaagaucgaccucugguccuacaacgccgagcuccucgucgcccucgagaaccagcacaccaucgaccucaccgacuccgagaugaacaagcucuucgagcgcaccaagaagcagcuccgcgagaacgccgaggacaugggcaacggcugcuucaagaucuaccacaagugcgacaacgccugcaucggcuccauccgcaacggcaccuacgaccacgacgucuaccgcgacgaggcccucaacaaccgcuuccagaucaagggcgucgagcucaaguccggcuacaaggacuggauccucuggaucuccuucgccaucuccugcuuccuccucugcgucgcccuccucggcuucaucaugugggccugccagaagggcaacauccgcugcaacaucugcaucuga

SEQ ID NO: 96553 - RNA, 1701 nt, Artificial Sequence; identical to SEQ ID NO: 96552
  derived and/or modified CDS sequence (opt2) from hemagglutinin__InfluenzaA__ABC41952

SEQ ID NO: 96554 - RNA, 1701 nt, Artificial Sequence; identical to SEQ ID NO: 96552
  derived and/or modified CDS sequence (opt2) from hemagglutinin__InfluenzaA__ABC41953

SEQ ID NO: 96555 - RNA, 1701 nt, Artificial Sequence; identical to SEQ ID NO: 96552
  derived and/or modified CDS sequence (opt2) from hemagglutinin__InfluenzaA__ABC41964

SEQ ID NO: 96556 - RNA, 1701 nt, Artificial Sequence; identical to SEQ ID NO: 96552
  derived and/or modified CDS sequence (opt2) from hemagglutinin__InfluenzaA__ABC42014

SEQ ID NO: 96557 - RNA, 1701 nt, Artificial Sequence; identical to SEQ ID NO: 96552
  derived and/or modified CDS sequence (opt2) from hemagglutinin__InfluenzaA__ABC42114

SEQ ID NO: 96558 - RNA, 1701 nt, Artificial Sequence; identical to SEQ ID NO: 96552
  derived and/or modified CDS sequence (opt2) from hemagglutinin__InfluenzaA__ABC42125

SEQ ID NO: 96559 - RNA, 1701 nt, Artificial Sequence; identical to SEQ ID NO: 96552
  derived and/or modified CDS sequence (opt2) from hemagglutinin__InfluenzaA__ABC42136

SEQ ID NO: 96560 - RNA, 1701 nt, Artificial Sequence
  derived and/or modified CDS sequence (opt2) from hemagglutinin__InfluenzaA__ABC42147
augaagaccaucaucgcccucuccuacauccucugccucgucuucgcccagaagcuccccggcaacgacaacuccaccgccacccucugccucggccaccacgccguccccaacggcaccaucgucaagaccaucaccaacgaccagaucgaggucaccaacgccaccgagcucguccaguccuccuccaccggcggcaucugcgacuccccccaccagauccucgacggcgagaacugcacccucaucgacgcccuccucggcgacccccagugcgacggcuuccagaacaagaagugggaccucuucgucgagcgcuccaaggccuacuccaacugcuaccccuacgacguccccgaccacgccucccuccgcucccucgucgccuccuccggcacccucgaguucaacaacgaguccuucgacuggaccggcgucacccagaacggcaccuccuccgccugcaagcgccgcuccaacaaguccuucuucucccgccucaacuggcucacccaccucaaguacaaguaccccgcccucaacgucaccaugcccaacaacgagaaguucgacaagcucuacaucuggggcguccaccaccccggcaccgacuccgaccagaucucccucuacgcccaggccuccggccgcaucaccgucuccaccaagcgcucccagcagaccgucauccccaacaucggcucccgcccccgcguccgcgacgucuccucccgcaucuccaucuacuggaccaucgucaagcccggcgacauccuccucaucaacuccaccggcaaccucaucgccccccgcggcuacuucaagauccgcuccggcaaguccuccaucaugcgcuccgacguccccaucggcaagugcaacuccgagugcaucacccccaacggcuccauccccaacgacaagcccuuccagaacgucaaccgcaucaccuacggcgccugcccccgcuacgucaagcagaacacccucaagcucgccaccggcaugcgcaacguccccgagaagcagacccgcggcaucuucggcgccaucgccggcuucaucgagaacggcugggagggcauggucgacggcugguacggcuuccgccaccagaacuccgagggcaccggccaggccgccgaccucaaguccacccaggccgccaucaaccagaucaacggcaagcucaaccgccucaucggcaagaccaacgagaaguuccaccagaucgagaaggaguucuccgaggucgagggccgcauccaggaccucgagaaguacgucgaggacaccaagaucgaccucugguccuacaacgccgagcuccucgucgcccucgagaaccagcacaccaucgaccucaccgacuccgagaugaacaagcucuucgagcgcaccaagaagcagcuccgcgagaacgccgaggacaugggcaacggcugcuucaagaucuaccacaagugcgacaacgccugcaucggcuccauccgcaacggcaccuacgaccacgacgucuaccgcgacgaggcccucaacaaccgcuuccagaucaagggcgucgagcucaaguccggcuacaaggacuggauccucuggaucuccuucgccaucuccugcuuccuccucugcgucgcccuccucggcuucaucaugugggccugccagaagggcaacauccgcugcaacaucugcaucuga

SEQ ID NO: 96561 - RNA, 1701 nt, Artificial Sequence; identical to SEQ ID NO: 96552
  derived and/or modified CDS sequence (opt2) from hemagglutinin__InfluenzaA__ABC42158

SEQ ID NO: 96562 - RNA, 1701 nt, Artificial Sequence; identical to SEQ ID NO: 96552
  derived and/or modified CDS sequence (opt2) from hemagglutinin__InfluenzaA__ABC42169

SEQ ID NO: 96563 - RNA, 1701 nt, Artificial Sequence; identical to SEQ ID NO: 96552
  derived and/or modified CDS sequence (opt2) from hemagglutinin__InfluenzaA__ABC42180

SEQ ID NO: 96564 - RNA, 1701 nt, Artificial Sequence; identical to SEQ ID NO: 96552
  derived and/or modified CDS sequence (opt2) from hemagglutinin__InfluenzaA__ABC42192

SEQ ID NO: 96565 - RNA, 1701 nt, Artificial Sequence; identical to SEQ ID NO: 96552
  derived and/or modified CDS sequence (opt2) from hemagglutinin__InfluenzaA__ABC42307

SEQ ID NO: 96566 - RNA, 1701 nt, Artificial Sequence
  derived and/or modified CDS sequence (opt2) from hemagglutinin__InfluenzaA__ABC42318
augaagaccaucaucgcccucuccuacauccucugccucgucuucgcccagaagcuccccggcaacgacaacuccaccgccacccucugccucggccaccacgccguccccaacggcaccaucgucaagaccaucaccaacgaccagaucgaggucaccaacgccaccgagcucguccaguccuccuccaccggcggcaucugcgacuccccccaccagauccucgacggcgagaacugcacccucaucgacgcccuccucggcgacccccagugcgacggcuuccagaacaagaagugggaccucuucgucgagcgcuccaaggccuacuccaacugcuaccccuacgacguccccgaccacgccucccuccgcucccucgucgccuccuccggcacccucgaguucaacaacgaguccuucgacuggaccggcgucacccagaacggcaccuccuccgccugcaagcgccgcuccaacaaguccuucuucucccgccucaacuggcucacccaccucaaguacaaguaccccgcccucaacgucaccaugcccaacaacgagaaguucgacaagcucuacaucuggggcguccaccaccccggcaccgacuccgaccagaucucccucuacgcccaggccuccggccgcaucaccgucuccaccaagcgcucccagcagaccgucauccccaacaucggcucccgcccccgcguccgcgacgucuccucccgcaucuccaucuacuggaccaucgucaagcccggcgacauccuccucaucaacuccaccggcaaccucaucgccccccgcggcuacuucaagauccgcuccggcaaguccuccaucaugcgcuccgacgcccccaucggcaagugcaacuccgagugcaucacccccaacggcuccauccccaacgacaagcccuuccagaacgucaaccgcaucaccuacggcgccugcccccgcuacgucaagcagaacacccucaagcucgccaccggcaugcgcaacguccccgagaagcagacccgcggcaucuucggcgccaucgccggcuucaucgagaacggcugggagggcauggucgacggcugguacggcuuccgccaccagaacuccgagggcaccggccaggccgccgaccucaaguccacccaggccgccaucaaccagaucaacggcaagcucaaccgccucaucggcaagaccaacgagaaguuccaccagaucgagaaggaguucuccgaggucgagggccgcauccaggaccucgagaaguacgucgaggacaccaagaucgaccucugguccuacaacgccgaguuccucgucgcccucgagaaccagcacaccaucgaccucaccgacuccgagaugaacaagcucuucgagcgcaccaagaagcagcuccgcgagaacgccgaggacaugggcaacggcugcuucaagaucuaccacaagugcgacaacgccugcaucggcuccauccgcaacggcaccuacgaccacgacgucuaccgcgacgaggcccucaacaaccgcuuccagaucaagggcgucgagcucaaguccggcuacaaggacuggauccucuggaucuccuucgccaucuccugcuuccuccucugcgucgcccuccucggcuucaucaugugggccugccagaagggcaacauccgcugcaacaucugcaucuga

SEQ ID NO: 96567 - RNA, 1701 nt, Artificial Sequence; identical to SEQ ID NO: 96552
  derived and/or modified CDS sequence (opt2) from hemagglutinin__InfluenzaA__ABC42346

SEQ ID NO: 96568 - RNA, 1701 nt, Artificial Sequence; identical to SEQ ID NO: 96552
  derived and/or modified CDS sequence (opt2) from hemagglutinin__InfluenzaA__ABC42461

SEQ ID NO: 96569 - RNA, 1701 nt, Artificial Sequence; identical to SEQ ID NO: 96552
  derived and/or modified CDS sequence (opt2) from hemagglutinin__InfluenzaA__ABC42494

SEQ ID NO: 96570 - RNA, 1701 nt, Artificial Sequence; identical to SEQ ID NO: 96552
  derived and/or modified CDS sequence (opt2) from hemagglutinin__InfluenzaA__ABC42505

SEQ ID NO: 96571 - RNA, 1701 nt, Artificial Sequence
  derived and/or modified CDS sequence (opt2) from hemagglutinin__InfluenzaA__ABC42516
augaagaccaucaucgcccucuccuacauccucugccucgucuucgcccagaagcuccccggcaacgacaacuccaccgccacccucugccucggccaccacgccguccccaacggcaccaucgucaagaccaucaccaacgaccagaucgaggucaccaacgccaccgagcucguccaguccuccuccaccggcggcaucugcgacuccccccaccagauccucgacggcgagaacugcacccucaucgacgcccuccucggcgacccccagugcgacggcuuccagaacaagaagugggaccucuucgucgagcgcuccaaggccuacuccaacugcuaccccuacgacguccccgaccacgccucccuccgcucccucgucgccuccuccggcacccucgaguucaacaacgaguccuucgacuggaccggcgucacccagaacggcaccuccuccgccugcaagcgccgcuccaacaaguccuucuucucccgccucaacuggcucacccaccucaaguacaaguaccccgcccucaacgucaccaugcccaacaacgagaaguucgacaagcucuacaucuggggcguccaccaccccggcaccgacuccgaccagaucucccucuacgcccaggccuccggccgcaucaccgucuccaccaagcgcucccagcagaccgucauccccaacaucggcucccgcccccgcguccgcgacgucuccucccgcaucuccaucuacuggaccaucgucaagcccggcgacauccuccucaucaacuccaccggcaaccucaucgccccccgcggcuacuucaagauccgcuccggcaaguccuccaucaugcgcuccgacgcccccaucggcaagugcaacuccgagugcaucacccccaacggcuccauccccaacgacaagcccuuccagaacgucaaccgcaucaccuacggcgccugcccccgcuacgucaagcagaacacccucaagcucgccaccggcaugcgcaacguccccgagaagcagacccgcggcaucuucggcgccaucgccggcuucaucgagaacggcugggagggcauggucgacggcugguacggcuuccgccaccagaacuccgagggcaccggccaggccgccgaccucaaguccacccaggccgccaucaaccagaucaacggcaagcucaacaagcucaucggcaagaccaacgagaaguuccaccagaucgagaaggaguucuccgaggucgagggccgcauccaggaccucgagaaguacgucgaggacaccaagaucgaccucugguccuacaacgccgagcuccucgucgcccucgagaaccagcacaccaucgaccucaccgacuccgagaugaacaagcucuucgagcgcaccaagaagcagcuccgcgagaacgccgaggacaugggcaacggcugcuucaagaucuaccacaagugcgacaacgccugcaucggcuccauccgcaacggcaccuacgaccacgacgucuaccgcgacgaggcccucaacaaccgcuuccagaucaagggcgucgagcucaaguccggcuacaaggacuggauccucuggaucuccuucgccaucuccugcuuccuccucugcgucgcccuccucggcuucaucaugugggccugccagaagggcaacauccgcugcaacaucugcaucuga

SEQ ID NO: 96572 - RNA, 1701 nt, Artificial Sequence; identical to SEQ ID NO: 96552
  derived and/or modified CDS sequence (opt2) from hemagglutinin__InfluenzaA__ABC42527

SEQ ID NO: 96573 - RNA, 1701 nt, Artificial Sequence; identical to SEQ ID NO: 96552
  derived and/or modified CDS sequence (opt2) from hemagglutinin__InfluenzaA__ABC42574

SEQ ID NO: 96574 - RNA, 1701 nt, Artificial Sequence; identical to SEQ ID NO: 96552
  derived and/or modified CDS sequence (opt2) from hemagglutinin__InfluenzaA__ABC42585

SEQ ID NO: 96575 - RNA, 1701 nt, Artificial Sequence; identical to SEQ ID NO: 96279
  derived and/or modified CDS sequence (opt2) from hemagglutinin__InfluenzaA__ABC42596

SEQ ID NO: 96576 - RNA, 1701 nt, Artificial Sequence; identical to SEQ ID NO: 96318
  derived and/or modified CDS sequence (opt2) from hemagglutinin__InfluenzaA__ABC42607

SEQ ID NO: 96577 - RNA, 1701 nt, Artificial Sequence; identical to SEQ ID NO: 96318
  derived and/or modified CDS sequence (opt2) from hemagglutinin__InfluenzaA__ABC42618

SEQ ID NO: 96578 - RNA, 1701 nt, Artificial Sequence
  derived and/or modified CDS sequence (opt2) from hemagglutinin__InfluenzaA__ABC42629
augaagaccaucaucgcccucuccuacauccucugccucgucuucgcccagaagcuccccggcaacgacaacuccaccgccacccucugccucggccaccacgccguccccaacggcaccaucgucaagaccaucaccaacgaccagaucgaggucaccaacgccaccgagcucguccaguccuccuccaccggcggcaucugcgacuccccccaccagauccucgacggcgagaacugcacccucaucgacgcccuccucggcgacccccagugcgacggcuuccagaacaagaagugggaccucuucgucgagcgcuccaaggccuacuccaacugcuaccccuacgacguccccgaccacgccucccuccgcucccucgucgccuccuccggcacccucgaguucaacaacgaguccuucaacuggaccggcgucacccagaacggcaccuccuccgccugcaagcgccgcuccaacaacuccuucuucucccgccucaacuggcucacccaccucaaguucaaguaccccgcccucaacgucaccaugcccaacaacgagaaguucgacaagcucuacaucuggggcguccaccaccccggcaccgacaacgaccagaucucccucuacgcccaggccuccggccgcaucaccgucuccaccaagcgcucccagcagaccgucauccccaacaucggcucccgcccccgcguccgcgacauccccucccgcaucuccaucuacuggaccaucgucaagcccggcgacauccuccucaucaacuccaccggcaaccucaucgccccccgcggcuacuucaagauccgcuccggcaaguccuccaucaugcgcuccgacgcccccaucggcaagugcaacuccgagugcaucacccccaacggcuccauccccaacgacaagcccuuccagaacgucaaccgcaucaccuacggcgccugcccccgcuacgucaagcagaacacccucaagcucgccaccggcaugcgcaacguccccgagaagcagacccgcggcaucuucggcgccaucgccggcuucaucgagaacggcugggagggcauggucgacggcugguacggcuuccgccaccagaacuccgagggcaccggccaggccgccgaccucaaguccacccaggccgccaucaaccagaucaacggcaagcucaaccgccucaucggcaagaccaacgagaaguuccaccagaucgagaaggaguucuccgaggucgagggccgcauccaggaccucgagaaguacgucgaggacaccaagaucgaccucugguccuacaacgccgagcuccucgucgcccucgagaaccagcacaccaucgaccucaccgacuccgagaugaacaagcucuucgagcgcaccaagaagcagcuccgcgagaacgccgaggacaugggcaacggcugcuucaagaucuaccacaagugcgacaacgccugcaucggcuccauccgcaacggcaccuacgaccacgacgucuaccgcgacgaggcccucaacaaccgcuuccagaucaagggcgucgagcucaaguccggcuacaaggacuggauccucuggaucuccuucgccaucuccugcuuccuccucugcgucgcccuccucggcuucaucaugugggccugccagaagggcaacauccgcugcaacaucugcaucuga

SEQ ID NO: 96579 - RNA, 1701 nt, Artificial Sequence
  derived and/or modified CDS sequence (opt2) from hemagglutinin__InfluenzaA__ABC42640
augaagaccaucaucgcccucuccuacauccucugccucgucuucgcccagaagauccccggcaacgacaacuccaccgccacccucugccucggccaccacgccguccccaacggcaccaucgucaagaccaucaccaacgaccagaucgaggucaccaacgccaccgagcucguccaguccuccuccaccggcggcaucugcgacuccccccaccagauccucgacggcgagaacugcacccucaucgacgcccuccucggcgacccccagugcgacggcuuccagaacaagaagugggaccucuucgucgagcgcuccaaggccuacuccaacugcuaccccuacgacguccccgacuacgccucccuccgcucccucgucgccuccuccggcacccucgaguucaacaacgaguccuucaacuggaccggcgucacccagaacggcaccuccuccgccugcaagcgccgcuccaacaacuccuucuucucccgccucaacuggcucacccaccucaaguucaaguaccccgcccucaacgucaccaugcccaacaacgagaaguucgacaagcucuacaucuggggcguccaccaccccggcaccgacaacgaccagaucucccucuacgcccaggccuccggccgcaucaccgucuccaccaagcgcucccagcagaccgucauccccaacaucggcucccgcccccgcguccgcgacauccccucccgcaucuccaucuacuggaccaucgucaagcccggcgacauccuccucaucaacuccaccggcaaccucaucgccccccgcggcuacuucaagauccgcuccggcaaguccuccaucaugcgcuccgacgcccccaucggcaagugcaacuccgagugcaucacccccaacggcuccauccccaacgacaagcccuuccagaacgucaaccgcaucaccuacggcgccugcccccgcuacgucaagcagaacacccucaagcucgccaccggcaugcgcaacguccccgagaagcagacccgcggcaucuucggcgccaucgccggcuucaucgagaacggcugggagggcauggucgacggcugguacggcuuccgccaccagaacuccgagggcaucggccaggccgccgaccucaaguccacccaggccgccaucaaccagaucaacggcaagcucaaccgccucaucggcaagaccaacgagaaguuccaccagaucgagaaggaguucuccgaggucgagggccgcauccaggaccucgagaaguacgucgaggacaccaagaucgaccucugguccuacaacgccgagcuccucgucgcccucgagaaccagcacaccaucgaccucaccgacuccgagaugaacaagcucuucgagcgcaccaagaagcagcuccgcgagaacgccgaggacaugggcaacggcugcuucaagaucuaccacaagugcgacaacgccugcaucggcuccauccgcaacggcaccuacgaccacgacgucuaccgcgacgaggcccucaacaaccgcuuccagaucaagggcgucgagcucaaguccggcuacaaggacuggauccucuggaucuccuucgccaucuccugcuuccuccucugcgucgcccuccucggcuucaucaugugggccugccagaagggcaacauccgcugcaacaucugcaucuga

SEQ ID NO: 96580 - RNA, 1701 nt, Artificial Sequence; identical to SEQ ID NO: 96279
  derived and/or modified CDS sequence (opt2) from hemagglutinin__InfluenzaA__ABC42651

SEQ ID NO: 96581 - RNA, 1701 nt, Artificial Sequence
  derived and/or modified CDS sequence (opt2) from hemagglutinin__InfluenzaA__ABC42662
augaagaccaucaucgcccucuccuacauccucugccucgucuucgcccagaagcuccccggcaacgacaacuccaccgccacccucugccucggccaccacgccguccccaacggcaccaucgucaagaccaucaccaacgaccagaucgaggucaccaacgccaccgagcucguccaguccuccuccaccggcggcaucugcgacuccccccaccagauccucgacggcgagaacugcacccucaucgacgcccuccucggcgacccccagugcgacggcuuccagaacaagaagugggaccucuucgucgagcgcuccaaggccuacuccaacugcuaccccuacgacguccccgacuacgccucccuccgcucccucgucgccuccuccggcacccucgaguucaacaacgaguccuucaacuggaccggcgucacccagaacggcaccuccuccgccugcaagcgccgcuccaacaacuccuucuucucccgccucaacuggcucacccaccucaaguucaaguaccccgcccucaacgucaccaugcccaacaacgagaaguucgacaagcucuacaucuggggcguccaccaccccggcaccgacaacgaccagaucucccucuacgcccaggccuccggccgcaucaccgucuccaccaagcgcucccagcagaccgucauccccaacaucggcucccgcccccgcguccgcgacauccccucccgcaucuccaucuacuggaccaucgucaagcccggcgacauccuccucaucaacuccaccggcaaccucaucgccccccgcggcuacuucaagauccgcuccggcaaguccuccaucaugcgcuccgacgcccccaucggcaagugcaacuccgagugcaucacccccaacggcuccauccccaacgacaagcccuuccagaacgucaaccgcaucaccuacggcgccugcccccgcuacgucaagcagaacacccucaagcucgccaccggcaugcgcaacguccccgagaagcagacccgcggcaucuucggcgccaucgccggcuucaucgagaacggcugggagggcauggucgacggcugguacggcuuccgccaccagaacuccgagggcaucggccaggccgccgaccucaaguccacccaggccgccaucaaccagaucaacggcaagcucaaccgccucaucggcaagaccaacgagaaguuccaccagaucgagaaggaguucuccgaggucgagggccgcauccaggaccucgagaaguacgucgaggacaccaagaucgaccucugguccuacaacgccgaguuccucgucgcccucgagaaccagcacaccaucgaccucaccgacuccgagaugaacaagcucuucgagcgcaccaagaagcagcuccgcgagaacgccgaggacaugggcaacggcugcuucaagaucuaccacaagugcgacaacgccugcaucggcuccauccgcaacggcaccuacgaccacgacgucuaccgcgacgaggcccucaacaaccgcuuccagaucaagggcgucgagcucaaguccggcuacaaggacuggauccucuggaucuccuucgccaucuccugcuuccuccucugcgucgcccuccucggcuucaucaugugggccugccagaagggcaacauccgcugcaacaucugcaucuga

SEQ ID NO: 96582 - RNA, 1701 nt, Artificial Sequence
  derived and/or modified CDS sequence (opt2) from hemagglutinin__InfluenzaA__ABC42673
augaagaccaucaucgcccucuccuacauccucugccucaucuucgcccagaagcuccccggcaacgacaacuccaccgccacccucugccucggccaccacgccguccccaacggcaccaucgucaagaccaucaccaacgaccagaucgaggucaccaacgccaccgagcucguccaguccuccuccaccggcggcaucugcgacuccccccaccagauccucgacggcgagaacugcacccucaucgacgcccuccucggcgacccccagugcgacggcuuccagaacaagaagugggaccucuucgucgagcgcuccaaggccuacuccaacugcuaccccuacgacguccccgacuacgccucccuccgcucccucgucgccuccuccggcacccucgaguucaacaacgaguccuucaacuggaccggcgucacccagaacggcaccuccuccgccugcaagcgccgcuccaacaacuccuucuucucccgccucaacuggcucacccaccucaaguucaaguaccccgcccucaacgucaccaugcccaacaacgagaaguucgacaagcucuacaucuggggcguccaccaccccggcaccgacaacgaccagaucucccucuacgcccaggccuccggccgcaucaccgucuccaccaagcgcucccagcagaccgucauccccaacaucggcucccgcccccgcguccgcgacauccccucccgcaucuccaucuacuggaccaucgucaagcccggcgacauccuccucaucaacuccaccggcaaccucaucgccccccgcggcuacuucaagauccgcuccggcaaguccuccaucaugcgcuccgacgcccccaucggcaagugcaacuccgagugcaucacccccaacggcuccauccccaacgacaagcccuuccagaacgucaaccgcaucaccuacggcgccugcccccgcuacgucaagcagaacacccucaagcucgccaccggcaugcgcaacguccccgagaagcagacccgcggcaucuucggcgccaucgccggcuucaucgagaacggcugggagggcauggucgacggcugguacggcuuccgccaccagaacuccgagggcaucggccaggccgccgaccucaaguccacccaggccgccaucaaccagaucaacggcaagcucaaccgccucaucggcaagaccaacgagaaguuccaccagaucgagaaggaguucuccgaggucgagggccgcauccaggaccucgagaaguacgucgaggacaccaagaucgaccucugguccuacaacgccgagcuccucgucgcccucgagaaccagcacaccaucgaccucaccgacuccgagaugaacaagcucuucgagcgcaccaagaagcagcuccgcgagaacgccgaggacaugggcaacggcugcuucaagaucuaccacaagugcgacaacgccugcaucggcuccauccgcaacggcaccuacgaccacgacgucuaccgcgacgaggcccucaacaaccgcuuccagaucaagggcgucgagcucaaguccggcuacaaggacuggauccucuggaucuccuucgccaucuccugcuuccuccucugcgucgcccuccucggcuucaucaugugggccugccagaagggcaacauccgcugcaacaucugcaucuga

SEQ ID NO: 96583 - RNA, 1701 nt, Artificial Sequence; identical to SEQ ID NO: 96279
  derived and/or modified CDS sequence (opt2) from hemagglutinin__InfluenzaA__ABC42684

SEQ ID NO: 96584 - RNA, 1701 nt, Artificial Sequence; identical to SEQ ID NO: 96279
  derived and/or modified CDS sequence (opt2) from hemagglutinin__InfluenzaA__ABC42695

SEQ ID NO: 96585 - RNA, 1701 nt, Artificial Sequence
  derived and/or modified CDS sequence (opt2) from hemagglutinin__InfluenzaA__ABC42706
augaagaccaucaucgcccucuccuacauccucugccucgucuucgcccagaagcuccccggcaacgacaacuccaccgccacccucugccucggccaccacgccguccccaacggcaccaccgucaagaccaucaccaacgaccagaucgaggucaccaacgccaccgagcucguccaguccuccuccaccggcggcaucugcgacuccccccaccagauccucgacggcgagaacugcacccucaucgacgcccuccucggcgacccccagugcgacggcuuccagaacaagaagugggaccucuucgucgagcgcuccaaggccuacuccaacugcuaccccuacgacguccccgacuacgccucccuccgcucccucgucgccuccuccggcacccucgaguucaacaacgaguccuucaacuggaccggcgucacccagaacggcaccuccuccgccugcaagcgccgcuccaacaacuccuucuucucccgccucaacuggcucacccaccucaaguucaaguaccccgcccucaacgucaccaugcccaacaacgagaaguucgacaagcucuacaucuggggcguccaccaccccggcaccgacaacgaccagaucucccucuacgcccaggccuccggccgcaucaccgucuccaccaagcgcucccagcagaccgucauccccaacaucggcucccgcccccgcguccgcgacauccccucccgcaucuccaucuacuggaccaucgucaagcccggcgacauccuccucaucaacuccaccggcaaccucaucgccccccgcggcuacuucaagauccgcuccggcaaguccuccaucaugcgcuccgacgcccccaucggcaagugcaacuccgagugcaucacccccaacggcuccauccccaacgacaagcccuuccagaacgucaaccgcaucaccuacggcgccugcccccgcuacgucaagcagaacacccucaagcucgccaccggcaugcgcaacguccccgagaagcagacccgcggcaucuucggcgccaucgccggcuucaucgagaacggcugggagggcauggucgacggcugguacggcuuccgccaccagaacuccgagggcaucggccaggccgccgaccucaaguccacccaggccgccaucaaccagaucaacggcaagcucaaccgccucaucggcaagaccaacgagaaguuccaccagaucgagaaggaguucuccgaggucgagggccgcauccaggaccucgagaaguacgucgaggacaccaagaucgaccucugguccuacaacgccgagcuccucgucgcccucgagaaccagcacaccaucgaccucaccgacuccgagaugaacaagcucuucgagcgcaccaagaagcagcuccgcgagaacgccgaggacaugggcaacggcugcuucaagaucuaccacaagugcgacaacgccugcaucggcuccauccgcaacggcaccuacgaccacgacgucuaccgcgacgaggcccucaacaaccgcuuccagaucaagggcgucgagcucaaguccggcuacaaggacuggauccucuggaucuccuucgccaucuccugcuuccuccucugcgucguccuccucggcuucaucaugugggccugccagaagggcaacauccgcugcaacaucugcaucuga

SEQ ID NO: 96586 - RNA, 1701 nt, Artificial Sequence; identical to SEQ ID NO: 96279
  derived and/or modified CDS sequence (opt2) from hemagglutinin__InfluenzaA__ABC42717

SEQ ID NO: 96587 - RNA, 1701 nt, Artificial Sequence
  derived and/or modified CDS sequence (opt2) from hemagglutinin__InfluenzaA__ABC42728
augaagaccaucaucgcccucuccuacauccucugccucgucuucgcccagaagcuccccggcaacgacaacuccaccgccacccucugccucggccaccacgccguccccaacggcaccgucgucaagaccaucaccaacgaccagaucgaggucaccaacgccaccgagcucguccaguccuccuccaccggcggcaucugcgacuccccccaccagauccucgacggcgagaacugcacccucauggacgcccuccucggcgacccccagugcgacggcuuccagaacaagaagugggaccucuucgucgagcgcucccgcgccuacuccaacugcuaccccuacgacguccccgacuacgccucccuccgcucccucgucgccuccuccggcacccucgaguucaacaacgaguccuucaacuggaccggcgucacccagaacggcaccuccuccgccugcaagcgccgcuccaacaacuccuucuucucccgccucaacuggcucacccaccucaaguucaaguaccccgcccucaacgucaccaugcccaacaacgagaaguucgacaagcucuacaucuggggcguccaccaccccggcaccgacaacgaccagaucucccucuacgcccaggccuccggccgcaucaccgucuccaccaagcgcucccagcagaccgucauccccaacaucggcucccgcccccgcguccgcgacauccccucccgcaucuccaucuacuggaccaucgucaagcccggcgacauccuccucaucaacuccaccggcaaccucaucgccccccgcggcuacuucaagauccgcuccggcaaguccuccaucaugcgcuccgacgcccccaucggcaagugcaacuccgagugcaucacccccaacggcuccauccccaacgacaagcccuuccagaacgucaaccgcaucaccuacggcgccugcccccgcuacgucaagcagaacacccucaagcucgccaccggcaugcgcaacguccccgagaagcagacccgcggcaucuucggcgccaucgccggcuucaucgagaacggcugggagggcauggucgacggcugguacggcuuccgccaccagaacuccgagggcaccggccaggccgccgaccucaaguccacccaggccgccaucaaccagaucaacggcaagcucaaccgccucaucggcaagaccaacgagaaguuccaccagaucgagaaggaguucuccgaggucgagggccgcauccaggaccucgagaaguacgucgaggacaccaagaucgaccucugguccuacaacgccgagcuccucgucgcccucgagaaccagcacaccaucgaccucaccgacuccgagaugaacaagcucuucgagcgcaccaagaagcagcuccgcgagaacgccgaggacaugggcaacggcugcuucaagaucuaccacaagugcgacaacgccugcaucggcuccauccgcaacggcaccuacgaccacgacgucuaccgcgacgaggcccucaacaaccgcuuccagaucaagggcgucgagcucaaguccggcuacaaggacuggauccucuggaucuccuucgccaucuccugcuuccuccucugcgucguccuccucggcuucaucaugugggccugccagaagggcaacauccgcugcaacaucugcaucuga

SEQ ID NO: 96588 - RNA, 1701 nt, Artificial Sequence; identical to SEQ ID NO: 96279
  derived and/or modified CDS sequence (opt2) from hemagglutinin__InfluenzaA__ABC42739

SEQ ID NO: 96589 - RNA, 1698 nt, Artificial Sequence
  derived and/or modified CDS sequence (opt2) from hemagglutinin__InfluenzaA__ABC42750
augaaggucaagcuccucguccuccucugcaccuucaccgccaccuacgccgacaccaucugcaucggcuaccacgccaacaacuccaccgacaccgucgacaccguccucgagaagaacgucaccgucacccacuccgucaaccuccucgaggacucccacaacggcaagcucugccuccucaagggcaucgccccccuccagcucggcaacugcuccgucgccggcuggauccucggcaaccccgagugcgagcuccucaucuccaaggaguccugguccuacaucgucgagaagcccaaccccgagaacggcaccugcuaccccggccacuucgccgacuacgaggagcuccgcgagcagcucuccuccgucuccuccuucgagcgcuucgagaucuuccccaaggaguccuccuggcccaaccacaccgucaccggcgucuccgccuccugcucccacaacggcaaguccuccuucuacaagaaccuccucuggcucaccggcaagaacggccucuaccccaaccucuccaaguccuacgccaacaacaaggagaaggagguccucguccucuggggcguccaccacccccccaacaucggcgaccagaaggcccucuaccacaccgagaacgccuacgucuccgucgucuccucccacuacucccgcaaguucacccccgagaucgccaagcgccccaagguccgcgaccaggagggccgcaucaacuacuacuggacccuccucgagcccggcgacaccaucaucuucgaggccaacggcaaccucaucgccccccgcuacgccuucgcccucucccgcggcuucggcuccggcaucaucaacuccaacgcccccauggacgagugcgacgccaagugccagaccccccagggcgccaucaacuccucccuccccuuccagaacguccaccccgucaccaucggcgagugccccaaguacguccgcuccgccaagcuccgcauggucaccggccuccgcaacauccccuccauccagucccgcggccucuucggcgccaucgccggcuucaucgagggcggcuggaccggcauggucgacggcugguacggcuaccaccaccagaacgagcagggcuccggcuacgccgccgaccagaaguccacccagaacgccaucaacggcaucaccaacaaggucaacuccgucaucgagaagaugaacacccaguucaccgccgucggcaaggaguucaacaagcucgagcgccgcauggagaaccucaacaagaaggucgacgacggcuucaucgacaucuggaccuacaacgccgagcuccucguccuccucgagaacgagcgcacccucgacuuccacgacuccaacgucaagaaccucuacgagaaggucaagucccagcucaagaacaacgccaaggagaucggcaacggcugcuucgaguucuaccacaagugcaacgacgagugcauggaguccgucaagaacggcaccuacgacuaccccaaguacuccgaggaguccaagcucaaccgcgagaagaucgacggcgucaagcucgaguccaugggcgucuaccagauccucgccaucuacuccaccgucgccuccucccucguccuccucgucucccucggcgccaucuccuucuggaugugcuccaacggcucccuccagugccgcaucugcaucuga

SEQ ID NO: 96590 - RNA, 1701 nt, Artificial Sequence; identical to SEQ ID NO: 96279
  derived and/or modified CDS sequence (opt2) from hemagglutinin__InfluenzaA__ABC42761

SEQ ID NO: 96591 - RNA, 1701 nt, Artificial Sequence
  derived and/or modified CDS sequence (opt2) from hemagglutinin__InfluenzaA__ABC42772
augaagaccaucaucgcccucuccuacauccucugccucgucuucgcccagaagcuccccggcaacgacaacuccaccgccacccucugccucggccaccacgccguccccaacggcaccaucgucaagaccaucaccaacgaccagaucgaggucaccaacgccaccgagcucguccaguccuccuccaccggcggcaucugcgacuccccccaccagauccucgacggcgagaacugcacccucaucgacgcccuccucggcgacccccagugcgacggcuuccagaacaagaagugggaccucuucgucgagcgcuccaaggccuacuccaacugcuaccccuacgacguccccgacuacgccucccuccgcucccucgucgccuccuccggcacccucgaguucaacaacgaguccuucaacuggaccggcgucacccagaacggcaccuccuccgccugcaagcgccgcuccaacaacuccuucuucucccgccucaacuggcucacccaccucaaguucaaguaccccgcccucaacgucaccaugcccaacaacgagaaguucgacaagcucuacaucuggggcguccaccaccccggcaccgacaacgaccagaucucccucuacgcccaggccuccggccgcaucaccgucuccaccaagcgcucccagcagaccgucauccccaacaucggcucccgcccccgcguccgcgacauccccucccgcaucuccaucuacuggaccaucgucaagcccggcgacauccuccucaucaacuccaccggcaaccucaucgccccccgcggcuacuucaagauccgcuccggcaaguccuccaucaugcgcuccgacgcccccaucggcaagugcaacuccgagugcaucacccccaacggcuccauccccaacgacaagcccuuccagaacgucaaccgcaucaccuacggcgccugcccccgcuacgucaagcagaacacccucaagcucgccaccggcaugcgcaacguccccgagaagcagacccgcggcaucuucggcgccaucgccggcuucaucgagaacggcugggagggcauggucgacggcugguacggcuuccgccaccagaacuccgagggcaucggccaggccgccgaccucaaguccacccaggccgccaucaaccagaucaacggcaagcucaaccgccucaucggcaagaccaacgagaaguuccaccagaucgagaaggaguucuccgaggucgagggccgcauccaggaccucgagaaguacgucgaggacaccaagaucgaccucugguccuacaacgccgagcuccucgucgcccucgagaaccagcacaccaucgaccucaccgacuccgagaugaacaagcucuucgagcgcaccaagaagcagcuccgcgagaacgccgaggacaugggcaacggcugcuucaagaucuaccacaagugcgacaacgccugcaucggcuccauccgcaacggcaccuacgaccacgacgucuaccgcgacgaggcccucaacaaccgcuuccagaucaaguccgucgagcucaaguccggcuacaaggacuggauccucuggaucuccuucgccaucuccugcuuccuccucugcgucgcccuccucggcuucaucaugugggccugccagaagggcaacauccgcugcaacaucugcaucuga

SEQ ID NO: 96592 - RNA, 1701 nt, Artificial Sequence; identical to SEQ ID NO: 96279
  derived and/or modified CDS sequence (opt2) from hemagglutinin__InfluenzaA__ABC42783

SEQ ID NO: 96593 - RNA, 1701 nt, Artificial Sequence; identical to SEQ ID NO: 96279
  derived and/or modified CDS sequence (opt2) from hemagglutinin__InfluenzaA__ABC42794

SEQ ID NO: 96594 - RNA, 1701 nt, Artificial Sequence; identical to SEQ ID NO: 96279
  derived and/or modified CDS sequence (opt2) from hemagglutinin__InfluenzaA__ABC42805

SEQ ID NO: 96595 - RNA, 1701 nt, Artificial Sequence; identical to SEQ ID NO: 96318
  derived and/or modified CDS sequence (opt2) from hemagglutinin__InfluenzaA__ABC42816

SEQ ID NO: 96596 - RNA, 1701 nt, Artificial Sequence
  derived and/or modified CDS sequence (opt2) from hemagglutinin__InfluenzaA__ABC42827
augaagaccaucaucgcccucuccuacauccucugccucgucuucgcccagaagcuccccggcaacgacaacuccaccgccacccucugccucggccaccacgccguccccaacggcaccaucgucaagaccaucaccaacgaccagaucgaggucaccaacgccaccgagcucguccaguccuccuccaccggcggcaucugcgacuccccccaccagauccucgacggcgagaacugcacccucaucgacgcccuccucggcgacccccagugcgacggcuuccagaacaagaagugggaccucuucgucgagcgcuccaaggccuacuccaacugcuaccccuacgacguccccgacuacgccucccuccgcucccucgucgccuccuccggcacccucgaguucaacaacgaguccuucaacuggaccggcgucacccagaacggcaccuccuccgccugcaagcgccgcuccaacaacuccuucuucucccgccucaacuggcucacccaccucaaguucaaguaccccgcccucaacgucaccaugcccaacaacgagaaguucgacaagcucuacaucuggggcguccaccaccccggcaccgacaacgaccagaucucccucuacgcccaggccuccggccgcaucaccgucuccaccaagcgcucccagcagaccgucauccccaacaucggcucccgcccccgcguccgcgacauccccucccgcauguccaucuacuggaccaucgucaagcccggcgacauccuccucaucaacuccaccggcaaccucaucgccccccgcggcuacuucaagauccgcuccggcaaguccuccaucaugcgcuccgacgcccccaucggcaagugcaacuccgagugcaucacccccaacggcuccauccccaacgacaagcccuuccagaacgucaaccgcaucaccuacggcgccugcccccgcuacgucaagcagaacacccucaagcucgccaccggcaugcgcaacguccccgagaagcagacccgcggcaucuucggcgccaucgccggcuucaucgagaacggcugggagggcauggucgacggcugguacggcuuccgccaccagaacuccgagggcaucggccaggccgccgaccucaaguccacccaggccgccaucaaccagaucaacggcaagcucaaccgccucaucggcaagaccaacgagaaguuccaccagaucgagaaggaguucuccgaggucgagggccgcauccaggaccucgagaaguacgucgaggacaccaagaucgaccucugguccuacaacgccgagcuccucgucgcccucgagaaccagcacaccaucgaccucaccgacuccgagaugaacaagcucuucgagcgcaccaagaagcagcuccgcgagaacgccgaggacaugggcaacggcugcuucaagaucuaccacaagugcgacaacgccugcaucggcuccauccgcaacggcaccuacgaccacgacgucuaccgcgacgaggcccucaacaaccgcuuccagaucaagggcgucgagcucaaguccggcuacaaggacuggauccucuggaucuccuucgccaucuccugcuuccuccucugcgucgcccuccucggcuucaucaugugggccugccagaagggcaacauccgcugcaacaucugcaucuga

SEQ ID NO: 96597 - RNA, 1701 nt, Artificial Sequence; identical to SEQ ID NO: 96279
  derived and/or modified CDS sequence (opt2) from hemagglutinin__InfluenzaA__ABC42849

SEQ ID NO: 96598 - RNA, 1701 nt, Artificial Sequence
  derived and/or modified CDS sequence (opt2) from hemagglutinin__InfluenzaA__ABC42882
augaagaccaucaucgcccucuccuacauccucugccucgucuucgcccagaagcuccccggcaacgacaacuccaccgccacccucugccucggccaccacgccguccccaacggcacccucgucaagaccaucaccaacgaccagaucgaggucaccaacgccaccgagcucguccaguccuccuccaccggccgcaucugcgacuccccccaccagauccucgacggcgagaacugcacccucaucgacgcccuccucggcgacccccacugcgacggcuuccagaacaaggagugggaccucuucgucgagcgcuccaaggccuacuccaacugcuaccccuacgacguccccgacuacgucucccuccgcucccucgucgccuccuccggcacccucgaguucaacaacgaguccuucaacuggaccggcgucgcccagaacggcaccuccuccgccugcaagcgccgcuccgacaaguccuucuucucccgccucaacuggcuccaccagcucaaguacaaguaccccgcccucaacgucaccaugcccaacaacgagaaguucgacaagcucuacaucuggggcguccaccaccccggcaccgacuccgaccagaucucccucuacgcccaggccuccggccgcgucaccgucuccaccaagcgcucccagcagaccgucauccccaacaucggcucccgccccuggguccgcggcgucuccucccgcaucuccaucuacuggaccaucgucaagcccggcgacauccuccucaucaacuccaccggcaaccucaucgccccccgcggcuacuucaagauccgcuccggcaaguccuccaucaugcgcuccgacgcccccaucggcaagugcaacuccgagugcaucacccccaacggcuccauccccaacgacaagcccuuccagaacgucaaccgcaucaccuacggcgccugcccccgcuacgucaagcagaacacccucaagcucgccaccggcaugcgcaacguccccgagaagcagacccgcggcaucuucggcgccaucgccggcuucaucgagaacggcugggagggcaugauggacggcugguacggcuuccgccaccagaacuccgagggcaccggccaggccgccgaccucaaguccacccaggccgccaucaaccagaucaacggcaagcucaaccgccucaucgagaagaccaacgagaaguuccaccagaucgagaaggaguucuccgaggucgagggccgcauccaggaccucgagaaguacgucgaggacaccaagaucgaccucugguccuacaacgccgagcuccucgucgcccucgagaaccagcacaccaucgaccucaccgacuccgagaugaacaagcucuucgagcgcaccaagaagcagcuccgcgagaacgccgaggacaugggcaacggcugcuucaagaucuaccacaagugcgacaacgccugcaucggcuccauccgcaacggcaccuacgaccacgacgucuaccgcgacgaggcccucaacaaccgcuuccagaucaagggcgucgagcucaaguccggcuacaaggacuggguccucuggaucuccuucgccaucuccugcuuccuccucugcaucguccuccucggcuucaucaugugggccugccagaagggcaacauccgcugcaacaucugcaucuga

SEQ ID NO: 96599 - RNA, 1701 nt, Artificial Sequence; identical to SEQ ID NO: 96598
  derived and/or modified CDS sequence (opt2) from hemagglutinin__InfluenzaA__ABC42893

SEQ ID NO: 96600 - RNA, 1701 nt, Artificial Sequence; identical to SEQ ID NO: 96552
  derived and/or modified CDS sequence (opt2) from hemagglutinin__InfluenzaA__ABC42929

SEQ ID NO: 96601 - RNA, 1701 nt, Artificial Sequence; identical to SEQ ID NO: 96552
  derived and/or modified CDS sequence (opt2) from hemagglutinin__InfluenzaA__ABC42940

SEQ ID NO: 96602 - RNA, 1701 nt, Artificial Sequence; identical to SEQ ID NO: 96552
  derived and/or modified CDS sequence (opt2) from hemagglutinin__InfluenzaA__ABC42951

SEQ ID NO: 96603 - RNA, 1701 nt, Artificial Sequence; identical to SEQ ID NO: 96552
  derived and/or modified CDS sequence (opt2) from hemagglutinin__InfluenzaA__ABC42962

SEQ ID NO: 96604 - RNA, 1701 nt, Artificial Sequence; identical to SEQ ID NO: 96552
  derived and/or modified CDS sequence (opt2) from hemagglutinin__InfluenzaA__ABC42973

SEQ ID NO: 96605 - RNA, 1701 nt, Artificial Sequence; identical to SEQ ID NO: 96552
  derived and/or modified CDS sequence (opt2) from hemagglutinin__InfluenzaA__ABC42995

SEQ ID NO: 96606 - RNA, 1701 nt, Artificial Sequence; identical to SEQ ID NO: 96552
  derived and/or modified CDS sequence (opt2) from hemagglutinin__InfluenzaA__ABC43006

SEQ ID NO: 96607 - RNA, 1701 nt, Artificial Sequence; identical to SEQ ID NO: 96552
  derived and/or modified CDS sequence (opt2) from hemagglutinin__InfluenzaA__ABC43028

SEQ ID NO: 96608 - RNA, 1701 nt, Artificial Sequence; identical to SEQ ID NO: 96552
  derived and/or modified CDS sequence (opt2) from hemagglutinin__InfluenzaA__ABC43039

SEQ ID NO: 96609 - RNA, 1701 nt, Artificial Sequence; identical to SEQ ID NO: 96552
  derived and/or modified CDS sequence (opt2) from hemagglutinin__InfluenzaA__ABC43050

SEQ ID NO: 96610 - RNA, 1701 nt, Artificial Sequence; identical to SEQ ID NO: 96552
  derived and/or modified CDS sequence (opt2) from hemagglutinin__InfluenzaA__ABC43061

SEQ ID NO: 96611 - RNA, 1701 nt, Artificial Sequence
  derived and/or modified CDS sequence (opt2) from hemagglutinin__InfluenzaA__ABC43072
augaagaccaucaucgcccucuccuacauccucugccucgucuucgcccagaagcuccccggcaacgacaacuccaccgccacccucugccucggccaccacgccguccccaacggcaccaucgucaagaccaucaccaacgaccagaucgaggucaccaacgccaccgagcucguccaguccuccuccaccggcggcaucugcgacuccccccaccagauccucgacggcgagaacugcacccucaucgacgcccuccucggcgacccccagugcgacggcuuccagaacaagaagugggaccucuucgucgagcgcuccaaggccuacuccaacugcuaccccuacgacguccccgaccacgccucccuccgcucccucgucgccuccuccggcacccucgaguucaacaacgaguccuucgacuggaccggcgucacccagaacggcaccuccuccgccugcaagcgccgcuccaacaaguccuucuucucccgccucaacuggcucacccaccucaaguacaaguaccccgcccucaacgucaccaugcccaacaacgagaaguucgacaagcucuacaucuggggcguccaccaccccggcaccgacuccgaccagaucucccucuacgcccaggccuccggccgcaucaccgucuccaccaagcgcucccagcagaccgucauccccaacaucggcucccgcccccgcguccgcgacgucuccucccgcaucuccaucuacuggaccaucgucaagcccggcgacauccuccucaucaacuccaccggcaaccucaucgccccccgcggcuacuucaagauccgcuccggcaaguccuccaucaugcgcuccgacgcccccaucggcaagugcaacuccgagugcaucacccccaacggcuccauccccaacgacaagcccuuccagaacgucaaccgcaucaccuacggcgccugcccccgcuacgucaagcagaacacccucaagcucgccaccggcaugcgcaacguccccgagaagcagacccgcggcaucuucggcgccaucgccggcuucaucgagaacggcugggagggcauggucgacggcugguacggcuuccgccaccagaacuccgagggcaccggccaggccgccgaccucaaguccacccaggccgccaucaaccagaucaacggcaagcucaaccgccucaucggcaagaccaacgagaaguuccaccagaucgagaaggaguucuccgaggucgagggccgcauccaggaccucgagaaguacgucgaggacaccaagaucgaccucugguccuacaacgccgagcuccucgucgcccucgagaaccagcacaccaucgaccucaccgacuccgagaugaacaagcucuucgagaagaccaagaagcagcuccgcgagaacgccgaggacaugggcaacggcugcuucaagaucuaccacaagugcgacaacgccugcaucggcuccauccgcaacggcaccuacgaccacgacgucuaccgcgacgaggcccucaacaaccgcuuccagaucaagggcgucgagcucaaguccggcuacaaggacuggauccucuggaucuccuucaccaucuccugcuuccuccucugcgucgcccuccucggcuucaucaugugggccugccagaagggcaacauccgcugcaacaucugcaucuga

SEQ ID NO: 96612 - RNA, 1701 nt, Artificial Sequence; identical to SEQ ID NO: 96552
  derived and/or modified CDS sequence (opt2) from hemagglutinin__InfluenzaA__ABC43083

SEQ ID NO: 96613 - RNA, 1701 nt, Artificial Sequence; identical to SEQ ID NO: 96552
  derived and/or modified CDS sequence (opt2) from hemagglutinin__InfluenzaA__ABC43094

SEQ ID NO: 96614 - RNA, 1701 nt, Artificial Sequence; identical to SEQ ID NO: 96552
  derived and/or modified CDS sequence (opt2) from hemagglutinin__InfluenzaA__ABC43116

SEQ ID NO: 96615 - RNA, 1701 nt, Artificial Sequence; identical to SEQ ID NO: 96279
  derived and/or modified CDS sequence (opt2) from hemagglutinin__InfluenzaA__ABC43127

SEQ ID NO: 96616 - RNA, 1701 nt, Artificial Sequence; identical to SEQ ID NO: 96318
  derived and/or modified CDS sequence (opt2) from hemagglutinin__InfluenzaA__ABC43138

SEQ ID NO: 96617 - RNA, 1701 nt, Artificial Sequence; identical to SEQ ID NO: 96279
  derived and/or modified CDS sequence (opt2) from hemagglutinin__InfluenzaA__ABC43149

SEQ ID NO: 96618 - RNA, 1701 nt, Artificial Sequence; identical to SEQ ID NO: 96279
  derived and/or modified CDS sequence (opt2) from hemagglutinin__InfluenzaA__ABC43160

SEQ ID NO: 96619 - RNA, 1701 nt, Artificial Sequence; identical to SEQ ID NO: 96279
  derived and/or modified CDS sequence (opt2) from hemagglutinin__InfluenzaA__ABC43171

SEQ ID NO: 96620 - RNA, 1701 nt, Artificial Sequence; identical to SEQ ID NO: 96279
  derived and/or modified CDS sequence (opt2) from hemagglutinin__InfluenzaA__ABC43182

SEQ ID NO: 96621 - RNA, 1701 nt, Artificial Sequence
  derived and/or modified CDS sequence (opt2) from hemagglutinin__InfluenzaA__ABC43475
augaagaccaucaucgcccucuccuacauccucugccucgucuucgcccagaagcuccccggcaacgacaacuccaccgccacccucugccucggccaccacgccguccccaacggcaccaccgucaagaccaucaccaacgaccagaucgaggucaccaacgccaccgagcucguccaguccuccuccaccggcggcaucugcgacuccccccaccagauccucgacggcgagaacugcacccucaucgacgcccuccucggcgacccccagugcgacggcuuccagaacaagaagugggaccucuucgucgagcgcuccaaggccuacuccaacugcuaccccuacgacguccccgacuacgccucccuccgcucccucgucgccuccuccggcacccucgaguucaacaacgaguccuucaacuggaccggcgucacccagaacggcaccuccuccgccugcaagcgccgcuccaacaacuccuucuucucccgccucaacuggcucacccaccucaaguucaaguaccccgcccucaacgucaccaugcccaacaacgagaaguucgacaagcucuacaucuggggcguccaccaccccggcaccgacaacgaccagaucucccucuacgcccaggccuccggccgcaucaccgucuccaccaagcgcucccagcagaccgucauccccaacaucggcucccgcccccgcguccgcgacauccccucccgcaucuccaucuacuggaccaucgucaagcccggcgacauccuccucaucaacuccaccggcaaccucaucgccccccgcggcuacuucaagauccgcuccggcaaguccuccaucaugcgcuccgacgcccccaucggcaagugcaacuccgagugcaucacccccaacggcuccauccccaacgacaagcccuuccagaacgucaaccgcaucaccuacggcgccugcccccgcuacgucaagcagaacacccucaagcucgccaccggcaugcgcaacguccccgagaagcagacccgcggcaucuucggcgccaucgccggcuucaucgagaacggcugggagggcauggucgacggcugguacggcuuccgccaccagaacuccgagggcaucggccaggccgccgaccucaaguccacccaggccgccaucaaccagaucaacggcaagcucaaccgccucaucggcaagaccaacgagaaguuccaccagaucgagaaggaguucuccgaggucgagggccgcauccaggaccucgagaaguacgucgaggacaccaagaucgaccucugguccuacaacgccgagcuccucgucgcccucgagaaccagcacaccaucgaccucaccgacuccgagaugaacaagcucuucgagcgcaccaagaagcagcuccgcgagaacgccgaggacaugggcaacggcugcuucaagaucuaccacaagugcgacaacgccugcaucggcuccauccgcaacggcaccuacgaccacgacgucuaccgcgacgaggcccucaacaaccgcuuccagaucaagggcgucgagcucaaguccggcuacaaggacuggauccucuggaucuccuucgccaucuccugcuuccuccucugcgucgcccuccucggcuucaucaugugggccugccagaagggcaacauccgcugcaacaucugcaucuga

SEQ ID NO: 96622 - RNA, 1701 nt, Artificial Sequence; identical to SEQ ID NO: 96279
  derived and/or modified CDS sequence (opt2) from hemagglutinin__InfluenzaA__ABC43486

SEQ ID NO: 96623 - RNA, 1701 nt, Artificial Sequence; identical to SEQ ID NO: 96279
  derived and/or modified CDS sequence (opt2) from hemagglutinin__InfluenzaA__ABC43497

SEQ ID NO: 96624 - RNA, 1701 nt, Artificial Sequence; identical to SEQ ID NO: 96318
  derived and/or modified CDS sequence (opt2) from hemagglutinin__InfluenzaA__ABC43508

SEQ ID NO: 96625 - RNA, 1701 nt, Artificial Sequence; identical to SEQ ID NO: 96318
  derived and/or modified CDS sequence (opt2) from hemagglutinin__InfluenzaA__ABC43519

SEQ ID NO: 96626 - RNA, 1701 nt, Artificial Sequence; identical to SEQ ID NO: 96318
  derived and/or modified CDS sequence (opt2) from hemagglutinin__InfluenzaA__ABC43530

SEQ ID NO: 96627 - RNA, 1701 nt, Artificial Sequence
  derived and/or modified CDS sequence (opt2) from hemagglutinin__InfluenzaA__ABC43552
augaagaccaucaucgcccucuccuacauccucugccucgucuucgcccagaagcuccccggcaacgacaacuccaccgccacccucugccucggccaccacgccguccccaacggcaccaucgucaagaccaucaccaacgaccagaucgaggucaccaacgccaccgagcucguccaguccuccuccaccggcggcaucugcgacuccccccaccagauccucgacggcgagaacugcacccucaucgacgcccuccucggcgacccccagugcgacggcuuccagaacaagaagugggaccucuucgucgagcgcuccaaggccuacuccaacugcuaccccuacgacguccccgacuacgccucccuccgcucccucgucgccuccuccggcacccucgaguucaacaacgaguccuucaacuggaccggcgucacccagaacggcaccuccuccgccugcaagcgccgcuccaacaacuccuucuucucccgccucaacuggcucacccaccucaaguucaaguaccccgcccucaacgucaccaugcccaacaacgagaaguucgacaagcucuacaucuggggcguccaccaccccggcaccgacaacgaccagaucucccucuacgcccaggcccccggccgcaucaccgucuccaccaagcgcucccagcagaccgucauccccaacaucggcucccgcccccgcguccgcgacauccccucccgcaucuccaucuacuggaccaucgucaagcccggcgacauccuccucaucaacuccaccggcaaccucaucgccccccgcggcuacuucaagauccgcuccggcaaguccuccaucaugcgcuccgacgcccccaucggcaagugcaacuccgagugcaucacccccaacggcuccauccccaacgacaagcccuuccagaacgucaaccgcaucaccuacggcgccugcccccgcuacgucaagcagaacacccucaagcucgccaccggcaugcgcaacguccccgagaagcagacccgcggcaucuucggcgccaucgccggcuucaucgagaacggcugggagggcauggucgacggcugguacggcuuccgccaccagaacuccgagggcaucggccaggccgccgaccucaaguccacccaggccgccaucaaccagaucaacggcaagcucaaccgccucaucggcaagaccaacgagaaguuccaccagaucgagaaggaguucuccgaggucgagggccgcauccaggaccucgagaaguacgucgaggacaccaagaucgaccucugguccuacaacgccgagcuccucgucgcccucgagaaccagcacaccaucgaccucaccgacuccgagaugaacaagcucuucgagcgcaccaagaagcagcuccgcgagaacgccgaggacaugggcaacggcugcuucaagaucuaccacaagugcgacaacgccugcaucggcuccauccgcaacggcaccuacgaccacgacgucuaccgcgacgaggcccucaacaaccgcuuccagaucaagggcgucgagcucaaguccggcuacaaggacuggauccucuggaucuccuucgccaucuccugcuuccuccucugcgucgcccuccucggcuucaucaugugggccugccagaagggcaacauccgcugcaacaucugcaucuga

SEQ ID NO: 96628 - RNA, 1701 nt, Artificial Sequence
  derived and/or modified CDS sequence (opt2) from hemagglutinin__InfluenzaA__ABC46554
augaagaccaucaucgcccucuccuacaucuucugccaggucuucgcccagaaccuccccggcaacgacaacuccaccgccacccucugccucggccaccacgccguccccaacggcacccucgucaagaccaucaccaacgaccagaucgaggucaccaacgccaccgagcucguccaguccuccuccaccggccgcaucugcgacuccccccaccgcauccucgacggcaagaacugcacccucaucgacgcccuccucggcgacccccacugcgacggcuuccagaacgagaagugggaccucuucgucgagcgcuccaaggccuucuccaacugcuaccccuacgacguccccgacuacgccucccuccgcucccucgucgccuccuccggcacccucgaguucaucaacgagggcuucaacuggaccggcgucacccaggacggcggcuccuacgccugcaagcgcggccccgacaacuccuucuucucccgccucaacuggcucuacaaguccgaguccaccuaccccguccucaacgucaccaugcccaacaacgacaacuucgacaagcucuacaucuggggcguccaccaccccuccaccgacaaggagcagaccaaccucuacguccaggccuccggccgcgucaccgucuccaccaagcgcucccagcagaccaucauccccaacgucggcucccgccccuggguccgcggccucuccucccgcaucuccaucuacuggaccaucgucaagcccggcgacauccuccucaucaacuccaacggcaaccucaucgccccccgcggcuacuucaagauccgcaccggcaaguccuccaucaugcgcuccgacgcccccaucggcaccugcuccuccgagugcaucacccccaacggcuccauccccaacgacaagcccuuccagaacgucaacaagaucaccuacggcgccugccccaaguacgucaagcagaacacccucaagcucgccaccggcaugcgcaacguccccgagaagcagacccgcggcaucuucggcgccaucgccggcuucaucgagaacggcugggagggcaugaucgacggcugguacggcuuccgccaccagaacuccgagggcaccggccaggccgccgaccucaaguccacccaggccgccaucgaccagaucaacggcaagcucaaccgcgucaucgagaagaccaacgagaaguuccaccagaucgagaaggaguucuccgaggucgagggccgcauccaggaccucgagaaguacgucgaggacaccaagaucgaccucugguccuacaacgccgagcuccucgucgcccucgagaaccagcacaccaucgaccucaccgacuccgagaugaacaagcucuucgagaagacccgccgccagcuccgcgagaacgccgaggacaugggcaacggcugcuucaagaucuaccacaagugcgacaacgccugcaucggcuccauccgcaacggcaccuacgaccacgacgucuaccgcgacgaggcccucaacaaccgcuuccagaucaagggcgucgagcucaaguccggcuacaaggacuggauccucuggaucuccuucgccaucuccugcuuccuccucugcgucguccuccucggcuucaucaugugggccugccagaagggcaacauccgcugcaacaucugcaucuga

SEQ ID NO: 96629 - RNA, 1701 nt, Artificial Sequence
  derived and/or modified CDS sequence (opt2) from hemagglutinin__InfluenzaA__ABC46576
augaagaccaucaucgcccucuccuacaucuucugccucgucuucgcccagaaccuccccggcaacgacaaguccaccgccacccucugccucggccaccacgccguccccaacggcacccucgucaagaccaucaccaacgaccagaucgaggucaccaacgccaccgagcucguccaguccuccuccaccggccgcaucugcgacuccccccaccgcauccucgacggcaagaacugcacccucgucgacgcccuccucggcgacccccacugcgacggcuuccagaacgagaagugggaccucuucgucgagcgcuccaaggccuucuccaacugcuaccccuacgacguccccgacuacgccucccuccgcucccucgucgccuccuccggcacccucgaguucaucaacgaguccuucaacuggaccggcgucacccaguccggcggcuccuacgccugcaagcgcggcuccgacaacuccuucuucucccgccucaacuggcucuacgaguccgaguccaaguaccccguccucaacgucaccaugcccaacaacggcaacuucgacaagcucuacaucuggggcguccaccaccccuccaccgacaaggagcagaccaaccucuacguccgcgccuccggccgcgucaccgucuccaccaagcgcucccagcagaccaucauccccaacaucggcucccgccccuggguccgcggccucuccucccgcaucuccaucuacuggaccaucgucaagcccggcgacauccuccucaucaacuccaacggcaaccucaucgccccccgcggcuacuucaagauccgcaccggcaaguccuccaucaugcgcuccgacgcccccaucggcaccugcuccuccgagugcaucacccccaacggcuccauccccaacgacaagcccuuccagaacgucaacaagaucaccuacggcgccugccccaaguacgucaagcagaacacccucaagcucgccaccggcaugcgcaacguccccgagaagcagacccgcggcaucuucggcgccaucgccggcuucaucgagaacggcugggagggcauggucgacggcugguacggcuuccgccaccagaacuccgagggcaccggccaggccgccgaccucaaguccacccaggccgccaucgaccagaucaacggcaagcucaaccgcgucaucgagaagaccaacgagaaguuccaccagaucgagaaggaguucuccgaggucgagggccgcauccaggaccucgagaaguacgucgaggacaccaagaucgaccucugguccuacaacgccgagcuccucgucgcccucgagaaccagcacaccaucgaccucaccgacuccgagaugaacaagcucuucgagaagacccgccgccagcuccgcgagaacgccgaggacaugggcaacggcugcuucaagaucuaccacaagugcgacaacgccugcaucggcuccauccgcaacggcaccuacgaccacgacgucuaccgcgacgaggcccucaacaaccgcuuccagaucaagggcgucgagcucaaguccggcuacaaggacuggauccucuggaucuccuucgccaucuccugcuuccuccucugcgucguccuccucggcuucaucaugugggccugccagaagggcaacauccgcugcaacaucugcaucuga

SEQ ID NO: 96630 - RNA, 1701 nt, Artificial Sequence; identical to SEQ ID NO: 96488
  derived and/or modified CDS sequence (opt2) from hemagglutinin__InfluenzaA__ABC50167

SEQ ID NO: 96631 - RNA, 1701 nt, Artificial Sequence; identical to SEQ ID NO: 96488
  derived and/or modified CDS sequence (opt2) from hemagglutinin__InfluenzaA__ABC50178

SEQ ID NO: 96632 - RNA, 1701 nt, Artificial Sequence; identical to SEQ ID NO: 96488
  derived and/or modified CDS sequence (opt2) from hemagglutinin__InfluenzaA__ABC50189

SEQ ID NO: 96633 - RNA, 1701 nt, Artificial Sequence; identical to SEQ ID NO: 96598
  derived and/or modified CDS sequence (opt2) from hemagglutinin__InfluenzaA__ABC50200

SEQ ID NO: 96634 - RNA, 1701 nt, Artificial Sequence; identical to SEQ ID NO: 96598
  derived and/or modified CDS sequence (opt2) from hemagglutinin__InfluenzaA__ABC50211

SEQ ID NO: 96635 - RNA, 1701 nt, Artificial Sequence; identical to SEQ ID NO: 96598
  derived and/or modified CDS sequence (opt2) from hemagglutinin__InfluenzaA__ABC50222

SEQ ID NO: 96636 - RNA, 1701 nt, Artificial Sequence; identical to SEQ ID NO: 96598
  derived and/or modified CDS sequence (opt2) from hemagglutinin__InfluenzaA__ABC50233

SEQ ID NO: 96637 - RNA, 1701 nt, Artificial Sequence; identical to SEQ ID NO: 96598
  derived and/or modified CDS sequence (opt2) from hemagglutinin__InfluenzaA__ABC50244

SEQ ID NO: 96638 - RNA, 1701 nt, Artificial Sequence; identical to SEQ ID NO: 96598
  derived and/or modified CDS sequence (opt2) from hemagglutinin__InfluenzaA__ABC50266

SEQ ID NO: 96639 - RNA, 1701 nt, Artificial Sequence; identical to SEQ ID NO: 96598
  derived and/or modified CDS sequence (opt2) from hemagglutinin__InfluenzaA__ABC50277

SEQ ID NO: 96640 - RNA, 1701 nt, Artificial Sequence
  derived and/or modified CDS sequence (opt2) from hemagglutinin__InfluenzaA__ABC50299
augaagaccaucaucgcccucuccuacauccucugccucgucuucgcccagaagcuccccggcaacgacaacuccaccgccacccucugccucggccaccacgccguccccaacggcacccucgucaagaccaucaccaacgaccagaucgaggucaccaacgccaccgagcucguccaguccuccuccaccggccgcaucugcgacuccccccaccagauccucgacggcgagaacugcacccucaucgacgcccuccucggcgacccccacugcgacggcuuccagaacaaggagugggaccucuucgucgagcgcuccaaggccuacuccaacugcuaccccuacgacguccccgacuacgucucccuccgcucccucgucgccuccuccggcacccucgaguucaacaacgaguccuucaacuggaccggcgucgcccagaacggcaccuccuccgccugcaagcgccgcuccgacaaguccuucuucucccgccucaacuggcuccaccagcucaaguacaaguaccccgcccucaacgucaccaugcccaacaacgagaaguucgacaagcucuacaucuggggcguccaccaccccggcaccgacuccgaccagaucucccucuacgcccaggccuccggccgcgucaccgucuccaccaagcgcucccagcagaccgucauccccaacaucggcucccgccccuggguccgcggcgucuccucccgcaucuccaucuacuggaccaucgucaagcccggcgacauccuccucaucaacuccaccggcaaccucaucgccccccgcggcuacuucaagauccgcuccggcaaguccuccaucaugcgcuccgacgcccccaucggcaagugcaacuccgagugcaucacccccaacggcuccauccccaacgacaagcccuuccagaacgucaaccgcaucaccuacggcgccugcccccgcuacgucaagcagaacacccucaagcucgccaccggcaugcgcaacguccccgagaagcagacccgcggcaucuucggcgccaucgccggcuucaucgagaacggcugggagggcaugauggacggcugguacggcuuccgccaccagaacuccgagggcaccggccaggccgccgaccucaaguccacccaggccgccaucaaccagaucaacggcaagcucaaccgccucaucgagaagaccaacgagaaguuccaccagaucgagaaggaguucuccgaggucgagggccgcauccaggaccucgagaaguacgucgaggacaccaagaucgaccucugguccuacaacgccgagcuccucgucgcccucgagaaccagcacaccaucgaccucaccgacuccgagaugaacaagcucuucgagcgcaccaagaagcagcuccgcgagaacgccgaggacaugggcaacggcugcuucaagaucuaccacaagugcgacaacgccugcaucggcuccauccgcaacggcaccuacgaccacgacgucuaccgcgacgaggcccucaacaaccgcuuccagaucaagggcgucgagcucaaguccggcuacaaggacuggguccucuggaucuccuucgccaccuccugcuuccuccucugcaucguccuccucggcuucaucaugugggccugccagaagggcaacauccgcugcaacaucugcaucuga

SEQ ID NO: 96641 - RNA, 1701 nt, Artificial Sequence; identical to SEQ ID NO: 96598
  derived and/or modified CDS sequence (opt2) from hemagglutinin__InfluenzaA__ABC50310

SEQ ID NO: 96642 - RNA, 1701 nt, Artificial Sequence
  derived and/or modified CDS sequence (opt2) from hemagglutinin__InfluenzaA__ABC50321
augaagaccaucaucgcccucuccuacauccucugccucgucuucgcccagaagcuccccggcaacgacaacuccaccgccacccucugccucggccaccacgccguccccaacggcacccucgucaagaccaucaccaacgaccagaucgaggucaccaacgccaccgagcucguccaguccuccuccaccggccgcaucugcgacuccccccaccagauccucgacggcgagaacugcacccucaucgacgcccuccucggcgacccccacugcgacggcuuccagaacaaggagugggaccucuucgucgagcgcuccaaggccuacuccaacugcuaccccuacgacguccccgacuacgucucccuccgcucccucgucgccuccuccggcacccucgaguucaacaacgaguccuucaacuggaccggcgucgcccagaacggcaccuccuccgccugcaagcgccgcuccgacaaguccuucuucucccgccucaacuggcuccaccagcucaaguacaaguaccccgcccucaacgucaccaugcccaacaacgagaaguucgacaagcucuacaucuggggcguccaccaccccggcaccgacuccgaccagaucucccucuacgcccaggccuccggccgcgucaccgucuccaccaagcgcucccagcagaccgucauccccaacaucggcucccgccccuggguccgcggcgucuccucccgcaucuccaucuacuggaccaucgucaagcccggcgacauccuccucaucaacuccaccggcaaccucaucgccccccgcggcuacuucaagauccgcuccggcaaguccuccaucaugcgcuccgacgcccccaucggcaagugcaacuccgagugcaucacccccaacggcuccauccccaacgacaagcccuuccagaacgucaaccgcaucaccuacggcgccugcccccgcuacgucaagcagaacacccucaagcucgccaccggcaugcgcaacguccccggcaagcagacccgcggcaucuucggcgccaucgccggcuucaucgagaacggcugggagggcaugauggacggcugguacggcuuccgccaccagaacuccgagggcaccggccaggccgccgaccucaaguccacccaggccgccaucaaccagaucaacggcaagcucaaccgccucaucgagaagaccaacgagaaguuccaccagaucgagaaggaguucuccgaggucgagggccgcauccaggaccucgagaaguacgucgaggacaccaagaucgaccucugguccuacaacgccgagcuccucgucgcccucgagaaccagcacaccaucgaccucaccgacuccgagaugaacaagcucuucgagcgcaccaagaagcagcuccgcgagaacgccgaggacaugggcaacggcugcuucaagaucuaccacaagugcgacaacgccugcaucggcuccauccgcaacggcaccuacgaccacgacgucuaccgcgacgaggcccucaacaaccgcuuccagaucaagggcgucgagcucaaguccggcuacaaggacuggguccucuggaucuccuucgccaucuccugcuuccuccucugcaucguccuccucggcuucaucaugugggccugccagaagggcaacauccgcugcaacaucugcaucuga

SEQ ID NO: 96643 - RNA, 1701 nt, Artificial Sequence
  derived and/or modified CDS sequence (opt2) from hemagglutinin__InfluenzaA__ABC50332
augaagaccaucaucgcccucuccuacauccucugccucgucuucgcccagaagcuccccggcaacgacaacuccaccgccacccucugccucggccaccacgccguccccaacggcacccucgucaagaccaucaccaacgaccagaucgaggucaccaacgccaccgagcucguccaguccuccuccaccggccgcaucugcgacuccccccaccagauccucgacggcgagaacugcacccucaucgacgcccuccucggcgacccccacugcgacggcuuccagaacaaggagugggaccucuucgucgagcgcuccaaggccuacuccaacugcuaccccuacgacguccccgacuacgucucccuccgcucccucgucgccuccuccggcacccucgaguucaacaacgaguccuucaacuggaccggcgucgcccagaacggcaccuccuccgccugcaagcgccgcuccgacaaguccuucuucucccgccucaacuggcuccaccagcucaaguacaaguaccccgcccucaacgucaccaugcccaacaacgagaaguucgacaagcucuacaucuggggcguccaccaccccggcaccgacuccgaccagaucucccucuacgcccaggccuccggccgcgucaccgucuccaccaagcgcucccagcagaccgucauccccaacaucggcucccgccccuggguccgcggcgucuccucccgcaucuccaucuacuggaccaucgucaagcccggcgacauccuccucaucaacuccaccggcaaccucaucgccccccgcggcuacuucaagauccgcuccggcaaguccuccaucaugcgcuccgacgcccccaucggcaagugcaacuccgagugcaucacccccaacggcuccauccccaacggcaagcccuuccagaacgucaaccgcaucaccuacggcgccugcccccgcuacgucaagcagaacacccucaagcucgccaccggcaugcgcaacguccccgagaagcagacccgcggcaucuucggcgccaucgccggcuucaucgagaacggcugggagggcaugauggacggcugguacggcuuccgccaccagaacuccgagggcaccggccaggccgccgaccucaaguccacccaggccgccaucaaccagaucaacggcaagcucaaccgccucaucgagaagaccaacgagaaguuccaccagaucgagaaggaguucuccgaggucgagggccgcauccaggaccucgagaaguacgucgaggacaccaagaucgaccucugguccuacaacgccgagcuccucgucgcccucgagaaccagcacaccaucgaccucaccgacuccgagaugaacaagcucuucgagcgcaccaagaagcagcuccgcgagaacgccgaggacaugggcaacggcugcuucaagaucuaccacaagugcgacaacgccugcaucggcuccauccgcaacggcaccuacgaccacgacgucuaccgcgacgaggcccucaacaaccgcuuccagaucaagggcgucgagcucaaguccggcuacaaggacuggauccucuggaucuccuucgccaucuccugcuuccuccucugcaucguccuccucggcuucaucaugugggccugccagaagggcaacauccgcugcaacaucugcaucuga

SEQ ID NO: 96644 - RNA, 1701 nt, Artificial Sequence; identical to SEQ ID NO: 96598
  derived and/or modified CDS sequence (opt2) from hemagglutinin__InfluenzaA__ABC50343

SEQ ID NO: 96645 - RNA, 1701 nt, Artificial Sequence
  derived and/or modified CDS sequence (opt2) from hemagglutinin__InfluenzaA__ABC50354
augaagaccaucaucgcccucuccuacauccucugccucgucuucgcccagaagcuccccggcaacgacaacuccaccgccacccucugccucggccaccacgccguccccaacggcacccucgucaagaccaucaccaacgaccagaucgaggucaccaacgccaccgagcucguccaguccuccuccaccggccgcaucugcgacuccccccaccagauccucgacggcgagaacugcacccucaucgacgcccuccucggcgacccccacugcgacggcuuccagaacaaggagugggaccucuucgucgagcgcuccaaggccuacuccaacugcuaccccuacgacguccccgacuacgucucccuccgcucccucgucgccuccuccggcacccucgaguucaacaacgaguccuucaacuggaccggcgucgcccagaacggcaccuccuccuccugcaagcgccgcuccgacaaguccuucuucucccgccucaacuggcuccaccagcucaaguacaaguaccccgcccucaacgucaccaugcccaacaacgagaaguucgacaagcucuacaucuggggcguccaccaccccggcaccgacuccgaccagaucucccucuacgcccaggccuccggccgcgucaccgucuccaccaagcgcucccagcagaccgucauccccaacaucggcucccgccccuggguccgcggcgucuccucccgcaucuccaucuacuggaccaucgucaagcccggcgacauccuccucaucaacuccaccggcaaccucaucgccccccgcggcuacuucaagauccgcuccggcaaguccuccaucaugcgcuccgacgcccccaucggcaagugcaacuccgagugcaucacccccaacggcuccauccccaacgacaagcccuuccagaacgucaaccgcaucaccuacggcgccugcccccgcuacgucaagcagaacacccucaagcucgccaccggcaugcgcaacguccccgagaagcagacccgcggcaucuucggcgccaucgccggcuucaucgagaacggcugggagggcaugauggacggcugguacggcuuccgccaccagaacuccgagggcaccggccaggccgccgaccucaaguccacccaggccgccaucaaccagaucaacggcaagcucaaccgccucaucgagaagaccaacgagaaguuccaccagaucgagaaggaguucuccgaggucgagggccgcauccaggaccucgagaaguacgucgaggacaccaagaucgaccucugguccuacaacgccgagcuccucgucgcccucgagaaccagcacaccaucgaccucaccgacuccgagaugaacaagcucuucgagcgcaccaagaagcagcuccgcgagaacgccgaggacaugggcaacggcugcuucaagaucuaccacaagugcgacaacgccugcaucggcuccauccgcaacggcaccuacgaccacgacgucuaccgcgacgaggcccucaacaaccgcuuccagaucaagggcgucgagcucaaguccggcuacaaggacuggguccucuggaucuccuucgccaucuccugcuuccuccucugcaucguccuccucggcuucaucaugugggccugccagaagggcaacauccgcugcaacaucugcaucuga

SEQ ID NO: 96646 - RNA, 1701 nt, Artificial Sequence
  derived and/or modified CDS sequence (opt2) from hemagglutinin__InfluenzaA__ABC50376
augaagaccaucaucgcccucuccuacauccucugccucgucuucgcccagaagcuccccggcaacgacaacuccaccgccacccucugccucggccaccacgccguccccaacggcacccucgucaagaccaucaccaacgaccagaucgaggucaccaacgccaccgagcucguccaguccuccuccaccggccgcaucugcgacuccccccaccagauccucgacggcgagaacugcacccucaucgacgcccuccucggcgacccccacugcgacggcuuccagaacaaggagugggaccucuucgucgagcgcuccaaggccuacuccaacugcuaccccuacgacguccccgacuacgucucccuccgcucccucgucgccuccuccggcacccucgaguucaacaacgaguccuucaacuggaccggcgucgcccagaacggcaccuccuccgccugcaagcgccgcuccgacaaguccuucuucucccgccucaacuggcuccaccagcucaaguacaaguaccccgcccucaacgucaccaugcccaacaacgagaaguucgacaagcucuacaucuggggcguccaccaccccggcaccgacuccgaccagaucucccucuacgcccaggccuccggccgcgucaccgucuccaccaagcgcucccagcagaccgucauccccaacaccggcucccgccccuggguccgcggcgucuccucccgcaucuccaucuacuggaccaucgucaagcccggcgacauccuccucaucaacuccaccggcaaccucaucgccccccgcggcuacuucaagauccgcuccggcaaguccuccaucaugcgcuccgacgcccccaucggcaagugcaacuccgagugcaucacccccaacggcuccauccccaacgacaagcccuuccagaacgucaaccgcaucaccuacggcgccugcccccgcuacgucaagcagaacacccucaagcucgccaccggcaugcgcaacguccccgagaagcagacccgcggcaucuucggcgccaucgccggcuucaucgagaacggcugggagggcaugauggacggcugguacggcuuccgccaccagaacuccgagggcaccggccaggccgccgaccucaaguccacccaggccgccaucaaccagaucaacggcaagcucaaccgccucaucgagaagaccaacgagaaguuccaccagaucgagaaggaguucuccgaggucgagggccgcauccaggaccucgagaaguacgucgaggacaccaagaucgaccucugguccuacaacgccgagcuccucgucgcccucgagaaccagcacaccaucgaccucaccgacuccgagaugaacaagcucuucgagcgcaccaagaagcagcuccgcgagaacgccgaggacaugggcaacggcugcuucaagaucuaccacaagugcgacaacgccugcaucggcuccauccgcaacggcaccuacgaccacgacgucuaccgcgacgaggcccucaacaaccgcuuccagaucaagggcgucgagcucaaguccggcuacaaggacuggguccucuggaucuccuucgccaucuccugcuuccuccucugcaucguccuccucggcuucaucaugugggccugccagaagggcaacauccgcugcaacaucugcaucuga

SEQ ID NO: 96647 - RNA, 1701 nt, Artificial Sequence
  derived and/or modified CDS sequence (opt2) from hemagglutinin__InfluenzaA__ABC50387
augaagaccaucaucgcccucuccuacauccucugccucgucuucgcccagaagcuccccggcaacgacaacuccaccgccacccucugccucggccaccacgccguccccaacggcacccucgucaagaccaucaccaacgaccagaucgaggucaccaacgccaccgagcucguccaguccuccuccaccggccgcaucugcgacuccccccaccagauccucgacggcgagaacugcacccucaucgacgcccuccucggcgacccccacugcgacggcuuccagaacaaggagugggaccucuucgucgagcgcuccaaggccuacuccaacugcuaccccuacgacguccccgacuacgucucccuccgcucccucgucgccuccuccggcacccucgaguucaacaacgaguccuucaacuggaccggcgucgcccagaacggcaccuccuccgccugcaagcgccgcuccgacaaguccuucuucucccgccucaacuggcuccaccagcucaaguacaaguaccccgcccucaacgucaccaugcccaacaacgagaaguucgacaagcucuacgucuggggcguccaccaccccggcaccgacuccgaccagaucucccucuacgcccaggccuccggccgcgucaccgucuccaccaagcgcucccagcagaccgucauccccaacaucggcucccgccccuggguccgcggcgucuccucccgcaucuccaucuacuggaccaucgucaagcccggcgacauccuccucaucaacuccaccggcaaccucaucgccccccgcggcuacuucaagauccgcuccggcaaguccuccaucaugcgcuccgacgcccccaucggcaagugcaacuccgagugcaucacccccaacggcuccauccccaacgacaagcccuuccagaacgucaaccgcaucaccuacggcgccugcccccgcuacgucaagcagaacacccucaagcucgccaccggcaugcgcaacguccccgagaagcagacccgcggcaucuucggcgccaucgccggcuucaucgagaacggcugggagggcaugauggacggcugguacggcuuccgccaccagaacuccgagggcaccggccaggccgccgaccucaaguccacccaggccgccaucaaccagaucaacggcaagcucaaccgccucaucgagaagaccaacgagaaguuccaccagaucgagaaggaguucuccgaggucgagggccgcauccaggaccucgagaaguacgucgaggacaccaagaucgaccucugguccuacaacgccgagcuccucgucgcccucgagaaccagcacaccaucgaccucaccgacuccgagaugaacaagcucuucgagcgcaccaagaagcagcuccgcgagaacgccgaggacaugggcaacggcugcuucaagaucuaccacaagugcgacaacgccugcaucggcuccauccgcaacggcaccuacgaccacgacgucuaccgcgacgaggcccucaacaaccgcuuccagaucaagggcgucgagcucaaguccggcuacaaggacuggguccucuggaucuccuucgccaucuccugcuuccuccucugcaucguccuccucggcuucaucaugugggccugccagaagggcaacauccgcugcaacaucugcaucuga

SEQ ID NO: 96648 - RNA, 1701 nt, Artificial Sequence
  derived and/or modified CDS sequence (opt2) from hemagglutinin__InfluenzaA__ABC50409
augaagaccaucaucgcccucuccuacauccucugccucgucuucgcccagaagcuccccggcaacgacaacuccaccgccacccucugccucggccaccacgccguccccaacggcaccaucgucaagaccaucaccaacgaccagaucgaggucaccaacgccaccgagcucguccaguccuccuccaccggcggcaucugcgacuccccccaccagauccucgacggcgagaacugcacccucaucgacgcccuccucggcgacccccagugcgacggcuuccagaacaagaagugggaccucuucgucgagcgcuccaaggccuacuccaacugcuaccccuacgacguccccgacuacgucucccuccgcucccucgucgccuccuccggcacccucgaguucaacaacgaguccuucaacuggaccggcgucacccagaacggcaccuccuccgccugcaagcgccgcuccaacaacuccuucuucucccgccucaacuggcucacccaccucaaguucaaguaccccgcccucaacgucaccaugcccaacaacgagaaguucgacaagcucuacaucuggggcguccaccaccccggcaccgacaacgaccagaucucccucuacgcccaggccuccggccgcaucaccgucuccaccaagcgcucccagcagaccgucauccccaacaucggcucccgcccccgcguccgcgacauccccucccgcaucuccaucuacuggaccaucgucaagcccggcgacauccuccucaucaacuccaccggcaaccucaucgccccccgcggcuacuucaagauccgcuccggcaaguccuccaucaugcgcuccgacgcccccaucggcaagugcaacuccgagugcaucacccccaacggcuccauccccaacgacaagcccuuccagaacgucaaccgcaucaccuacggcgccugcccccgcuacgucaagcagaacacccucaagcucgccaccggcaugcgcaacguccccgagaagcagacccgcggcaucuucggcgccaucgccggcuucaucgagaacggcugggagggcauggucgacggcugguacggcuuccgccaccagaacuccgagggcaucggccaggccgccgaccucaaguccacccaggccgccaucaaccagaucaacggcaagcucaaccgccucaucggcaagaccaacgagaaguuccaccagaucgagaaggaguucuccgaggucgagggccgcauccaggaccucgagaaguacgucgaggacaccaagaucgaccucugguccuacaacgccgagcuccucgucgcccucgagaaccagcacaccaucgaccucaccgacuccgagaugaacaagcucuucgagcgcaccaagaagcagcuccgcgagaacgccgaggacaugggcaacggcugcuucaagaucuaccacaagugcgacaacgccugcaucggcuccauccgcaacggcaccuacgaccacgacgucuaccgcgacgaggcccucaacaaccgcuuccagaucaagggcgucgagcucaaguccggcuacaaggacuggauccucuggaucuccuucgccaucuccugcuuccuccucugcgucgcccuccucggcuucaucaugugggccugccagaagggcaacauccgcugcaacaucugcaucuga

SEQ ID NO: 96649 - RNA, 1701 nt, Artificial Sequence; identical to SEQ ID NO: 96648
  derived and/or modified CDS sequence (opt2) from hemagglutinin__InfluenzaA__ABC50420

SEQ ID NO: 96650 - RNA, 1701 nt, Artificial Sequence
  derived and/or modified CDS sequence (opt2) from hemagglutinin__InfluenzaA__ABC54668
augaagaccaucaucgcccucuccuacauccucugccucgucuucgcccagaagcuccccggcaacgacaacuccaccgccacccucugccucggccaccacgccguccccaacggcacccucgucaagaccaucaccaacgaccagaucgaggucaccaacgccaccgagcucguccaguccuccuccaccggccgcaucugcgacuccccccaccagauccucgacggcgagaacugcacccucaucgacgcccuccucggcgacccccacugcgacggcuuccagaacaaggagugggaccucuucgucgagcgcuccaaggccuacuccaacugcuaccccuacgacguccccgacuacgccucccuccgcucccucgucgccuccuccggcacccucgaguucaacaacgaguccuucaacuggaccggcgucgcccagaacggcaccuccuccgccugcaagcgccgcuccaacaaguccuucuucucccgccucaacuggcuccaccagcucaaguacaaguaccccgcccucaacgucaccaugcccaacaacgagaaguucgacaagcucuacaucuggggcguccaccaccccuccaccgacuccgaccagaucucccucuacgcccaggccuccggccgcgucaccgucuccaccaagcgcucccagcagaccgucauccccaacaucggcuccggccccuggguccgcggcgucuccucccgcaucuccaucuacuggaccaucgucaagcccggcgacauccuccucaucaacuccaccggcaaccucaucgccccccgcggcuacuucaagauccgcuccggcaaguccuccaucaugcgcuccgacgcccccaucggcaagugcaacuccgagugcaucacccccaacggcucccuccccaacgacaagcccuuccagaacgucaaccgcaucaccuacggcgccugcccccgcuacgucaagcagaacacccucaagcucgccaccggcaugcgcaacguccccgagaagcagacccgcggcaucuucggcgccaucgccggcuucaucgagaacggcugggagggcauggucgacggcugguacggcuuccgccaccagaacuccgagggcaccggccaggccgccgaccucaaguccacccaggccgccaucaaccagaucaacggcaagcucaaccgccucaucgagaagaccaacgagaaguuccaccagaucgagaaggaguucuccgaggucgagggccgcauccaggaccucgagaaguacgucgaggacaccaagaucgaccucugguccuacaacgccgagcuccucgucgcccucgagaaccagcacaccaucgaccucaccgacuccgagaugaacaagcucuucgagcgcaccaagaagcagcuccgcgagaacgccgaggacaugggcaacggcugcuucaagaucuaccacaagugcgacaacgccugcaucggcuccauccgcaacggcaccuacgaccacgacgucuaccgcgacgaggcccucaacaaccgcuuccagaucaagggcgucgagcucaaguccggcuacaaggacuggauccucuggaucuccuucgccaucuccugcuuccuccucugcgucguccuccucggcuucaucaugugggccugccagaagggcaacauccgcugcaacaucugcaucuga

SEQ ID NO: 96651 - RNA, 1701 nt, Artificial Sequence
  derived and/or modified CDS sequence (opt2) from hemagglutinin__InfluenzaA__ABC54679
augaagaccaucaucgcccucuccuacauccucugccucgucuucgcccagaagcuccccggcaacgacaacuccaccgccacccucugccucggccaccacgccguccccaacggcaccaucgucaagaccaucaccaacgaccagaucgaggucaccaacgccaccgagcucguccaguccucccccaccggcggcaucugcgacuccccccaccagauccucgacggcgagaacugcacccucaucgacgcccuccucggcgacccccagugcgacggcuuccagaacaagaagugggaccucuucaucgagcgcuccaaggccuacuccaacugcuaccccuacgacguccccgacuacgccucccuccgcucccucgucgccuccuccggcacccucgaguucaacaacgaguccuucaacuggaccggcgucacccagaacggcaccuccuccgccugcaagcgccgcuccaacaacuccuucuucucccgccucaacuggcucacccaccucaaguucaaguaccccgcccucaacgucaccaugcccaacaacgagaaguucgacaagcucuacaucuggggcguccaccaccccggcaccgacaacgaccagaucucccucuacgcccaggccuccggccgcaucaccgucuccaccaagcgcucccagcagaccgucauccccaacgucggcucccgcccccgcguccgcgacauccccucccgcaucuccaucuacuggaccaucgucaagcccggcgacauccuccucaucaacuccaccggcaaccucaucgccccccgcggcuacuucaagauccgcuccggcaaguccuccaucaugcgcuccgacgcccccaucggcaagugcaacuccgagugcaucacccccaacggcuccauccccaacgacaagcccuuccagaacgucaaccgcaucaccuacggcgccugcccccgcuacgucaagcagaacacccucaagcucgccaccggcaugcgcaacguccccgagaagcagacccgcggcaucuucggcgccaucgccggcuucaucgagaacggcugggagggcauggucgacggcugguacggcuuccgccaccagaacuccgagggcaucggccaggccgccgaccucaaguccacccaggccgccaucaaccagaucaacggcaagcucaaccgccucaucggcaagaccaacgagaaguuccaccagaucgagaaggaguucuccgaggucgagggccgcauccaggaccucgagaaguacgucgaggacaccaagaucgaccucugguccuacaacgccgagcuccucgucgcccucgagaaccagcacaccaucgaccucaccgacuccgagaugaacaagcucuucgagcgcaccaagaagcagcuccgcgagaacgccgaggacaugggcaacggcugcuucaagaucuaccacaagugcgacaacgccugcaucggcuccauccgcaacggcaccuacgaccacgacgucuaccgcgacgaggcccucaacaaccgcuuccagaucaagggcgucgagcucaaguccggcuacaaggacuggauccucuggaucuccuucgccaucuccugcuuccuccucugcgucgcccuccucggcuucaucaugugggccugccagaagggcaacauccgcugcaacaucugcaucuga

SEQ ID NO: 96652 - RNA, 1701 nt, Artificial Sequence; identical to SEQ ID NO: 96552
  derived and/or modified CDS sequence (opt2) from hemagglutinin__InfluenzaA__ABC67319

SEQ ID NO: 96653 - RNA, 1701 nt, Artificial Sequence
  derived and/or modified CDS sequence (opt2) from hemagglutinin__InfluenzaA__ABC67454
augaagaccaucaucgcccucuccuacauccucugccucgucuucgcccaggagcuccccggcaacgacaacuccaccgccacccucugccucggccaccacgccguccccaacggcacccucgucaagaccaucaccaacgaccagaucgaggucaccaacgccaccgagcucguccaguccuccuccaccggccgcaucugcgacuccccccaccagauccucgacggcgagaacugcacccucaucgacgcccuccucggcgacccccacugcgacggcuuccagaacaaggagugggaccucuucgucgagcgcuccaaggccuacuccaacugcuaccccuacgacguccccgacuacgucucccuccgcucccucgucgccuccuccggcacccucgaguucaacaacgaguccuucaacuggaccggcgucgcccagaacggcaccuccuccgccugcaagcgccgcuccgacaaguccuucuucucccgccucaacuggcuccaccagcucaaguacaaguaccccgcccucaacgucaccaugcccaacaacgagaaguucgacaagcucuacaucuggggcguccaccaccccggcaccgacuccgaccagaucucccucuacgcccaggccuccggccgcgucaccgucuccaccaagcgcucccagcagaccgucauccccaacaucggcucccgccccuggguccgcggcgucuccucccgcaucuccaucuacuggaccaucgucaagcccggcgacauccuccucaucaacuccaccggcaaccucaucgccccccgcggcuacuucaagauccgcuccggcaaguccuccaucaugcgcuccgacgcccccaucggcaagugcaacuccgagugcaucacccccaacggcuccauccccaacgacaagcccuuccagaacgucaaccgcaucaccuacggcgccugcccccgcuacgucaagcagaacacccucaagcucgccaccggcaugcgcaacguccccgagaagcagacccgcggcaucuucggcgccaucgccggcuucaucgagaacggcugggagggcaugauggacggcugguacggcuuccgccaccagaacuccgagggcaccggccaggccgccgaccucaaguccacccaggccgccaucaaccagaucaacggcaagcucaaccgccucaucgagaagaccaacgagaaguuccaccagaucgagaaggaguucuccgaggucgagggccgcauccaggaccucgagaaguacgucgaggacaccaagaucgaccucugguccuacaacgccgagcuccucgucgcccucgagaaccagcacaccaucgaccucaccgacuccgagaugaacaagcucuucgagcgcaccaagaagcagcuccgcgagaacgccgaggacaugggcaacggcugcuucaagaucuaccacaagugcgacaacgccugcaucggcuccauccgcaacggcaccuacgaccacgacgucuaccgcgacgaggcccucaacaaccgcuuccagaucaagggcgucgagcucaaguccggcuacaaggacuggguccucuggaucuccuucgccaucuccugcuuccuccucugcaucguccuccucggcuucaucaugugggccugccagaagggcaacauccgcugcaacaucugcaucuga

SEQ ID NO: 96654 - RNA, 1701 nt, Artificial Sequence; identical to SEQ ID NO: 96598
  derived and/or modified CDS sequence (opt2) from hemagglutinin__InfluenzaA__ABC67471

SEQ ID NO: 96655 - RNA, 1701 nt, Artificial Sequence
  derived and/or modified CDS sequence (opt2) from hemagglutinin__InfluenzaA__ABC67554
augaagaccaucaucgcccucuccuacauccucugccucgucuucgcccagaagcuccccggcaacgacaacuccaccgccacccucugccucggccaccacgccguccccaacggcaccaucgucaagaccaucaccaacgaccagaucgaggucaccaacgccaccgagcucguccaguccuccuccaccggcggcaucugcgacuccccccaccagauccucgacggcgagaacugcacccucaucgacgcccuccucggcgacccccagugcgacggcuuccagaacaagaagugggaccucuucgucgagcgcuccaaggccuacuccaacugcuaccccuacgacguccccgacuacgccucccuccgcucccucaucgccuccuccggcacccucgaguucaacaacgaguccuucaacuggaccggcgucacccagaacggcaccuccuccgccugcaagcgccgcuccaacuccuccuucuucucccgccucaacuggcucacccaccucaaguucaaguaccccgcccucaacgucaccaugcccaacaacgaggaguucgacaagcucuacaucuggggcguccaccaccccggcaccgacaacgaccagaucucccucuacgcccaggccuccggccgcaucaccgucuccaccaagcgcucccagcagaccgucauccccaacaucggcucccgcccccgcguccgcgacauccccucccgcaucuccaucuacuggaccaucgucaagcccggcgacauccuccucaucaacuccaccggcaaccucaucgccccccgcggcuacuucaagauccgcuccggcaaguccuccaucaugcgcuccgacgcccccaucgucaagugcaacuccgagugcaucacccccaacggcuccauccccaacgacaagcccuuccagaacgucaaccgcaucaccuacggcgccugcccccgcuacgucaagcagaacacccucaagcucgccaccggcaugcgcaacguccccgagaagcagacccgcggcaucuucggcgccaucgccggcuucaucgagaacggcugggagggcauggucgacggcugguacggcuuccgccaccagaacuccgagggcaucggccaggccgccgaccucaaguccacccaggccgccaucgaccagaucaacggcaagcucaaccgccucaucggcaagaccaacgagaaguuccaccagaucgagaaggaguucuccgaggucgagggccgcauccaggaccucgagaaguacgucgaggacaccaagaucgaccucugguccuacaacgccgagcuccucgucgcccucgagaaccagcacaccaucgaccucaccgacuccgagaugaacaagcucuucgagcgcaccaagaagcagcuccgcgagaacgccgaggacaugggcaacggcugcuucaagaucuaccacaagugcgacaacgccugcaucggcuccauccgcaacggcaccuacgaccacgacgucuaccgcgacgaggcccucaacaaccgcuuccagaucaagggcgucgagcucaaguccggcuacaaggacuggauccucuggaucuccuucgccaucuccugcuuccuccucugcgucgcccuccucggcuucaucaugugggccugccagaagggcaacauccgcugcaacaucugcaucuga

SEQ ID NO: 96656 - RNA, 1701 nt, Artificial Sequence
  derived and/or modified CDS sequence (opt2) from hemagglutinin__InfluenzaA__ABC67565
augaagaccaucaucgcccucuccuacaucuucugccucguccucggccaggacuuccccggcaacgacaacuccaccgccacccucugccucggccaccacgccguccccaacggcacccucgucaagaccaucaccaacgaccagaucgaggucaccaacgccaccgagcucguccaguccuccuccaccggcaagaucugcaacaacccccaccgcauccucgacggcaucgacugcacccucaucgacgcccuccucggcgacccccacugcgacggcuuccagaacgagaccugggaccucuucgucgagcgcuccaaggccuucuccaacugcuaccccuacgacguccccgacuacgccucccuccgcucccucgucgccuccuccggcacccucgaguucaucaacgagggcuucaccuggaccggcgucacccagaacggcggcuccaacgccugcaagcgcggccccgacaucggcuucuucucccgccucaacuggcucuacaaguccggcuccaccuaccccguccucaacgucaccaugcccaacaacgacaacuucgacaagcucuacaucuggggcguccaccaccccuccaccgaccaggagcagaccucccucuacguccaggccuccggccgcgucaccgucuccaccaagcgcucccagcagaccaucauccccaacaucggcucccgccccuggguccgcggccucuccucccgcaucuccaucuacuggaccaucgucaagcccggcgacauccucgucaucaacuccaacggcaaccucaucgccccccgcggcuacuucaagaugcgcaccggcaaguccuccaucaugcgcuccgacgcccccaucggcaccugcaucuccgagugcaucacccccaacggcuccauccccaacgacaagcccuuccagaacgucaacaagaucaccuacggcgccugccccaaguacgucaagcagaacacccucaagcucgccaccggcaugcgcaacguccccgagaagcagacccgcggccucuucggcgccaucgccggcuucaucgagaacggcugggagggcaugaucgacggcugguacggcuuccgccaccagaacuccgagggcaccggccaggccgccgaccucaaguccacccaggccgccaucgaccagaucaacggcaagcucaaccgcgucaucgagaagaccaacgagaaguuccaccagaucgagaaggaguucuccgaggucgagggccgcauccaggaccucgagaaguacgucgaggacaccaagaucgaccucugguccuacaacgccgagcuccucgucgcccucgagaaccagcacaccaucgaccucaccgacuccgagaugaacaagcucuucgagaagacccgccgccagcuccgcgagaacgccgaggacaugggcaacggcugcuucaagaucuaccacaagugcgacaacgccugcaucggcuccauccgcaacggcaccuacgaccacgacgucuaccgcgacgaggcccucaacaaccgcuuccagaucaagggcgucgagcucaaguccggcuacaaggacuggauccucuggaucuccuucgccaucuccugcuuccuccucugcgucguccuccucggcuucaucaugugggccugccagaagggcaacauccgcugcaacaucugcaucuga

SEQ ID NO: 96657 - RNA, 1701 nt, Artificial Sequence
  derived and/or modified CDS sequence (opt2) from hemagglutinin__InfluenzaA__ABC67576
augaagaccaucaucgcccucuccuacauccucugccucgucuucgcccagaagcuccccggcaacgacaacuccauggccacccucugccucggccaccacgccguccccaacggcacccucgucaagaccaucaccaacgaccagaucgaggucaccaacgccaccgagcucguccaguccuccuccaccggccgcaucugcgacuccccccaccgcauccucgacggcgagaacugcacccucaucgacgcccuccucggcgacccccacugcgacggcuuccagaacaaggagugggaccucuucgucgagcgcuccaaggccuacuccaacugcuaccccuacgacguccccgacuacgccucccuccgcucccucgucgccuccuccggcacccucgaguucaacaacgaguccuucaacuggaccggcgucgcccagaacggcaccuccuacgccugcaagcgccgcuccaucaaguccuucuucucccgccucaacuggcuccaccagcucaaguacaaguaccccgcccucaacgucaccaugcccaacaacgacgaguucgacaagcucuacaucuggggcguccaccaccccuccaccgacuccgaccagaccucccucuacgcccaggccuccggccgcgucaccgucuccaccaagcgcucccagcagaccgucauccccaacaucggcucccgccccuggguccgcggcgucuccucccgcaucuccaucuacuggaccaucgucaagcccggcgacauccuccucaucaacuccaccggcaaccucaucgccccccgcggcuacuucaagauccgcuccggcaaguccuccaucaugcgcuccgacgcccccaucggcaagugcaacuccgagugcaucacccccaacggcuccauccccaacgacaagcccuuccagaacgucaaccgcaucaccuacggcgccugcccccgcuacgucaagcagaacacccucaagcucgccaccggcaugcgcaacguccccgagaagcagacccgcggcaucuucggcgccaucgccggcuucaucgagaacggcugggagggcauggucgacggcugguacggcuuccgccaccagaacuccgagggcaccggccaggccgccgaccucaaguccacccaggccgccaucaaccagaucaacggcaagcucaaccgccucaucgagaagaccaacgagaaguuccaccagaucgagaaggaguucuccgaggucgagggccgcauccaggaccucgagaaguacgucgaggacaccaagaucgaccucugguccuacaacgccgagcuccucgucgcccucgagaaccagcacaccaucgaccucaccgacuccgagaugaacaagcucuucgagcgcacccgcaagcagcuccgcgagaacgccgaggacaugggcaacggcugcuucaagaucuaccacaagugcgacaacgccugcaucggcuccauccgcaacggcaccuacgaccacgacgucuaccgcgacgaggcccucaacaaccgcuuccagaucaagggcgucgagcucaaguccggcuacaaggacuggauccucuggaucuccuucgccaucuccugcuuccuccucugcgucguccuccucggcuucaucaugugggccugccagaagggcaacauccgcugcaacaucugcaucuga

SEQ ID NO: 96658 - RNA, 1701 nt, Artificial Sequence
  derived and/or modified CDS sequence (opt2) from hemagglutinin__InfluenzaA__ABC67587
augaagaccaucaucgcccucuccuacauccucugccucgucuucgcccagaagcuccccggcaacgacaacuccaccgccacccucugccucggccaccacgccguccccaacggcaccaucgucaagaccaucaccaacgaccagaucgaggucaccaacgccaccgagcucguccaguccuccuccaccggcggcaucugcgacuccccccaccagauccucgacggcgagaacugcacccucaucgacgcccuccucggcgacccccagugcgacggcuuccagaacaagaagugggaccucuucgucgagcgcuccaaggccuacuccaacugcuaccccuacgacguccccgacuacgccucccuccgcucccucgucgccuccuccggcacccucgaguucaacaacgaguccuucaacuggaccggcgucacccagaacggcaccuccuccgccugcaagcgccgcuccaacaacuccuucuucucccgccucaacuggcucacccaccucaaguucaaguaccccgcccucaacgucaccaugcccaacaacgagaaguucgacaagcucuacaucuggggcguccaccaccccggcaccgacaacgaccagaucucccucuacgcccaggccuccggccgcaucaccgucuccaccaagcgcucccagcagaccgucauccccaacaucggcucccgcccccgcguccgcgacauccccucccgcaucuccaucuacuggaccaucgucaagcccggcgacauccuccucaucaacuccaccggcaaccucaucgccccccgcggcuacuucaagauccgcuccggcaaguccuccaucaugcgcuccgacgcccccaucggcaagugcaacuccgagugcaucacccccaacggcuccauccccaacgacaagcccuuccagaacgucaaccgcaucaccuacggccccugcccccgcuacgucaagcagaacacccucaagcucgccaccggcaugcgcaacguccccgagaagcagacccgcggcaucuucggcgccaucgccggcuucaucgagaacggcugggagggcauggucgacggcugguacggcuuccgccaccagaacuccgagggcaucggccaggccgccgaccucaaguccacccaggccgccaucaaccagaucaacggcaagcucaaccgccucaucggcaagaccaacgagaaguuccaccagaucgagaaggaguucuccgaggucgagggccgcauccaggaccucgagaaguacgucgaggacaccaagaucgaccucugguccuacaacgccgagcuccucgucgcccucgagaaccagcacaccaucgaccucaccgacuccgagaugaacaagcucuucgagcgcaccaagaagcagcuccgcgagaacgccgaggacaugggcaacggcugcuucaagaucuaccacaagugcgacaacgccugcaucggcuccauccgcaacggcaccuacgaccacgacgucuaccgcgacgaggcccucaacaaccgcuuccagaucaagggcgucgagcucaaguccggcuacaaggacuggauccucuggaucuccuucgccaucuccugcuuccuccucugcgucgcccuccucggcuucaucaugugggccugccagaagggcaacauccgcugcaacaucugcaucuga

SEQ ID NO: 96659 - RNA, 1701 nt, Artificial Sequence; identical to SEQ ID NO: 96279
  derived and/or modified CDS sequence (opt2) from hemagglutinin__InfluenzaA__ABC67598

SEQ ID NO: 96660 - RNA, 1701 nt, Artificial Sequence; identical to SEQ ID NO: 96598
  derived and/or modified CDS sequence (opt2) from hemagglutinin__InfluenzaA__ABC67609

SEQ ID NO: 96661 - RNA, 1701 nt, Artificial Sequence; identical to SEQ ID NO: 96598
  derived and/or modified CDS sequence (opt2) from hemagglutinin__InfluenzaA__ABC67620

SEQ ID NO: 96662 - RNA, 1701 nt, Artificial Sequence; identical to SEQ ID NO: 96598
  derived and/or modified CDS sequence (opt2) from hemagglutinin__InfluenzaA__ABC67631

SEQ ID NO: 96663 - RNA, 1701 nt, Artificial Sequence; identical to SEQ ID NO: 96598
  derived and/or modified CDS sequence (opt2) from hemagglutinin__InfluenzaA__ABC67642

SEQ ID NO: 96664 - RNA, 1701 nt, Artificial Sequence
  derived and/or modified CDS sequence (opt2) from hemagglutinin__InfluenzaA__ABC67653
augaagaccaucaucgcccucuccuacauccucugccucgucuucgcccagaagcuccccggcaacgacaacuccaccgccacccucugccucggccaccacgccguccccaacggcacccucgucaagaccaucaccaacgaccagaucgaggucaccaacgccaccgagcucguccaguccuccuccaccggccgcaucugcgacuccccccaccagauccucgacggcgagaacugcacccucaucgacgcccuccucggcgacccccacugcgacggcuuccagaacaaggagugggaccucuucgucgagcgcuccaaggccuacuccaacugcuaccccuacgacguccccgacuacgucucccuccgcucccucgucgccuccuccggcacccucgaguucaacaacgaguccuucaacuggaccggcgucgcccagaacggcaccuccuccgccugcaagcgccgcuccgacaaguccuucuucucccgccucaacuggcuccaccagcucaaguacaaguaccccgcccucaacgucaccaugcccaacaacgagaaguucgacaagcucuacaucuggggcguccaccaccccggcaccgacuccgaccagaucucccucuacgcccaggccuccggccgcgucaccgucuccaccaagcgcucccagcagaccgucauccccaacaucggcucccgccccuggguccgcggcgucuccucccgcaucuccaucuacuggaccaucgucaagcccggcgacauccuccucaucaacuccaccggcaaccucaucgccccccgcggcuacuucaagauccgcuccggcaaguccuccaucaugcgcuccgacgcccccaucggcaagugcaacuccgagugcaucacccccaacggcuccauccccaacgacaagcccuuccagaacgucaaccgcaucaccuacggcgccugcccccgcuacgucaagcagaacacccucaagcucgccaccggcaugcgcaacguccccgagaagcagacccgcggcaucuucggcgccaucgccggcuucaucgagaacggcugggagggcaugauggacggcugguacggcuuccgccaccagaacuccgagggcaccggccaggccgccgaccucaaguccacccaggccgccaucaaccagaucaacggcaagcucaaccgccucaucgagaagaccaacgagaaguuccaccagaucgagaaggaguucuccgaggucgagggccgcauccaggaccucgagaaguacgucgaggacaccaagaucgaccucugguccuacaacgccgagcuccucgucgcccucgagaaccagcacaccaucgaccucaccgacuccgagaugaacaagcucuucgagcgcaccaagaagcagcuccgcgagaacgccgaggacaugggcaacggcugcuucaagaucuaccacaagugcgacaacgccugcaucggcuccauccgcaacggcaccuacgaccacgacgucuaccgcgacgaggcccucaacaaccgcuuccagaucaagggcgucgagcucaaguccggcuacaaggacuggguccucuggaucuccuucgccaucuccugcuuccuccucugcgucguccuccucggcuucaucaugugggccugccagaagggcaacauccgcugcaacaucugcaucuga

SEQ ID NO: 96665 - RNA, 1701 nt, Artificial Sequence
  derived and/or modified CDS sequence (opt2) from hemagglutinin__InfluenzaA__ABC67697
augaagaccaucaucgcccucuccuacauccucugccucgucuucgcccagaagcuccccggcaacgacaacuccaccgccacccucugccucggccaccacgccguccccaacggcaccaucgucaagaccaucaccaacgaccagaucgaggucaccaacgccaccgagcucguccaguccuccuccaccggcgagaucugcgacuccccccaccagauccucgacggcgagaacugcacccucaucgacgcccuccucggcgacccccagugcgacggcuuccagaacaaggagugggaccucuucgucgagcgcuccaaggccuacuccaacugcuaccccuacgacguccccgacuacgccucccuccgcucccucgucgccuccuccggcacccucgaguucaacaacgaguccuucaacuggaccggcgucacccagaacggcaccuccuccgccugcaagcgccgcuccaacaacuccuucuucucccgccucaacuggcucacccaccucaaguucaaguaccccgcccucaacgucaccaugcccaacaacgagaaguucgacaagcucuacaucuggggcguccaccaccccggcaccgacaacgaccagaucuuccucuacgcccaggccuccggccgcaucaccgucuccaccaagcgcucccagcagaccgucauccccaacaucggcucccgcccccgcguccgcaacauccccucccgcaucuccaucuacuggaccaucgucaagcccggcgacauccuccucaucaacuccaccggcaaccucaucgccccccgcggcuacuucaagauccgcuccggcaaguccuccaucaugcgcuccgacgcccccaucggcaagugcaacuccgagugcaucacccccaacggcuccauccccaacgacaagcccuuccagaacgucaaccgcaucaccuacggcgccugcccccgcuacgucaagcagaacacccucaagcucgccaccggcaugcgcaacguccccgagaagcagacccgcggcaucuucggcgccaucgccggcuucaucgagaacggcugggagggcauggucgacggcugguacggcuuccgccaccagaacuccgagggcaucggccaggccgccgaccucaaguccacccaggccgccaucaaccagaucaacggcaagcucaaccgccucaucggcaagaccaacgagaaguuccaccagaucgagaaggaguucuccgaggucgagggccgcauccaggaccucgagaaguacgucgaggacaccaagaucgaccucugguccuacaacgccgagcuccucgucgcccucgagaaccagcacaccaucgaccucaccgacuccgagaugaacaagcucuucgagcgcaccaagaagcagcuccgcgagaacgccgaggacaugggcaacggcugcuucaagaucuaccacaagugcgacaacgccugcaucggcuccauccgcaacggcaccuacgaccacgacgucuaccgcgacgaggcccucaacaaccgcuuccagaucaagggcgucgagcucaaguccggcuacaaggacuggauccucuggaucuccuucgccaucuccugcuuccuccucugcgucgcccuccucggcuucaucaugugggccugccagaagggcaacauccgcugcaacaucugcaucuga

SEQ ID NO: 96666 - RNA, 1701 nt, Artificial Sequence
  derived and/or modified CDS sequence (opt2) from hemagglutinin__InfluenzaA__ABC67708
augaagaccaucaucgcccucuccuacauccucugccucgucuucgcccagaagcuccccggcaacgacaacuccaccgccacccucugccucggccaccacgccguccccaacggcaccaucgucaagaccaucaccaacgaccagaucgaggucaccaacgccaccgagcucguccaguccuccuccaccggcggcaucugcgacuccccccaccagauccucgacggcgagaacugcacccucaucgacgcccuccucggcgacccccagugcgacggcuuccagaacaagaagugggaccucuucgucgagcgcuccaaggccuacuccaacugcuaccccuacgacguccccgacuacgccucccuccgcucccucgucgccuccuccggcacccucgaguucaacaacgaguccuucaacuggaccggcgucacccagaacggcaccuccuccgccugcaagcgccgcuccaacaacuccuucuucucccgccucaacuggcucacccaccucaaguucaaguaccccgcccucaacgucaccaugcccaacaacgagaaguucgacaagcucuacaucuggggcguccaccaccccggcaccgacaacgaccagaucuuccucuacgcccaggccuccggccgcaucaccgucuccaccaagcgcucccagcagaccgucauccccaacaucggcucccgcccccgcguccgcaacauccccucccgcaucuccaucuacuggaccaucgucaagcccggcgacauccuccucaucaacuccaccggcaaccucaucgccccccgcggcuacuucaagauccgcuccggcaaguccuccaucaugcgcuccgacgcccccaucggcaagugcaacuccgagugcaucacccccaacggcuccauccccaacgacaagcccuuccagaacgucaaccgcaucaccuacggcgccugcccccgcuacgucaagcagaacacccucaagcucgccaccggcaugcgcaacguccccgagaagcagacccgcggcaucuucggcgccaucgccggcuucaucgagaacggcugggagggcauggucgacggcugguacggcuuccgccaccagaacuccgagggcaucggccaggccgccgaccucaaguccacccaggccgccaucaaccagaucaacggcaagcucaaccgccucaucggcaagaccaacgagaaguuccaccagaucgagaaggaguucuccgaggucgagggccgcauccaggaccucgagaaguacgucgaggacaccaagaucgaccucugguccuacaacgccgagcuccucgucgcccucgagaaccagcacaccaucgaccucaccgacuccgagaugaacaagcucuucgagcgcaccaagaagcagcuccgcgagaacgccgaggacaugggcaacggcugcuucaagaucuaccacaagugcgacaacgccugcaucggcuccauccgcaacggcaccuacgaccacgacgucuaccgcgacgaggcccucaacaaccgcuuccagaucaagggcgucgagcucaaguccggcuacaaggacuggauccucuggaucuccuucgccaucuccugcuuccuccucugcgucgcccuccucggcuucaucaugugggccugccagaagggcaacauccgcugcaacaucugcaucuga

SEQ ID NO: 96667 - RNA, 1701 nt, Artificial Sequence; identical to SEQ ID NO: 96666
  derived and/or modified CDS sequence (opt2) from hemagglutinin__InfluenzaA__ABC67719

SEQ ID NO: 96668 - RNA, 1701 nt, Artificial Sequence; identical to SEQ ID NO: 96666
  derived and/or modified CDS sequence (opt2) from hemagglutinin__InfluenzaA__ABC67733

SEQ ID NO: 96669 - RNA, 1701 nt, Artificial Sequence
  derived and/or modified CDS sequence (opt2) from hemagglutinin__InfluenzaA__ABC67806
augaagaccaucaucgcccucuccuacauccucugccucgucuucgcccagaagcuccccggcaacgacaacuccaccgccacccucugccucggccaccacgccguccccaacggcaccaucgucaagaccaucaccaacgaccagaucgaggucaccaacgccaccgagcucguccaguccuccuccaccggcggcaucugcgacuccccccaccagauccucgacggcgagaacugcacccucaucgacgcccuccucggcgacccccagugcgacggcuuccagaacaagaagugggaccucuucgucgagcgcuccaaggccuacuccaacugcuaccccuacgacguccccgacuacgccucccuccgcucccucaucgccuccuccggcacccucgaguucaacaacgaguccuucaacuggaccggcgucacccagaacggcaccuccuccgccugcaagcgccgcuccaacuccuccuucuucucccgccucaacuggcucacccaccucaaguucaaguaccccgcccucaacgucaccaugcccaacaacgaggaguucgacaagcucuacaucuggggcguccaccaccccggcaccuacaacgaccagaucucccucuacgcccaggccuccggccgcaucaccgucuccaccaagcgcucccagcagaccgucauccccaacaucggcucccgcccccgcguccgcgacauccccucccgcaucuccaucuacuggaccaucgucaagcccggcgacauccuccucaucaacuccaccggcaaccucaucgccccccgcggcuacuucaagauccgcuccggcaaguccuccaucaugcgcuccgacgcccccaucggcaagugcaacuccgagugcaucacccccaacggcuccauccccaacgacaagcccuuccagaacgucaaccgcaucaccuacggcgccugcccccgcuacgucaagcagaacacccucaagcucgccaccggcaugcgcaacguccccgagaagcagacccgcggcaucuucggcgccaucgccggcuucaucgagaacggcugggagggcauggucgacggcugguacggcuuccgccaccagaacuccgagggcaucggccaggccgccgaccucaaguccacccaggccgccaucgaccagaucaacggcaagcucaaccgccucaucggcaagaccaacgagaaguuccaccagaucgagaaggaguucuccgaggucgagggccgcauccaggaccucgagaaguacgucgaggacaccaagaucgaccucugguccuacaacgccgagcuccucgucgcccucgagaaccagcacaccaucgaccucaccgacuccgagaugaacaagcucuucgagcgcaccaagaagcagcuccgcgagaacgccgaggacaugggcaacggcugcuucaagaucuaccacaagugcgacaacgccugcaucggcuccauccgcaacggcaccuacgaccacgacgucuaccgcgacgaggcccucaacaaccgcuuccagaucaagggcgucgagcucaaguccggcuacaaggacuggauccucuggaucuccuucgccaucuccugcuuccuccucugcgucgcccuccucggcuucaucaugugggccugccagaagggcaacauccgcugcaacaucugcaucuga

SEQ ID NO: 96670 - RNA, 1701 nt, Artificial Sequence; identical to SEQ ID NO: 96552
  derived and/or modified CDS sequence (opt2) from hemagglutinin__InfluenzaA__ABC67817

SEQ ID NO: 96671 - RNA, 1701 nt, Artificial Sequence; identical to SEQ ID NO: 96666
  derived and/or modified CDS sequence (opt2) from hemagglutinin__InfluenzaA__ABC67828

SEQ ID NO: 96672 - RNA, 1701 nt, Artificial Sequence; identical to SEQ ID NO: 96530
  derived and/or modified CDS sequence (opt2) from hemagglutinin__InfluenzaA__ABC67839

SEQ ID NO: 96673 - RNA, 1701 nt, Artificial Sequence
  derived and/or modified CDS sequence (opt2) from hemagglutinin__InfluenzaA__ABC67850
augaagaccaucaucgcccucuccuacauccucugccucgucuucgcccagaagcuccccggcaacgacaacuccaccgccacccucugccucggccaccacgccguccccaacggcacccucgucaagaccaucaccaacgaccagaucgaggucaccaacgccaccgagcucguccaguccuccuccaccggccgcaucugcgacuccccccaccagauccucgacggcgagaacugcacccucaucgacgcccuccucggcgacccccacugcgacggcuuccagaacaaggagugggaccucuucgucgagcgcuccaaggccuacuccaacugcuaccccuacgacguccccgacuacgucucccuccgcucccucgucgccuccuccggcacccucgaguucaacaacgaguccuucaacuggaccggcgucgcccagaacggcaccuccuccgccugcaagcgccgcuccgacaaguccuucuucucccgccucaacuggcuccaccagcucaaguacaaguaccccgcccucaacgucaccaugcccaacaacgagaaguucgacaagcucuacaucuggggcguccaccaccccggcaccgacuccgaccagaucucccucuacgcccaggccuccggccgcgucaccgucuccaccaagcgcucccagcagaccgucauccccaacaucggcucccgccccugggcccgcggcgucuccucccgcaucuccauccacuggaccaucgucaagcccggcgacauccuccucaucaacuccaccggcaaccucaucgccccccgcggcuacuucaagauccgcuccggcaaguccuccaucaugcgcuccgacgcccccaucggcaagugcaacuccgagugcaucacccccaacggcuccauccccaacgacaagcccuuccagaacgucaaccgcaucaccuacggcgccugcccccgcuacgucaagcagaacacccucaagcucgccaccggcaugcgcaacguccccgagaagcagacccgcggcaucuucggcgccaucgccggcuucaucgagaacggcugggagggcaugauggacggcugguacggcuuccgccaccagaacuccgagggcaccggccaggccgccgaccucaaguccacccaggccgccaucaaccagaucaacggcaagcucaaccgccucaucgagaagaccaacgagaaguuccaccagaucgagaaggaguucuccgaggucgagggccgcauccaggaccucgagaaguacgucgaggacaccaagaucgaccucugguccuacaacgccgagcuccucgucgcccucgagaaccagcacaccaucgaccucaccgacuccgagaugaacaagcucuucgagcgcaccaagaagcagcuccgcgagaacgccgaggacaugggcaacggcugcuucaagaucuaccacaagugcgacaacgccugcaucggcuccauccgcaacggcaccuacgaccacgacgucuaccgcgacgaggcccucaacaaccgcuuccagaucaagggcgucgagcucaaguccggcuacaaggacuggguccucuggaucuccuucgccaucuccugcuuccuccucugcaucguccuccucggcuucaucaugugggccugccagaagggcaacauccgcugcaacaucugcaucuga

SEQ ID NO: 96674 - RNA, 1701 nt, Artificial Sequence; identical to SEQ ID NO: 96530
  derived and/or modified CDS sequence (opt2) from hemagglutinin__InfluenzaA__ABC67861

SEQ ID NO: 96675 - RNA, 1701 nt, Artificial Sequence; identical to SEQ ID NO: 96598
  derived and/or modified CDS sequence (opt2) from hemagglutinin__InfluenzaA__ABC67883

SEQ ID NO: 96676 - RNA, 1701 nt, Artificial Sequence
  derived and/or modified CDS sequence (opt2) from hemagglutinin__InfluenzaA__ABC67894
augaagaccaucaucgcccucuccuacauccucugccucgucuucgcccagaagcuccccggcaacgacaacuccaccgccacccucugccucggccaccacgccguccccaacggcacccucgucaagaccaucaccaacgaccagaucgaggucaccaacgccaccgagcucguccaguccuccuccaccggccgcaucugcgacuccccccaccagauccucgacggcgagaacugcacccucaucgacgcccuccucggcgacccccacugcgacggcuuccagaacaaggagugggaccucuucgucgagcgcuccaaggccuacuccaacugcuaccccuacgacguccccgacuacgucucccuccgcucccucgucgccuccuccggcacccucgaguucaacaacgaguccuucaacuggaccggcgucgcccagaacggcaccuccuccgccugcaagcgccgcuccgacaaguccuucuucuccaagcucaacuggcuccaccagcucaaguacaaguaccccgcccucaacgucaccaugcccaacaacgagaaguucgacaagcucuacaucuggggcguccaccaccccggcaccgacuccgaccagaucucccucuacgcccaggccuccggccgcgucaccgucuccaccaagcgcucccagcagaccgucauccccaacaucggcucccgccccuggguccgcggcgucuccucccgcaucuccaucuacuggaccaucgucaagcccggcgacauccuccucaucaacuccaccggcaaccucaucgccccccgcggcuacuucaagauccgcuccggcaaguccuccaucaugcgcuccgacgcccccaucggcaagugcaacuccgagugcaucacccccaacggcuccauccccaacgacaagcccuuccagaacgucaaccgcaucaccuacggcgccugcccccgcuacgucaagcagaacacccucaagcucgccaccggcaugcgcaacguccccgagaagcagacccgcggcaucuucggcgccaucgccggcuucaucgagaacggcugggagggcaugauggacggcugguacggcuuccgccaccagaacuccgagggcaccggccaggccgccgaccucaaguccacccaggccgccaucaaccagaucaacggcaagcucaaccgccucaucgagaagaccaacgagaaguuccaccagaucgagaaggaguucuccgaggucgagggccgcauccaggaccucgagaaguacgucgaggacaccaagaucgaccucugguccuacaacgccgagcuccucgucgcccucgagaaccagcacaccaucgaccucaccgacuccgagaugaacaagcucuucgagcgcaccaagaagcagcuccgcgagaacgccgaggacaugggcaacggcugcuucaagaucuaccacaagugcgacaacgccugcaucggcuccauccgcaacggcaccuacgaccacgacgucuaccgcgacgaggcccucaacaaccgcuuccagaucaagggcgucgagcucaaguccggcuacaaggacuggguccucuggaucuccuucgccaucuccugcuuccuccucugcaucguccuccucggcuucaucaugugggccugccagaagggcaacauccgcugcaacaucugcaucuga

SEQ ID NO: 96677 - RNA, 1701 nt, Artificial Sequence; identical to SEQ ID NO: 96598
  derived and/or modified CDS sequence (opt2) from hemagglutinin__InfluenzaA__ABC67967

SEQ ID NO: 96678 - RNA, 1701 nt, Artificial Sequence; identical to SEQ ID NO: 96598
  derived and/or modified CDS sequence (opt2) from hemagglutinin__InfluenzaA__ABC67978

SEQ ID NO: 96679 - RNA, 1701 nt, Artificial Sequence
  derived and/or modified CDS sequence (opt2) from hemagglutinin__InfluenzaA__ABC67989
augaagaccaucaucgcccucuccuacauccucugccucgucuucgcccagaagcuccccggcaacgacaacuccaccgccacccucugccucggccaccacgccguccccaacggcacccucgucaagaccaucaccaacgaccagaucgaggucaccaacgccaccgagcucguccaguccuccuccaccggccgcaucugcgacuccccccaccagauccucgacggcgagaacugcacccucaucgacgcccuccucggcgacccccacugcgacggcuuccagaacaaggagugggaccucuucgucgagcgcuccaaggccuacuccaacugcuaccccuacgacguccccgacuacgucucccuccgcucccucgucgccuccuccggcacccucgaguucaacaacgaguccuucaacuggaccggcgucgcccagaacggcaccuccuccgccugcaagcgccgcuccgacaaguccuucuucucccgccucaacuggcuccaccagcucaaguacaaguaccccgcccucaaggucaccaugcccaacaacgagaaguucgacaagcucuacaucuggggcguccaccaccccggcaccgacuccgaccagaucucccucuacgcccaggccuccggccgcgucaccgucuccaccaagcgcucccagcagaccgucauccccaacaucggcucccgccccuggguccgcggcgucuccucccgcaucuccaucuacuggaccaucgucaagcccggcgacauccuccucaucaacuccaccggcaaccucaucgccccccgcggcuacuucaagauccgcuccggcaaguccuccaucaugcgcuccgacgcccccaucggcaagugcaacuccgagugcaucacccccaacggcuccauccccaacgacaagcccuuccagaacgucaaccgcaucaccuacggcgccugcccccgcuacgucaagcagaacacccucaagcucgccaccggcaugcgcaacguccccgagaagcagacccgcggcaucuucggcgccaucgccggcuucaucgagaacggcugggagggcaugauggacggcugguacggcuuccgccaccagaacuccgagggcaccggccaggccgccgaccucaaguccacccaggccgccaucaaccagaucaacggcaagcucaaccgccucaucgagaagaccaacgagaaguuccaccagaucgagaaggaguucuccgaggucgagggccgcauccaggaccucgagaaguacgucgaggacaccaagaucgaccucugguccuacaacgccgagcuccucgucgcccucgagaaccagcacaccaucgaccucaccgacuccgagaugaacaagcucuucgagcgcaccaagaagcagcuccgcgagaacgccgaggacaugggcaacggcugcuucaagaucuaccacaagugcgacaacgucugcaucggcuccauccgcaacggcaccuacgaccacgacgucuaccgcgacgaggcccucaacaaccgcuuccagaucaagggcgucgagcucaaguccggcuacaaggacuggguccucuggaucuccuucgccaucuccugcuuccuccucugcaucguccuccucggcuucaucaugugggccugccagaagggcaacauccgcugcaacaucugcaucuga

SEQ ID NO: 96680 - RNA, 1701 nt, Artificial Sequence; identical to SEQ ID NO: 96653
  derived and/or modified CDS sequence (opt2) from hemagglutinin__InfluenzaA__ABC68000

SEQ ID NO: 96681 - RNA, 1701 nt, Artificial Sequence
  derived and/or modified CDS sequence (opt2) from hemagglutinin__InfluenzaA__ABC68049
augaagaccaucaucgcccucuccuacauccucugccucgucuucgcccagaagcuccccggcaacgacaacuccaccgccacccucugccucggccaccacgccguccccaacggcacccucgucaagaccaucaccgacgaccagaucgaggucaccaacgccaccgagcucguccaguccuccuccaccggccgcaucugcgacuccccccaccagauccucgacggcgagaacugcacccucaucgacgcccuccucggcgacccccacugcgacggcuuccagaacaaggagugggaccucuucgucgagcgcuccaaggccuacuccaacugcuaccccuacgacguccccgacuacgucucccuccgcucccucgucgccuccuccggcacccucgaguucaacaacgaguccuucaacuggaccggcgucgcccagaacggcaccuccuccgccugcaagcgccgcuccgacaaguccuucuucucccgccucaacuggcuccaccagcucaaguacaaguaccccgcccucaacgucaccaugcccaacaacgagaaguucgacaagcucuacgucuggggcguccaccaccccggcaccgacuccgaccagaucucccucuacgcccaggccuccggccgcgucaccgucuccaccaagcgcucccagcagaccgucauccccaacaucggcucccgccccuggguccgcggcgucuccuccaagaucuccaucuacuggaccaucgucaagcccggcgacauccuccucaucaacuccaccggcaaccucaucgccccccgcggcuacuucaagauccgcuccggcaaguccuccaucaugcgcuccgacgcccccaucggcaagugcaacuccgagugcaucacccccaacggcuccauccccaacgacaagcccuuccagaacgucaaccgcaucaccuacggcgccugcccccgcuacgucaagcagaacacccucaagcucgccaccggcaugcgcaacguccccgagaagcagacccgcggcaucuucggcgccaucgccggcuucaucgagaacggcugggagggcaugauggacggcugguacggcuuccgccaccagaacuccgagggcaccggccaggccgccgaccucaaguccacccaggccgccaucaaccagaucaacggcaagcucaaccgccucaucgagaagaccaacgagaaguuccaccagaucgagaaggaguucuccgaggucgagggccgcauccaggaccucgagaaguacgucgaggacaccaagaucgaccucugguccuacaacgccgagcuccucgucgcccucgagaaccagcacaccaucgaccucaccgacuccgagaugaacaagcucuucgagcgcaccaagaagcagcuccgcgagaacgccgaggacaugggcaacggcugcuucaagaucuaccacaagugcgacaacgccugcaucggcuccauccgcaacggcaccuacgaccacgacgucuaccgcgacgaggcccucaacaaccgcuuccagaucaagggcgucgagcucaaguccggcuacaaggacuggguccucuggaucuccuucgccaucuccugcuuccuccucugcaucguccuccucggcuucaucaugugggccugccagaagggcaacauccgcugcaacaucugcaucuga

SEQ ID NO: 96682 - RNA, 1701 nt, Artificial Sequence; identical to SEQ ID NO: 96598
  derived and/or modified CDS sequence (opt2) from hemagglutinin__InfluenzaA__ABC68060

SEQ ID NO: 96683 - RNA, 1701 nt, Artificial Sequence
  derived and/or modified CDS sequence (opt2) from hemagglutinin__InfluenzaA__ABC68071
augaagaccaucaucgcccucuccuacauccucugccucgucuucgcccagaagcuccccggcaacgacaacuccaccgccacccucugccucggccaccacgccguccccaacggcacccucgucaagaccaucaccaacgaccagaucgaggucaccaacgccaccgagcucguccaguccuccuccaccggccgcaucugcgacuccccccaccagauccucgacggcgagaacugcacccucaucgacgcccuccucggcgacccccacugcgacggcuuccagaacaaggagugggaccucuucgucgagcgcuccaaggccuacuccaacugcuaccccuacgacguccccgacuacgucucccuccgcucccucgucgccuccuccggcacccucgaguucaacaacgaguccuucaacuggaccggcgucgcccagaacggcaccuccuccgccugcaagcgccgcuccgacaaguccuucuucucccgccucaacuggcuccaccagcucaaguacaaguaccccgcccucaacgucaccaugcccaacaacgagaaguucgacaagcucuacaucuggggcguccaccaccccggcaccgacuccgaccagaucucccucuacgcccaggccuccggccgcgucaccgucuccaccaagcgcucccagcagaccgucauccccaacaucggcucccgccccuggguccgcggcgucuccucccgcaucuccaucuacuggaccaucgucaagcccggcgacauccuccucaucaacuccaccggcaaccucaucgccccccgcggcuacuucaagauccgcuccggcaaguccuccaucaugcgcuccgacgcccccaucggcaagugcaacuccgagugcaucacccccaacggcuccauccccaacgacaagcccuuccagaacgucaaccgcaucaccuacggcgccugcccccgcuacgucaagcagaacacccucaagcucgccaccggcaugcgcaacguccccgagaagcagacccgcggcaucuucggcgccaucgccggcuucaucgagaacggcugggagggcaugauggacggcugguacggcuuccgccaccagaacuccgagggcaccggccaggccgccgaccucaaguccacccaggccgccaucaaccagaucaacggcaagcucaaccgccucaucgagaagaccaacgagaaguuccaccagaucgagaaggaguucuccgaggucgagggccgcauccaggaccucgagaaguacgucgaggacaccaagaucgaccucugguccuacaacgccgagcuccucgucgcccucgagaaccagcacaccaucgaccucaccgacuccgagaugaacaagcucuucgagcgcaccaagaagcagcuccgcgagaacgccgaggacaugggcaacggcugcuucaagaucuaccacaagugcgacaacgccugcaucggcuccauccgcaacggcaccuacgaccacaacgucuaccgcgacgaggcccucaacaaccgcuuccagaucaagggcgucgagcucaaguccggcuacaaggacuggguccucuggaucuccuucgccaucuccugcuuccuccucugcaucguccuccucggcuucaucaugugggccugccagaagggcaacauccgcugcaacaucugcaucuga

SEQ ID NO: 96684 - RNA, 1701 nt, Artificial Sequence; identical to SEQ ID NO: 96666
  derived and/or modified CDS sequence (opt2) from hemagglutinin__InfluenzaA__ABC68082

SEQ ID NO: 96685 - RNA, 1701 nt, Artificial Sequence
  derived and/or modified CDS sequence (opt2) from hemagglutinin__InfluenzaA__ABC68093
augaagaccaucaucgcccucuccuacauccucugccucgucuucgcccagaagcuccccggcaacgacaacuccaccgccacccucugccucggccaccacgccguccccaacggcacccucgucaagaccaucaccaacgaccagaucgaggucaccaacgccaccgagcucguccaguccuccuccaccucccgcaucugcgacuccccccaccagauccucgacggcgagaacugcacccucaucgacgcccuccucggcgacccccacugcgacggcuuccagaacaaggagugggaccucuucgucgagcgcuccaaggccuacuccaacugcuaccccuacgacguccccgacuacgucucccuccgcucccucgucgccuccuccggcacccucgaguucaacaacgaguccuucaacuggaccggcgucgcccagaacggcaccuccuccgccugcaagcgccgcuccgacaaguccuucuucucccgccucaacuggcuccaccagcucaaguacaaguaccccgcccucaacgucaccaugcccaacaacgagaaguucgacaagcucuacaucuggggcguccaccaccccggcaccgacuccgaccagaucucccucuacgcccaggccuccggccgcgucaccgucuccaccaagcgcucccagcagaccgucauccccaacaucggcucccgccccuggguccgcggcgucuccuccaucaucuccaucuacuggaccaucgucaagcccggcgacauccuccucaucaacuccaccggcaaccucaucgccccccgcggcuacuucaagauccgcuccggcaaguccuccaucaugcgcuccgacgcccccaucggcaagugcaacuccgagugcaucacccccaacggcuccauccccaacggcaagcccuuccagaacgucaaccgcaucaccuacggcgccugcccccgcuacgucaagcagaacacccucaagcucgccaccggcaugcgcaacguccccgagaagcagacccgcggcaucuucggcgccaucgccggcuucaucgagaacggcugggagggcaugauggacggcugguacggcuuccgccaccagaacuccgagggcaccggccaggccgccgaccucaaguccacccaggccgccaucaaccagaucaacggcaagcucaaccgccucaucgagaagaccaacgagaaguuccaccagaucgagaaggaguucuccgaggucgagggccgcauccaggaccucgagaaguacgucgaggacaccaagaucgaccucugguccuacaacgccgagcuccucgucgcccucgagaaccagcacaccaucgaccucaccgacuccgagaugaacaagcucuucgagcgcaccaagaagcagcuccgcgagaacgccgaggacaugggcaacggcugcuucaagaucuaccacaagugcgacaacgccugcaucggcuccauccgcaacggcaccuacgaccacgacgucuaccgcgacgaggcccucaacaaccgcuuccagaucaagggcgucgagcucaaguccggcuacaaggacuggauccucuggaucuccuucgccaccuccugcuuccuccucugcaucguccuccucggcuucaucaugugggccugccagaagggcaacauccgcugcaacaucugcaucuga

SEQ ID NO: 96686 - RNA, 1701 nt, Artificial Sequence
  derived and/or modified CDS sequence (opt2) from hemagglutinin__InfluenzaA__ABC68222
augaagaccaucaucgcccucuccuacauccucugccucgucuucgcccagaagcuccccggcaacgacaacuccaccgccacccucugccucggccaccacgccguccccaacggcacccucgucaagaccaucaccaacgaccagaucgaggucaccaacgccaccgagcucguccaguccuccuccaccggcggcaucugcgacuccccccaccagauccucgacggcgagaacugcacccucaucgacgcccuccucggcgacccccacugcgacggcuuccagaacaaggagugggaccucuucgucgagcgcuccaaggccuacuccaacugcuaccccuacgacguccccgacuacgccucccuccgcucccucgucgccuccuccggcacccucgaguucaacaacgaguccuucaacuggaccggcgucgcccagaacggcaccuccuccgccugcaagcgccgcuccaacaaguccuucuucucccgccucaacuggcuccaccagcucaaguacaaguaccccgcccucaacgucaccaugcccaacaacgagaaguucgacaagcucuacaucuggggcguccaccaccccuccaccgacuccgaccagaucucccucuacgcccaggcccccggccgcgucaccgucuccaccaagcgcucccagcagaccgucauccccaacaucggcucccgccccuggguccgcggcgucuccucccgcaucuccaucuacuggaccaucgucaagcccggcgacauccuccucaucaacugcaccggcaaccucaucgccccccgcggcuacuucaagauccgcuccggcaaguccuccaucaugcgcuccgacgccuccaucggcaagugcaacuccgagugcaucacccccaacggcuccauccccaacgacaagcccuuccagaacgucaaccgcaucaccuacggcgccugcccccgcuacgucaagcagaacacccucaagcucgccaccggcaugcgcaacguccccgagaagcagacccgcggcaucuucggcgccaucgccggcuucaucgagaacggcugggagggcauggucgacggcugguacggcuuccgccaccagaacuccgagggcaccggccaggccgccgaccucaaguccacccaggccgccaucaaccagaucaacggcaagcucaaccgccucaucgagaagaccaacgagaaguuccaccagaucgagaaggaguucuccgaggucgagggccgcauccaggaccucgagaaguacgucgaggacaccaagaucgaccucugguccuacaacgccgagcuccucgucgcccucgagaaccagcacaccaucgaccucaccgacuccgagaugaacaagcucuucgagcgcaccaagaagcagcuccgcgagaacgccgaggacaugggcaacggcugcuucaagaucuaccacaagugcgacaacgccugcaucggcuccauccgcaacggcaccuacgaccacgacgucuaccgcgacgaggcccucaacaaccgcuuccagaucaagggcgucgagcucaaguccggcuacaaggacuggauccucuggaucuccuucgccaucuccugcuuccuccucugcgucguccuccucggcuucaucaugugggccugccagaagggcaacauccgcugcaacaucugcaucuga

SEQ ID NO: 96687 - RNA, 1701 nt, Artificial Sequence; identical to SEQ ID NO: 96478
  derived and/or modified CDS sequence (opt2) from hemagglutinin__InfluenzaA__ABC68233

SEQ ID NO: 96688 - RNA, 1707 nt, Artificial Sequence
  derived and/or modified CDS sequence (opt2) from hemagglutinin__InfluenzaA__ABC72655
auggagaagaucguccuccucuucgccaucgucucccucgucaaguccgaccagaucugcaucggcuaccacgccaacaacuccaccgagcaggucgacaccaucauggagaagaacgucaccgucacccacgcccaggacauccucgagaagacccacaacggcaagcucugcgaccucgacggcgucaagccccucauccuccgcgacugcuccgucgccggcuggcuccucggcaaccccaugugcgacgaguucaucaacguccccgagugguccuacaucgucgagaagcccaaccccgccaacgaccucugcuaccccggcgacuucaacgacuacgaggagcucaagcaccuccucucccgcaucaaccacuucgagaagauccagaucauccccaaguccuccugguccucccacgaggccuccgucggcgucuccuccgucugccccuaccagggcaaguccuccuucuuccgcaacgucgucuggcucaucaagaagaacuccaccuaccccaccaucaagcgcuccuacaacaacaccaaccaggaggaccuccucguccucuggggcauccaccaccccaacgacgccgccgagcagaccaagcucuaccagaaccccaccaccuacaucuccgucggcaccuccacccucaaccagcgccucgucccccgcaucgccacccgcuccaaggucaacggccaguccggccgcauggaguucuucuggaccauccucaagcccaacgacgccaucaacuucgaguccaacggcaacuucaucgcccccgaguacgccuacaagaucgucaagaagggcgacuccaccaucaugaaguccgagcucgaguacggcaacugcaacaccaagugccagacccccaugggcgccaucaacuccuccaugcccuuccacaacauccacccccucaccaucggcgagugccccaaguacgucaaguccaaccgccucguccucgccaccggccuccgcaacuccccccagcgcgagaagcgccgcaagaagcgcggccucuucggcgccaucgccggcuucaucgagggcggcuggcagggcauggucgacggcugguacggcuaccaccacuccaacgagcagggcuccggcuacgccgccgacaaggaguccacccagaaggccaucgacggcgucaccaacaaggucaacuccaucaucgacaagaugaacacccaguucgaggccgucggccgcgaguucaacaaccucgagcgccgcaucgagaaccucaacaagaagauggaggacggcuuccucgacgucuggaccuacaacgccgagcuccucguccucauggagaacgagcgcacccucgacuuccacgacuccaacgucaagaaccucuacgacaagguccgccuccagcuccgcgacaacgccaaggagcucggcaacggcugcuucgaguucuaccacaagugcgacaacgagugcauggaguccguccgcaacggcaccuacgacuacccccaguacuccgaggaggcccgccucaagcgcgaggagaucuccggcgucaagcucgaguccaucggcaucuaccagauccucuccaucuacuccaccgucgccuccucccucgcccucgccaucauggucgccggccucucccucuggaugugcuccaacggcucccuccagugccgcaucugcaucuga

SEQ ID NO: 96689 - RNA, 1701 nt, Artificial Sequence; identical to SEQ ID NO: 96279
  derived and/or modified CDS sequence (opt2) from hemagglutinin__InfluenzaA__ABC84400

SEQ ID NO: 96690 - RNA, 1701 nt, Artificial Sequence; identical to SEQ ID NO: 96488
  derived and/or modified CDS sequence (opt2) from hemagglutinin__InfluenzaA__ABC84411

SEQ ID NO: 96691 - RNA, 1701 nt, Artificial Sequence
  derived and/or modified CDS sequence (opt2) from hemagglutinin__InfluenzaA__ABC84433
augaagaccaucaucgcccucuccuacauccucugccucgucuucgcccagaagcuccccggcaacgacaaccgcaccgccacccucugccucggccaccacgccguccccaacggcaccaucgucaagaccaucaccaacgaccagaucgaggucaccaacgccaccgagcucguccaguccuccuccaccggcggcaucugcgacuccccccaccagauccucgacggcgagaacugcacccucaucgacgcccuccucggcgacccccagugcgacggcuuccagaacaagaagugggaccucuucgucgagcgcuccaaggccuacuccaacugcuaccccuacgacguccccgacuacgccucccuccgcucccucgucgccuccuccggcacccucgaguucaacaacgaguccuucaacuggaccggcgucacccagaacggcaccuccuccgccugcaagcgccgcuccaacaacuccuucuucucccgccucaacuggcucacccaccucaaguucaaguaccccgcccucaacgucaccaugcccaacaacgagaaguucgacaagcucuacaucuggggcguccaccaccccggcaccaacaacgaccagaucucccucuacgcccaggccuccggccgcaucaccgucuccaccaagcgcucccagcagaccgucauccccaacaucggcucccgcccccgcguccgcgacauccccucccgcaucuccaucuacuggaccaucgucaagcccggcgacauccuccucaucaacuccaccggcaaccucaucgccccccgcggcuacuucaagauccgcuccggcaaguccuccaucaugcgcuccgacgcccccaucggcaagugcaacuccgagugcaucacccccaacggcuccauccccaacgacaagcccuuccagaacgucaaccgcaucaccuacggcgccugcccccgcuacgucaagcagaacacccucaagcucgccaccggcaugcgcaacguccccgagaagcagacccgcggcaucuucggcgccaucgccggcuucaucgagaacggcugggagggcauggucgacggcugguacggcuuccgccaccagaacuccgagggcaucggccaggccgccgaccucaaguccacccaggccgccaucaaccagaucaacggcaagcucaaccgccucaucggcaagaccaacgagaaguuccaccagaucgagaaggaguucuccgaggucgagggccgcauccaggaccucgagaaguacgucgaggacaccaagaucgaccucugguccuacaacgccgagcuccucgucgcccucgagaaccagcacaccaucgaccucaccgacuccgagaugaacaagcucuucgagcgcaccaagaagcagcuccgcgagaacgccgaggacaugggcaacggcugcuucaagaucuaccacaagugcgacaacgccugcaucggcuccauccgcaacggcaccuacgaccacgacgucuaccgcgacgaggcccucaacaaccgcuuccagaucaagggcgucgagcucaaguccggcuacaaggacuggauccucuggaucuccuucgccaucuccugcuuccuccucugcgucgcccuccucggcuucaucaugugggccugccagaagggcaacauccgcugcaacaucugcaucuga

SEQ ID NO: 96692 - RNA, 1701 nt, Artificial Sequence; identical to SEQ ID NO: 96598
  derived and/or modified CDS sequence (opt2) from hemagglutinin__InfluenzaA__ABC84444

SEQ ID NO: 96693 - RNA, 1701 nt, Artificial Sequence; identical to SEQ ID NO: 96669
  derived and/or modified CDS sequence (opt2) from hemagglutinin__InfluenzaA__ABC84498

SEQ ID NO: 96694 - RNA, 1701 nt, Artificial Sequence; identical to SEQ ID NO: 96669
  derived and/or modified CDS sequence (opt2) from hemagglutinin__InfluenzaA__ABC84509

SEQ ID NO: 96695 - RNA, 1701 nt, Artificial Sequence
  derived and/or modified CDS sequence (opt2) from hemagglutinin__InfluenzaA__ABC84520
augaagaccaucaucgcccucuccuacauccucugccucgucuucgcccagaagcuccccggcaacgacaacuccaccgccacccucugccucggccaccacgccguccccaacggcaccaucgucaagaccaucaccaacgaccagaucgaggucaccaacgccaccgagcucguccaguccuccuccaccggcggcaucugcgacuccccccaccagauccucgacggcgagaacugcacccucaucgacgcccuccucggcgacccccagugcgacggcuuccagaacaagaagugggaccucuucgucgagcgcuccaaggccuacuccaacugcuaccccuacgacguccccgacuacgccucccuccgcucccucgucgccuccuccggcacccucgaguucaacaacgaguccuucaacuggaccggcgucacccagaacggcaccuccuccgccugcaagcgccgcuccaacaacuccuucuucucccgccucaacuggcucacccaccucaaguucaaguaccccgcccucaacgucaccaugcccaacaacgagaaguucgacaagcucuacaucuggggcguccaccaccccggcaccgacaacgaccagaucuuccucuacgcccaggccuccggccgcaucaccgucuccaccaagcgcucccagcagaccgucauccccaacaucggcucccgcccccgcguccgcgacauccccucccgcaucuccaucuacuggaccaucgucaagcccggcgacauccuccucaucaacuccaccggcaaccucaucgccccccgcggcuacuucaagauccgcuccggcaaguccuccaucaugcgcuccgacgcccccaucggcaagugcaacuccgagugcaucacccccaacggcuccauccccaacgacaagcccuuccagaacgucaaccgcaucaccuacggcgccugcccccgcuacgucaagcagaacacccucaagcucgccaccggcaugcgcaacguccccgagaagcagacccgcggcaucuucggcgccaucgccggcuucaucgagaacggcugggagggcauggucgacggcugguacggcuuccgccaccagaacuccgagggcaucggccaggccgccgaccucaaguccacccaggccgccaucaaccagaucaacggcaagcucaaccgccucaucggcaagaccaacgagaaguuccaccagaucgagaaggaguucuccgaggucgagggccgcauccaggaccucgagaaguacgucgaggacaccaagaucgaccucugguccuacaacgccgagcuccucgucgcccucgagaaccagcacaccaucgaccucaccgacuccgagaugaacaagcucuucgagcgcaccaagaagcagcuccgcgagaacgccgaggacaugggcaacggcugcuucaagaucuaccacaagugcgacaacgccugcaucggcuccauccgcaacggcaccuacgaccacgacgucuaccgcgacgaggcccucaacaaccgcuuccagaucaagggcgucgagcucaaguccggcuacaaggacuggauccucuggaucuccuucgccaucuccugcuuccuccucugcgucgcccuccucggcuucaucaugugggccugccagaagggcaacauccgcugcaacaucugcaucuga

SEQ ID NO: 96696 - RNA, 1701 nt, Artificial Sequence
  derived and/or modified CDS sequence (opt2) from hemagglutinin__InfluenzaA__ABC84531
augaagaccaucaucgcccucuccuacaucuucugccucgucuucgcccagaagcuccccggcaacgacaacuccaccgccacccucugccucggccaccacgccguccccaacggcacccucgucaagaccaucaccaacgaccagaucgaggucaccaacgccaccgagcucguccaguccuccuccaccggccgcaucugcgacuccccccaccgcauccucgacggcaagaacugcacccucaucgacgcccuccucggcgacccccacugcgacggcuuccagaacgagaagugggaccucuucgucgagcgcuccaaggccuucuccaacugcuaccccuacgacguccccgacuacgccucccuccgcucccucgucgccuccuccggcacccucgaguucaucaacgagggcuucaacuggaccggcgucacccaguccggcggcuccuacgccugcaagcgcggcuccgucaacuccuucuucucccgccucaacuggcucuacgaguccgaguccaaguaccccgcccucaacgucaccaugcccaacaacggccgcuucgacaagcucuacaucuggggcguccaccaccccuccaccgacaaggagcagaccaaccucuacguccgcgccgccggccgcgucaccgucuccaccaagcgcucccagcagaccgucauccccaacaucggcucccgccccuggguccgcggccucuccucccgcaucuccaucuacuggaccaucgucaagcccggcgacauccuccucaucaacuccaccggcaaccucaucgccccccgcggcuacuucaagauccgcaccggcaaguccuccaucaugcgcuccgacgcccccaucggcaccugcuccuccgagugcaucacccccaacggcuccauccccaacgacaagcccuuccagaacgucaacaagaucaccuacggcgccugcccccgcuacgucaagcagaacacccucaagcucgccaccggcaugcgcaacguccccgagaagcagacccgcggcaucuucggcgccaucgccggcuucaucgagaacggcugggagggcauggucgacggcugguacggcuuccgccaccagaacuccgagggcaccggccaggccgccgaccucaaguccacccaggccgccaucgaccagaucaacggcaagcucaaccgccucaucgagaagaccaacgagaaguuccaccagaucgagaaggaguucuccgaggucgagggccgcauccaggaccucgagaaguacgucgaggacaccaagaucgaccucugguccuacaacgccgagcuccucgucgcccucgagaaccagcacaccaucgaccucaccgacuccgagaugaacaagcucuucgagaagacccgcaagcagcuccgcgagaacgccgaggacaugggcaacggcugcuucaagaucuaccacaagugcgacaacgccugcaucggcuccauccgcaacggcaccuacgaccacgacgucuaccgcgacgaggcccucaacaaccgcuuccagaucaagggcgucgagcucaaguccggcuacaaggacuggauccucuggaucuccuucgccaucuccugcuuccuccucugcgucguccuccucggcuucaucaugugggccugccagaagggcaacauccgcugcaacaucugcaucuga

SEQ ID NO: 96697 - RNA, 1701 nt, Artificial Sequence; identical to SEQ ID NO: 96686
  derived and/or modified CDS sequence (opt2) from hemagglutinin__InfluenzaA__ABC84560

SEQ ID NO: 96698 - RNA, 1701 nt, Artificial Sequence
  derived and/or modified CDS sequence (opt2) from hemagglutinin__InfluenzaA__ABC84571
augaagaccaucaucgcccucuccuacauccucugccucgucuucgcccagaagcuccccggcaacgacaacuccaccgccacccucugccucggccaccacgccguccccaacggcacccucgucaagaccaucaccaacgaccagaucgaggucaccaacgccaccgagcucguccaguccuccuccaccggcggcaucugcgacuccccccaccagaucaucgacggcgagaacugcacccucaucgacgcccuccucggcgacccccacugcgacggcuuccagaacaaggagugggaccucuucgucgagcgcuccaaggccuacuccaacugcuaccccuacgacguccccgacuacgccucccuccgcucccucgucgccuccuccggcacccucgaguucaacaacgaguccuucaacuggaccggcgucgcccagaacggcaccuccuccgccugcaagcgccgcuccaacaaguccuucuucucccgccucaacuggcuccaccagcucaaguacaaguaccccgcccucaacgucaccaugcccaacaacgagaaguucgacaagcucuacaucuggggcguccaccaccccuccaccgacuccgaccagaucucccucuacgcccaggcccccggccgcgucaccgucuccaccaagcgcucccagcagaccgucauccccaacaucggcucccgccccuggguccgcggcgucuccucccgcaucuccaucuacuggaccaucgucaagcccggcgacauccuccucaucaacugcaccggcaaccucaucgccccccgcggcuacuucaagauccgcuccggcaaguccuccaucaugcgcuccgacgccuccaucggcaagugcaacuccgagugcaucacccccaacggcuccauccccaacgacaagcccuuccagaacgucaaccgcaucaccuacggcgccugcccccgcuacgucaagcagaacacccucaagcucgccaccggcaugcgcaacguccccgagaagcagacccgcggcaucuucggcgccaucgccggcuucaucgagaacggcugggagggcauggucgacggcugguacggcuuccgccaccagaacuccgagggcaccggccaggccgccgaccucaaguccacccaggccgccaucaaccagaucaacggcaagcucaaccgccucaucgagaagaccaacgagaaguuccaccagaucgagaaggaguucuccgaggucgagggccgcauccaggaccucgagaaguacgucgaggacaccaagaucgaccucugguccuacaacgccgagcuccucgucgcccucgagaaccagcacaccaucgaccucaccgacuccgagaugaacaagcucuucgagcgcaccaagaagcagcuccgcgagaacgccgaggacaugggcaacggcugcuucaagaucuaccacaagugcgacaacgccugcaucggcuccauccgcaacggcaccuacgaccacgacgucuaccgcgacgaggcccucaacaaccgcuuccagaucaagggcgucgagcucaaguccggcuacaaggacuggauccucuggaucuccuucgccaucuccugcuuccuccucugcgucguccuccucggcuucaucaugugggccugccagaagggcaacauccgcugcaacaucugcaucuga

SEQ ID NO: 96699 - RNA, 1701 nt, Artificial Sequence; identical to SEQ ID NO: 96686
  derived and/or modified CDS sequence (opt2) from hemagglutinin__InfluenzaA__ABC85754

SEQ ID NO: 96700 - RNA, 1701 nt, Artificial Sequence; identical to SEQ ID NO: 96666
  derived and/or modified CDS sequence (opt2) from hemagglutinin__InfluenzaA__ABC85765

SEQ ID NO: 96701 - RNA, 1701 nt, Artificial Sequence
  derived and/or modified CDS sequence (opt2) from hemagglutinin__InfluenzaA__ABC85776
augaagaccaucaucgcccucuccuacauccucugccucgucuucgcccagaagcuccccggcaacgacaacuccaccgccacccucugccucggccaccacgccguccccaacggcacccucgucaagaccaucaccaacgaccagaucgaggucaccaacgccaccgagcucguccaguccuccuccaccggcggcaucugcgacuccccccaccagauccucgacggcgagaacugcacccucaucgacgcccuccucggcgacccccacugcgacggcuuccagaacaaggagugggaccucuucgucgagcgcuccaaggccuacuccaacugcuaccccuacgacguccccgacuacgccucccuccgcucccucgucgccuccuccggcacccucgaguucaacaacgaguccuucaacuggaccggcgucgcccagaacggcaccuccuccgccugcaagcgccgcuccaacaaguccuucuucucccgccucaacuggcuccaccagcucaaguacaaguaccccgcccucaacgucaccaugcccaacaacgagaaguucgacaagcucuacaucuggggcguccaccaccccuccaccgacuccgaccagaucucccucuacgcccaggcccccggccgcgucaccgucuccaccaagcgcucccagcagaccgucauccccaacaucggcucccgccccuggguccgcggcgucuccucccgcaucuccaucuacuggaccaucgucaagcccggcgacauccuccucaucaacuucaccggcaaccucaucgccccccgcggcuacuucaagauccgcuccggcaaguccuccaucaugcgcuccgacgccuccaucggcaagugcaacuccgagugcaucacccccaacggcuccauccccaacgacaagcccuuccagaacgucaaccgcaucaccuacggcgccugcccccgcuacgucaagcagaacacccucaagcucgccaccggcaugcgcaacguccccgagaagcagacccgcggcaucuucggcgccaucgccggcuucaucgagaacggcugggagggcauggucgacggcugguacggcuuccgccaccagaacuccgagggcaccggccaggccgccgaccucaaguccacccaggccgccaucaaccagaucaacggcaagcucaaccgccucaucgagaagaccaacgagaaguuccaccagaucgagaaggaguucuccgaggucgagggccgcauccaggaccucgagaaguacgucgaggacaccaagaucgaccucugguccuacaacgccgagcuccucgucgcccucgagaaccagcacaccaucgaccucaccgacuccgagaugaacaagcucuucgagcgcaccaagaagcagcuccgcgagaacgccgaggacaugggcaacggcugcuucaagaucuaccacaagugcgacaacgccugcaucggcuccauccgcaacggcaccuacgaccacgacgucuaccgcgacgaggcccucaacaaccgcuuccagaucaagggcgucgagcucaaguccggcuacaaggacuggauccucuggaucuccuucgccaucuccugcuuccuccucugcgucguccuccucggcuucaucaugugggccugccagaagggcaacauccgcugcaacaucugcaucuga

SEQ ID NO: 96702 - RNA, 1701 nt, Artificial Sequence; identical to SEQ ID NO: 96686
  derived and/or modified CDS sequence (opt2) from hemagglutinin__InfluenzaA__ABC85787

SEQ ID NO: 96703 - RNA, 1701 nt, Artificial Sequence; identical to SEQ ID NO: 96669
  derived and/or modified CDS sequence (opt2) from hemagglutinin__InfluenzaA__ABC85798

SEQ ID NO: 96704 - RNA, 1701 nt, Artificial Sequence; identical to SEQ ID NO: 96666
  derived and/or modified CDS sequence (opt2) from hemagglutinin__InfluenzaA__ABC85820

SEQ ID NO: 96705 - RNA, 1701 nt, Artificial Sequence; identical to SEQ ID NO: 96666
  derived and/or modified CDS sequence (opt2) from hemagglutinin__InfluenzaA__ABC85831

SEQ ID NO: 96706 - RNA, 1701 nt, Artificial Sequence; identical to SEQ ID NO: 96669
  derived and/or modified CDS sequence (opt2) from hemagglutinin__InfluenzaA__ABC85842

SEQ ID NO: 96707 - RNA, 1701 nt, Artificial Sequence; identical to SEQ ID NO: 96666
  derived and/or modified CDS sequence (opt2) from hemagglutinin__InfluenzaA__ABC85853

SEQ ID NO: 96708 - RNA, 1701 nt, Artificial Sequence; identical to SEQ ID NO: 96666
  derived and/or modified CDS sequence (opt2) from hemagglutinin__InfluenzaA__ABC85864

SEQ ID NO: 96709 - RNA, 1701 nt, Artificial Sequence; identical to SEQ ID NO: 96669
  derived and/or modified CDS sequence (opt2) from hemagglutinin__InfluenzaA__ABC85886

SEQ ID NO: 96710 - RNA, 1701 nt, Artificial Sequence; identical to SEQ ID NO: 96598
  derived and/or modified CDS sequence (opt2) from hemagglutinin__InfluenzaA__ABC85908

SEQ ID NO: 96711 - RNA, 1701 nt, Artificial Sequence
  derived and/or modified CDS sequence (opt2) from hemagglutinin__InfluenzaA__ABC85919
augaagaccaucaucgcccucuccuacauccucugccucgucuucgcccagaagcuccccggcaacgacaacuccaccgccacccucugccucggccaccacgccguccccaacggcacccucgucaagaccaucaccaacgaccagaucgaggucaccaacgccaccgagcucguccaguccuccuccaccggccgcaucugcgacuccccccaccagauccucgacggcgagaacugcacccucaucgacgcccuccucggcgacccccacugcgacggcuuccagaacaaggagugggaccucuucgucgagcgcuccaaggccuacuccaacugcuaccccuacgacguccccgacuacgucucccuccgcucccucgucgccuccuccggcacccucgaguucaacaacgaguccuucaacuggaccggcgucgcccagaacggcaccuccuccgccugcaagcgccgcuccgacaaguccuucuucucccgccucaacuggcuccaccagcucaaguacaaguaccccgcccucaacgucaccaugcccaacaacgagaaguucgacaagcucuacaucuggggcguccaccaccccggcaccgacuccgaccagaucucccucuacgcccaggccuccggccgcgucaccgucuccaccaagcgcucccagcagaccgucauccccaacaucggcucccgccccuggguccgcggcgucuccucccgcaucuccaucuacuggaccaucgucaagcccggcgacauccuccucaucaacuccaccggcaaccucaucgccccccgcggcuacuucaagauccgcuccggcaaguccuccaucaugcgcuccgacgcccccaucggcaagugcaacuccgagugcaucacccccaacggcuccauccccaacgacaagcccuuccagaacgucaaccgcaucaccuacggcgccugcccccgcuacgucaagcagaacacccucaagcucgccaccggcaugcgcaacguccccgagaagcagacccgcggcaucuucggcgccaucgccggcuucaucgagaacggcugggagggcaugauggacggcugguacggcuuccgccaccagaacuccgagggcaccggccaggccgccgaccucaaguccacccaggccgccaucaaccagaucaacggcaagcucaaccgccucaucgagaagaccaacgagaaguuccaccagaucgagaaggaguucuccgaggucgagggccgcauccaggaccucgagaaguacgucgaggacaccaagaucgaccucugguccuacaacgccgagcuccucgucgcccucgagaaccagcacaccaucgaccucaccgacuccgagaugaacaagcucuucgagcgcaccaagaagcagcuccgcgagaacgccgaggacaugggcaacggcugcuucaagaucuaccacaagugcgacaacgccugcaucggcuccauccgcaacggcaccuacgaccacgacgucuaccgcgacgaggcccucaacaaccgcuuccagaucaagggcgucgagcucaaguccggcuacaaggacuggguccucuggaucuccuucgccaucuccugcuuccuccucugcaucguccucaugggcuucaucaugugggccugccagaagggcaacauccgcugcaacaucugcaucuga

SEQ ID NO: 96712 - RNA, 1701 nt, Artificial Sequence; identical to SEQ ID NO: 96598
  derived and/or modified CDS sequence (opt2) from hemagglutinin__InfluenzaA__ABC85930

SEQ ID NO: 96713 - RNA, 1701 nt, Artificial Sequence; identical to SEQ ID NO: 96647
  derived and/or modified CDS sequence (opt2) from hemagglutinin__InfluenzaA__ABC85941

SEQ ID NO: 96714 - RNA, 1701 nt, Artificial Sequence
  derived and/or modified CDS sequence (opt2) from hemagglutinin__InfluenzaA__ABC85952
augaagaccaucaucgcccucuccuacauccucugccucgucuucgcccagaagcuccccggcaacgacaacuccaccgccacccucugccucggccaccacgccguccccaacggcacccucgucaagaccaucaccaacgaccagaucgaggucaccaacgccaccgagcucguccaguccuccuccaccggccgcaucugcgacuccccccaccagauccucgacggcgagaacugcacccucaucgacgcccuccucggcgacccccacugcgacggcuuccagaacaagaagugggaccucuucgucgagcgcuccaaggccuacuccaacugcuaccccuacgacguccccgacuacgucucccuccgcucccucgucgccuccuccggcacccucgaguucaacaacgaguccuucaacuggaccggcgucgcccagaacggcaccuccuccgccugcaagcgccgcuccgacaaguccuucuucucccgccucaacuggcuccaccagcucaaguacaaguaccccgcccucaacgucaccaugcccaacaacgagaaguucgacaagcucuacaucuggggcguccaccaccccggcaccgacuccgaccagaucucccucuacgcccaggccuccggccgcgucaccgucuccaccaagcgcucccagcagaccgucauccccaacaucggcucccgccccuggguccgcggcgucuccucccgcaucuccaucuacuggaccaucgucaagcccggcgacauccuccucaucaacuccaccggcaaccucaucgccccccgcggcuacuucaagauccgcuccggcaaguccuccaucaugcgcuccgacgcccccaucggcaagugcaacuccgagugcaucacccccaacggcuccauccccaacgacaagcccuuccagaacgucaaccgcaucaccuacggcgccugcccccgcuacgucaagcagaacacccucaagcucgccaccggcaugcgcaacguccccgagaagcagacccgcggcaucuucggcgccaucgccggcuucaucgagaacggcugggagggcaugauggacggcugguacggcuuccgccaccacaacuccgagggcaccggccaggccgccgaccucaaguccacccaggccgccaucaaccagaucaacggcaagcucaaccgccucaucgagaagaccaacgagaaguuccaccagaucgagaaggaguucuccgaggucgagggccgcauccaggaccucgagaaguacgucgaggacaccaagaucgaccucugguccuacaacgccgagcuccucgucgcccucgagaaccagcacaccaucgaccucaccgacuccgagaugaacaagcucuucgagcgcaccaagaagcagcuccgcgagaacgccgaggacaugggcaacggcugcuucaagaucuaccacaagugcgacaacgccugcaucggcuccauccgcaacggcaccuacgaccacgacgucuaccgcgacgaggcccucaacaaccgcuuccagaucaagggcgucgagcucaaguccggcuacaaggacuggguccucuggaucuccuucgccaucuccugcuuccuccucugcaucguccuccucggcuucaucaugugggccugccagaagggcaacauccgcugcaacaucugcaucuga

SEQ ID NO: 96715 - RNA, 1701 nt, Artificial Sequence; identical to SEQ ID NO: 96598
  derived and/or modified CDS sequence (opt2) from hemagglutinin__InfluenzaA__ABC85974

SEQ ID NO: 96716 - RNA, 1701 nt, Artificial Sequence; identical to SEQ ID NO: 96598
  derived and/or modified CDS sequence (opt2) from hemagglutinin__InfluenzaA__ABC85985

SEQ ID NO: 96717 - RNA, 1701 nt, Artificial Sequence
  derived and/or modified CDS sequence (opt2) from hemagglutinin__InfluenzaA__ABC85996
augaagaccaucaucgcccucuccuacauccucugccucgucuucgcccagaagcuccccggcaacgacaacuccaccgccacccucugccucggccaccacgccguccccaacggcaccaucgucaagaccaucaccaacgaccagaucgaggucaccaacgccaccgagcucguccaguccuccuccaccggcggcaucugcgacuccccccaccagauccucgacggcgagaacugcacccucaucgacgcccuccucggcgacccccagugcgacggcuuccagaacaagaagugggaccucuucgucgagcgcuccaaggccuacuccaacugcuaccccuacgacguccccgacuacgccucccuccgcucccucgucgccuccuccggcacccucgaguucaacaacgaguccuucaacuggaccggcgucacccagaacggcaccuccuccgccugcaagcgccgcuccaacaacuccuucuucucccgccucaacuggcucacccaccucaaguucaaguaccccgcccucaacgucaccaugcccaacaacgagaaguucgacaagcucuacaucuggggcguccaccaccccggcaccgacaacgaccagaucucccucuacgcccaggccuccggccgcaucaccgucuccaccaagcgcucccagcagaccgucauccccaacaucggcucccgcccccgcguccgcgacauccccucccgcaucuccaucuacuggaccaucgucaagcccggcgacauccuccucaucaacuccaccggcaaccucaucgccccccgcggcuacuucaagauccgcuccggcaaguccuccaucaugcgcuccgacgcccccaucggcaagugcaacuccgagugcaucacccccaacggcuccauccccaacgacaagcccuuccagaacgucaaccgcaucaccuacggcgccugcccccgcuacgucaagcagaacacccucaagcucgccaccggcaugcgcaacguccccgagaagcagacccgcggcaucuucggcgccaucgccggcuucaucgagaacggcugggagggcaugauggacggcugguacggcuuccgccaccagaacuccgagggcaucggccaggccgccgaccucaaguccacccaggccgccaucaaccagaucaacggcaagcucaaccgccucaucggcaagaccaacgagaaguuccaccagaucgagaaggaguucuccgaggucgagggccgcauccaggaccucgagaaguacgucgaggacaccaagaucgaccucugguccuacaacgccgagcuccucgucgcccucgagaaccagcacaccaucgaccucaccgacuccgagaugaacaagcucuucgagcgcaccaagaagcagcuccgcgagaacgccgaggacaugggcaacggcugcuucaagaucuaccacaagugcgacaacgccugcaucggcuccauccgcaacggcaccuacgaccacgacgucuaccgcgacgaggcccucaacaaccgcuuccagaucaagggcgucgagcucaaguccggcuacaaggacuggauccucuggaucuccuucgccaucuccugcuuccuccucugcgucgcccuccucggcuucaucaugugggccugccagaagggcaacauccgcugcaacaucugcaucuga

SEQ ID NO: 96718 - RNA, 1701 nt, Artificial Sequence; identical to SEQ ID NO: 96279
  derived and/or modified CDS sequence (opt2) from hemagglutinin__InfluenzaA__ABC86007

SEQ ID NO: 96719 - RNA, 1701 nt, Artificial Sequence
  derived and/or modified CDS sequence (opt2) from hemagglutinin__InfluenzaA__ABC86018
augaagaccaucaucgcccucuccuacauccucugccucgucuucgcccagaagcuccccggcaacgacaacuccaccgccacccucugccucggccaccacgccguccccaacggcaccaucgucaagaccaucaccaacgaccagaucgaggucaccaacgccaccgagcucguccaguccuccuccaccggcggcaucugcgacuccccccaccagauccucgacggcgagaacugcaccaucaucgacgcccuccucggcgacccccagugcgacggcuuccagaacaagaagugggaccucuucgucgagcgcuccaaggccuacuccaacugcuaccccuacgacguccccgacuacgccucccuccgcucccucgucgccuccuccggcacccucgaguucaacaacgaguccuucaacuggaccggcgucacccagaacggcaccuccuccgccugcaagcgccgcuccaacaacuccuucuucucccgccucaacuggcucacccaccucaaguucaaguaccccgcccucaacgucaccaugcccaacaacgagaaguucgacaagcucuacaucuggggcguccaccaccccggcaccgacaacgaccagaucucccucuacgcccaggccuccggccgcaucaccgucuccaccaagcgcucccagcagaccgucauccccaacaucggcucccgcccccgcguccgcgacauccccucccgcaucuccaucuacuggaccaucgucaagcccggcgacauccuccucaucaacuccaccggcaaccucaucgccccccgcggcuacuucaagauccgcuccggcaaguccuccaucaugcgcuccgacgcccccaucggcaagugcaacuccgagugcaucacccccaacggcuccauccccaacgacaagcccuuccagaacgucaaccgcaucaccuacggcgccugcccccgcuacgucaagcagaacacccucaagcucgccaccggcaugcgcaacguccccgagaagcagacccgcggcaucuucggcgccaucgccggcuucaucgagaacggcugggagggcauggucgacggcugguacggcuuccgccaccagaacuccgagggcaucggccaggccgccgaccucaaguccacccaggccgccaucaaccagaucaacggcaagcucaaccgccucaucggcaagaccaacgagaaguuccaccagaucgagaaggaguucuccgaggucgagggccgcauccaggaccucgagaaguacgucgaggacaccaagaucgaccucugguccuacaacgccgagcuccucgucgcccucgagaaccagcacaccaucgaccucaccgacuccgagaugaacaagcucuucgagcgcaccaagaagcagcuccgcgagaacgccgaggacaugggcaacggcugcuucaagaucuaccacaagugcgacaacgccugcaucggcuccauccgcaacggcaccuacgaccacgacgucuaccgcgacgaggcccucaacaaccgcuuccagaucaagggcgucgagcucaaguccggcuacaaggacuggauccucuggaucuccuucgccaucuccugcuuccuccucugcgucgcccuccucggcuucaucaugugggccugccagaagggcaacauccgcugcaacaucugcaucuga

SEQ ID NO: 96720 - RNA, 1701 nt, Artificial Sequence; identical to SEQ ID NO: 96279
  derived and/or modified CDS sequence (opt2) from hemagglutinin__InfluenzaA__ABC86029

SEQ ID NO: 96721 - RNA, 1701 nt, Artificial Sequence; identical to SEQ ID NO: 96318
  derived and/or modified CDS sequence (opt2) from hemagglutinin__InfluenzaA__ABC86040

SEQ ID NO: 96722 - RNA, 1701 nt, Artificial Sequence; identical to SEQ ID NO: 96552
  derived and/or modified CDS sequence (opt2) from hemagglutinin__InfluenzaA__ABC86124

SEQ ID NO: 96723 - RNA, 1701 nt, Artificial Sequence; identical to SEQ ID NO: 96629
  derived and/or modified CDS sequence (opt2) from hemagglutinin__InfluenzaA__ABC86137

SEQ ID NO: 96724 - RNA, 1701 nt, Artificial Sequence
  derived and/or modified CDS sequence (opt2) from hemagglutinin__InfluenzaA__ABC97374
augaagaccaucaucgcccucuccuacaucuucugccucguccucggccaggacuuccccggcaacgacaacuccaccgccacccucugccucggccaccacgccguccccaacggcacccucgucaagaccaucaccaacgaccagaucgaggucaccaacgccaccgagcucguccaguccuccuccaccggcaagaucugcaacaacccccaccgcauccucgacggcaucgacugcacccucaucgacgcccuccucggcgacccccacugcgacggcuuccagaacgagaccugggaccucuucgucgagcgcuccaaggccuucuccaacugcuaccccuacgacguccccgacuacgccucccuccgcucccucgucgccuccuccggcacccucgaguucaucaacgagggcuucaccuggaccggcgucacccagaacggcggcuccaacgccugcaagcgcggccccgacuccggcuucuucucccgccucaacuggcucuacaaguccggcuccaccuaccccguccucaacgucaccaugcccaacaacgacaacuucgacaagcucuacaucuggggcguccaccaccccuccaccgaccaggagcagaccucccucuacguccaggccuccggccgcgucaccgucuccaccaagcgcucccagcagaccaucauccccaacaucggcucccgccccuggguccgcggccucuccucccgcaucuccaucuacuggaccaucgucaagcccggcgacauccucgucaucaacuccaacggcaaccucaucgccccccgcggcuacuucaagaugcgcaccggcaaguccuccaucaugcgcuccgacgcccccaucggcaccugcaucuccgagugcaucacccccaacggcuccauccccaacgacaagcccuuccagaacgucaacaagaucaccuacggcgccugccccaaguacgucaagcagaacacccucaagcucgccaccggcaugcgcaacguccccgagaagcagacccgcggccucuucggcgccaucgccggcuucaucgagaacggcugggagggcauggucgacggcugguacggcuuccgccaccagaacuccgagggcaccggccaggccgccgaccucaaguccacccaggccgccaucgaccagaucaacggcaagcucaaccgcgucaucgagaagaccaacgagaaguuccaccagaucgagaaggaguucuccgaggucgagggccgcauccaggaccucgagaaguacgucgaggacaccaagaucgaccucugguccuacaacgccgagcuccucgucgcccucgagaaccagcacaccaucgaccucaccgacuccgagaugaacaagcucuucgagaagacccgccgccagcuccgcgagaacgccgaggacaugggcaacggcugcuuccgcaucuaccacaagugcgacaacgccugcaucggcuccauccgcaacggcaccuacgaccacgacgucuaccgcgacgaggcccucaacaaccgcuuccagaucaagggcgucgagcucaaguccggcuacaaggacuggauccucuggaucuccuucgccaucuccugcuuccuccucugcgucguccuccucggcuucaucaugugggccugccagaagggcaacauccgcugcaacaucugcaucuga

SEQ ID NO: 96725 - RNA, 1701 nt, Artificial Sequence; identical to SEQ ID NO: 96068
  derived and/or modified CDS sequence (opt2) from hemagglutinin__InfluenzaA__ABD15449

SEQ ID NO: 96726 - RNA, 1701 nt, Artificial Sequence
  derived and/or modified CDS sequence (opt2) from hemagglutinin__InfluenzaA__ABD15460
augaagaccaucaucgcccucuccuacauccucugccucgucuucgcccagaagcuccccggcaacgacaacuccaccgccacccucugccucggccaccacgccguccccaacggcaccaucgucaagaccaucaccaacgaccagaucgaggucaccaacgccaccgagcucguccagaucuccuccaccggcggcaucugcgacucccccuaccagauccucgacggcgagaacugcacccucaucgacgcccuccucggcgacccccagugcgacggcuuccagaacaagaagugggaccucuucgucgagcgcuccaaggccuacuccaacugcuaccccuacgacguccccgacuacgccucccuccgcucccucgucgccuccuccggcacccucgaguucaacaacgaguccuucgacuggaccggcgucacccagaacggcaccuccuccgccugcaagcgccgcuccaacaaguccuucuucucccgccucaacuggcucacccaccucaaguacaaguaccccgcccucaacgucaccaugcccaacaacgagaaguucgacaagcucuacaucuggggcguccaccaccccggcaccgacuccgaccagaucucccucuacgcccaggccuccggccgcaucaccgucuccaccaagcgcucccagcagaccgucauccccaacaucggcucccgcccccgcguccgcgacgucuccucccgcaucuccaucuacuggaccaucgucaagcccggcgacauccuccucaucaacuccaccggcaaccucaucgccccccgcggcuacuucaagauccgcuccggcaaguccuccaucaugcgcuccgacgcccccaucggcaagugcaacuccgagugcaucacccccaacggcuccauccccaacgacaagcccuuccagaacgucaaccgcaucaccuacggcgccugcccccgcuacgucaagcagaacacccucaagcucgccaccggcaugcgcaacguccccgagaagcagacccgcggcaucuucggcgccaucgccggcuucaucgagaacggcugggagggcauggucgacggcugguacggcuuccgccaccagaacuccgagggcaccggccaggccgccgaccucaaguccacccaggccgccaucaaccagaucaacggcaagcucaaccgccucaucggcaagaccaacgagaaguuccaccagaucgagaaggaguucuccgaggucgagggccgcauccaggaccucgagaaguacgucgaggacaccaagaucgaccucugguccuacaacgccgagcuccucgucgcccucgagaaccagcacaccaucgaccucaccgacuccgagaugaacaagcucuucgagcgcaccaagaagcagcuccgcgagaacgccgaggacaugggcaacggcugcuucaagaucuaccacaagugcgacaacgccugcaucggcuccauccgcaacggcaccuacgaccacgacgucuaccgcgacgaggcccucaacaaccgcuuccagaucaagggcgucgagcucaaguccggcuacaaggacuggauccucuggaucuccuucgccaucuccugcuuccuccucugcgucgcccuccucggcuucaucaugugggccugccagaagggcaacauccgcugcaacaucugcaucuga

SEQ ID NO: 96727 - RNA, 1701 nt, Artificial Sequence; identical to SEQ ID NO: 96068
  derived and/or modified CDS sequence (opt2) from hemagglutinin__InfluenzaA__ABD15471

SEQ ID NO: 96728 - RNA, 1701 nt, Artificial Sequence; identical to SEQ ID NO: 96068
  derived and/or modified CDS sequence (opt2) from hemagglutinin__InfluenzaA__ABD15482

SEQ ID NO: 96729 - RNA, 1701 nt, Artificial Sequence; identical to SEQ ID NO: 96726
  derived and/or modified CDS sequence (opt2) from hemagglutinin__InfluenzaA__ABD15493

SEQ ID NO: 96730 - RNA, 1701 nt, Artificial Sequence; identical to SEQ ID NO: 96279
  derived and/or modified CDS sequence (opt2) from hemagglutinin__InfluenzaA__ABD15526

SEQ ID NO: 96731 - RNA, 1701 nt, Artificial Sequence; identical to SEQ ID NO: 96488
  derived and/or modified CDS sequence (opt2) from hemagglutinin__InfluenzaA__ABD15537

SEQ ID NO: 96732 - RNA, 1701 nt, Artificial Sequence; identical to SEQ ID NO: 96488
  derived and/or modified CDS sequence (opt2) from hemagglutinin__InfluenzaA__ABD15548

SEQ ID NO: 96733 - RNA, 1701 nt, Artificial Sequence; identical to SEQ ID NO: 96506
  derived and/or modified CDS sequence (opt2) from hemagglutinin__InfluenzaA__ABD15559

SEQ ID NO: 96734 - RNA, 1701 nt, Artificial Sequence; identical to SEQ ID NO: 96488
  derived and/or modified CDS sequence (opt2) from hemagglutinin__InfluenzaA__ABD15570

SEQ ID NO: 96735 - RNA, 1701 nt, Artificial Sequence; identical to SEQ ID NO: 96506
  derived and/or modified CDS sequence (opt2) from hemagglutinin__InfluenzaA__ABD15581

SEQ ID NO: 96736 - RNA, 1701 nt, Artificial Sequence; identical to SEQ ID NO: 96488
  derived and/or modified CDS sequence (opt2) from hemagglutinin__InfluenzaA__ABD15592

SEQ ID NO: 96737 - RNA, 1701 nt, Artificial Sequence; identical to SEQ ID NO: 96488
  derived and/or modified CDS sequence (opt2) from hemagglutinin__InfluenzaA__ABD15603

SEQ ID NO: 96738 - RNA, 1701 nt, Artificial Sequence; identical to SEQ ID NO: 96488
  derived and/or modified CDS sequence (opt2) from hemagglutinin__InfluenzaA__ABD15614

SEQ ID NO: 96739 - RNA, 1701 nt, Artificial Sequence
  derived and/or modified CDS sequence (opt2) from hemagglutinin__InfluenzaA__ABD15625
augaagaccaucaucgcccucuccuacauccucugccucgucuucgcccagaagcuccccggcaacgacaacuccaccgccacccucugccucggccaccacgccguccccaacggcaccaucgucaagaccaucaccaacgaccagaucgaggucaccaacgccaccgagcucguccaguccuccuccaccggcggcaucugcgacuccccccaccagauccucgacggcgagaacugcacccucaucgacgcccuccucggcgacccccagugcgacggcuuccagaacaagaagugggaccucuucgucgagcgcuccaaggccuacuccaacugcuaccccuacgacguccccgacuacgccucccuccgcucccucgucgccuccuccggcacccucgaguucaacaacgaguccuucgacuggaccggcgucacccagaacggcaccuccuccgccugcaagcgccgcuccaacaaguccuucuucucccgccucaacuggcucacccaccucaaguacaaguaccccgcccucaacgucaccaugcccaacaacgagaaguucgacaagcucuacaucuggggcguccaccaccccggcaccgacuccgaccagaucucccucuacgcccaggccuccggccgcaucaccgucuccaccaagcgcucccagcagaccgucauccccaacaucggcucccgcccccgcguccgcgacgucuccucccagaucuccaucuacuggaccaucgucaagcccggcgacauccuccucaucaacuccaccggcaaccucaucgccccccgcggcuacuucaagauccgcuccggcaaguccuccaucaugcgcuccgacgcccccaucggcaagugcaacuccgagugcaucacccccaacggcuccauccccaacgacaagcccuuccagaacgucaaccgcaucaccuacggcgccugcccccgcuacgucaagcagaacacccucaagcucgccaccggcaugcgcaacguccccgagaagcagacccgcggcaucuucggcgccaucgccggcuucaucgagaacggcugggagggcauggucgacggcugguacggcuuccgccaccagaacuccgagggcaccggccaggccgccgaccucaaguccacccaggccgccaucaaccagaucaacggcaagcucaaccgccucaucggcaagaccaacgagaaguuccaccagaucgagaaggaguucuccgaggucgagggccgcauccaggaccucgucaaguacgucgaggacaccaagaucgaccucugguccuacaacgccgagcuccucgucgcccucgagaaccagcacaccaucgaccucaccgacuccgagaugaacaagcucuucgagcgcaccaagaagcagcuccgcgagaacgccgaggacaugggcaacggcugcuucaagaucuaccacaagugcgacaacgccugcaucggcuccauccgcaacggcaccuacgaccacgacgucuaccgcgacgaggcccucaacaaccgcuuccagaucaagggcgucgagcucaaguccggcuacaaggacuggauccucuggaucuccuucgccaucuccugcuuccuccucugcgucgcccuccucggcuucaucaugugggccugccagaagggcaacauccgcugcaacaucugcaucuga

SEQ ID NO: 96740 - RNA, 1701 nt, Artificial Sequence; identical to SEQ ID NO: 96506
  derived and/or modified CDS sequence (opt2) from hemagglutinin__InfluenzaA__ABD15636

SEQ ID NO: 96741 - RNA, 1701 nt, Artificial Sequence; identical to SEQ ID NO: 96686
  derived and/or modified CDS sequence (opt2) from hemagglutinin__InfluenzaA__ABD15680

SEQ ID NO: 96742 - RNA, 1701 nt, Artificial Sequence
  derived and/or modified CDS sequence (opt2) from hemagglutinin__InfluenzaA__ABD15691
augaagaccaucaucgcccucuccuacauccucugccucgucuucgcccagaagcuccccgucaacgacaaguccaccgccacccucugccucggccaccacgccguccccaacggcacccucgucaagaccaucaccaacgaccacaucgaggucaccaacgccaccgagcucguccaguccucccccaccggccgcaucugcgacuccccccaccagauccucgacggcgagaacugcacccucaucgacgcccuccucggcgacccccacugcgacggcuuccagaacaaggagugggaccucuucgucgagcgcuccaccgccuacuccaacugcuaccccuacgacguccccgacuacgccucccuccgcucccucgucgccuccuccggcacccucgaguucaacaacgaguccuucaacuggaccggcgucgcccagaacggcaccuccuccgccugcaagcgccgcuccaucaaguccuucuucucccgccucaacuggcuccaccagcucaaguacaaguaccccgcccucaacgucaccaugcccaacaacgagaaguucgacaagcucuacaucuggggcguccaccaccccuccaccgacuccgaccagaucucccucuacgcccaggccuccggccgcgucaccgucuccaccaagcgcucccagcagaccgucauccccaacaucggcucccgccccuggguccgcggcgucuccucccgcaucuccaucuacuggaccaucgucaagcccggcgacauccuccucaucaacuccaccggcaaccucaucgccccccgcggcuacuucaagauccgcuccggcaaguccuccaucaugcgcuccaacgcccccaucggcaagugcaacuccgagugcaucacccccaacggcuccauccccaacgacaagcccuuccagaacgucaaccgcaucaccuacggcgccugcccccgcuacgucaagcagaacacccucaagcucgccaccggcaugcgcaacguccccgagaagcagacccgcggcaucuucggcgccaucgccggcuucaucgagaacggcugggagggcauggucgacggcugguacggcuuccgccaccagaacuccgagggcaccggccaggccgccgaccucaaguccacccaggccgccaucaaccagaucaacggcaagcucaaccgccucaucgagaagaccaacgagaaguuccaccagaucgagaaggaguucuccgaggucgagggccgcauccaggaccucgagaaguacgucgaggacaccaagaucgaccucugguccuacaacgccgagcuccucgucgcccucgagaaccagcacaccaucgaccucaccgacuccgagaugaacaagcucuucgagcgcacccgcaagcagcuccgcgagaacgccgaggacaugggcaacggcugcuucaagaucuaccacaagugcgacaacgccugcaucggcuccauccgcaacggcaccuacgaccacgacgucuaccgcgacgaggcccucaacaaccgcuuccagaucaagggcgucgagcucaaguccggcuacaaggacuggauccucuggaucuccuucgccaucuccugcuuccuccucugcgucguccuccucggcuucaucaugugggccugccagaagggcaacauccgcugcaacaucugcaucuga

SEQ ID NO: 96743 - RNA, 1701 nt, Artificial Sequence
  derived and/or modified CDS sequence (opt2) from hemagglutinin__InfluenzaA__ABD15702
augaagaccaucaucgcccucuccuacauccucugccucgucuucgcccagaagcuccccggcaacgacaacuccaccgccacccucugccucggccaccacgccguccccaacggcacccucgucaagaccaucaccaacgaccagaucgaggucaccaacgccaccgagcucguccaguccuccuccaccggcggcaucugcgacuccccccaccagauccucgacggcgagaacugcacccucaucgacgcccuccucggcgacccccacugcgacggcuuccagaacaaggagugggaccucuucgucgagcgcuccaaggccuacuccaacugcuaccccuacgacguccccgacuacgccucccuccgcucccucgucgccuccuccggcacccucgaguucaacaacgaguccuucaacuggaccggcgucgcccagaacggcaccuccuccgccugcaagcgccgcuccaacaaguccuucuucucccgccucaacuggcuccaccagcucaaguacaaguaccccgcccucaacgucaccaugcccaacaacgagaaguucgacaagcucuacaucuggggcguccaccaccccuccaccgacuccgaccagaccucccucuacgcccaggcccccggccgcgucaccgucuccaccaagcgcucccagcagaccgucauccccaacaucggcucccgccccuggguccgcggcgucuccucccgcaucuccaucuacuggaccaucgucaagcccggcgacauccuccucaucaacugcaccggcaaccucaucgccccccgcggcuacuucaagauccgcuccggcaaguccuccaucaugcgcuccgacgccuccaucggcaagugcaacuccgagugcaucacccccaacggcuccauccccaacgacaagcccuuccagaacgucaaccgcaucaccuacggcgccugcccccgcuacgucaagcagaacacccucaagcucgccaccggcaugcgcaacguccccgagaagcagacccgcggcaucuucggcgccaucgccggcuucaucgagaacggcugggagggcauggucgacggcugguacggcuuccgccaccagaacuccgagggcaccggccaggccgccgaccucaaguccacccaggccgccaucaaccagaucaacggcaagcucaaccgccucaucgagaagaccaacgagaaguuccaccagaucgagaaggaguucuccgaggucgagggccgcauccaggaccucgagaaguacgucgaggacaccaagaucgaccucugguccuacaacgccgagcuccucgucgcccucgagaaccagcacaccaucgaccucaccgacuccgagaugaacaagcucuucgagcgcaccaagaagcagcuccgcgagaacgccgaggacaugggcaacggcugcuucaagaucuaccacaagugcgacaacgccugcaucggcuccauccgcaacggcaccuacgaccacgacgucuaccgcgacgaggcccucaacaaccgcuuccagaucaagggcgucgagcucaaguccggcuacaaggacuggauccucuggaucuccuucgccaucuccugcuuccuccucugcgucguccuccucggcuucaucaugugggccugccagaagggcaacauccgcugcaacaucugcaucuga

SEQ ID NO: 96744 - RNA, 1701 nt, Artificial Sequence
  derived and/or modified CDS sequence (opt2) from hemagglutinin__InfluenzaA__ABD15724
augaagaccaucaucgcccucuccuacauccucugccucgucuucgcccagaagcuccccggcaacgacaacuccaccgccacccucugccucggccaccacgccguccccaacggcacccucgucaagaccaucaccaacgaccagaucgaggucaccaacgccaccgagcucguccaguccuccuccaccggcggcaucugcgacuccccccaccagauccucgacggcgagaacugcacccucaucgacgcccuccucggcgacccccacugcgacggcuuccagaacaaggagugggaccucuucgucgagcgcuccaaggccuacuccaacugcuaccccuacgacguccccgacuacgccucccuccgcucccucgucgccuccuccggcacccucgaguucaacaacgaguccuucaacuggaccggcgucgcccagaacggcaccuccuccgccugcaagcgccgcuccaacaaguccuucuucucccgccucaacuggcuccaccagcucaaguacaaguaccccgcccucaacgucgccaugcccaacaacgagaaguucgacaagcucuacaucuggggcguccaccaccccuccaccgacuccgaccagaucucccucuacgcccaggcccccggccgcgucaccgucuccaccaagcgcucccagcagaccgucauccccaacaucggcucccgccccuggguccgcggcgucuccucccgcaucuccaucuacuggaccaucgucaagcccggcgacauccuccucaucaacugcaccggcaaccucaucgccccccgcggcuacuucaagauccgcuccggcaaguccuccaucaugcgcuccgacgccuccaucggcaagugcaacuccgagugcaucacccccaacggcuccauccccaacgacaagcccuuccagaacgucaaccgcaucaccuacggcgccugcccccgcuacgucaagcagaacacccucaagcucgccaccggcaugcgcaacguccccgagaagcagacccgcggcaucuucggcgccaucgccggcuucaucgagaacggcugggagggcauggucgacggcugguacggcuuccgccaccagaacuccgagggcaccggccaggccgccgaccucaaguccacccaggccgccaucaaccagaucaacggcaagcucaaccgccucaucgagaagaccaacgagaaguuccaccagaucgagaaggaguucuccgaggucgagggccgcauccaggaccucgagaaguacgucgaggacaccaagaucgaccucugguccuacaacgccgagcuccucgucgcccucgagaaccagcacaccaucgaccucaccgacuccgagaugaacaagcucuucgagcgcaccaagaagcagcuccgcgagaacgccgaggacaugggcaacggcugcuucaagaucuaccacaagugcgacaacgccugcaucggcuccauccgcaacggcaccuacgaccacgacgucuaccgcgacgaggcccucaacaaccgcuuccagaucaagggcgucgagcucaaguccggcuacaaggacuggauccucuggaucuccuucgccaucuccugcuuccuccucugcgucguccuccucggcuucaucaugugggccugccagaagggcaacauccgcugcaacaucugcaucuga

SEQ ID NO: 96745 - RNA, 1701 nt, Artificial Sequence
  derived and/or modified CDS sequence (opt2) from hemagglutinin__InfluenzaA__ABD15746
augaagaccaucaucgcccucuccuacauccucugccucgucuucgcccagaagcuccccgucaacgacaacuccaccgccacccucugccucggccaccacgccguccccaacggcacccucgucaagaccaucaccaacgaccacaucgaggucaccaacgccaccgagcucguccaguccuccuccaccggccgcaucugcgacuccccccaccagauccucgacggcgagaacugcacccucaucgacgcccuccucggcgacccccacugcgacggcuuccagaacaaggagugggaccucuucgucgagcgcuccaccgccuacuccaacugcuaccccuacgacguccccgacuacgccucccuccgcucccucgucgccuccuccggcacccucgaguucaacaacgaguccuucaacuggaccggcgucgcccagaacggcaccuccuccgccugcaagcgccgcuccaucaaguccuucuucucccgccucaacuggcuccaccagcucaaguacaaguaccccgcccucaacgucaccaugcccaacaacgagaaguucgacaagcucuacaucuggggcguccaccaccccuccaccgacuccgaccagaucucccucuacgcccaggccuccggccgcgucaccgucuccaccaagcgcucccagcagaccgucauccccaacaucggcucccgccccuggguccgcggcaucuccucccgcaucuccaucuacuggaccaucgucaagcccggcgacauccuccucaucaacuccaccggcaaccucaucgccccccgcggcuacuucaagauccgcuccggcaaguccuccaucaugcgcuccaacgcccccaucggcaagugcaacuccgagugcaucacccccaacggcuccauccccaacgacaagcccuuccagaacgucaaccgcaucaccuacggcgccugcccccgcuacgucaagcagaacacccucaagcucgccaccggcaugcgcaacguccccgagaagcagacccgcggcaucuucggcgccaucgccggcuucaucgagaacggcugggagggcauggucgacggcugguacggcuuccgccaccagaacuccgagggcaccggccaggccgccgaccucaaguccacccaggccgccaucaaccagaucaacggcaagcucaaccgccucaucgagaagaccaacgagaaguuccaccagaucgagaaggaguucuccgaggucgagggccgcauccaggaccucgagaaguacgucgaggacaccaagaucgaccucugguccuacaacgccgagcuccucgucgcccucgagaaccagcacaccaucgaccucaccgacuccgagaugaacaagcucuucgagcgcacccgcaagcagcuccgcgagaacgccgaggagaugggcaacggcugcuucaagaucuaccacaagugcgacaacgccugcaucggcuccauccgcaacggcaccuacgaccacgacgucuaccgcgacgaggcccucaacaaccgcuuccagaucaagggcgucgagcucaaguccggcuacaaggacuggauccucuggaucuccuucgccaucuccugcuuccuccucugcgucguccuccucggcuucaucaugugggccugccagaagggcaacauccgcugcaacaucugcaucuga

SEQ ID NO: 96746 - RNA, 1701 nt, Artificial Sequence
  derived and/or modified CDS sequence (opt2) from hemagglutinin__InfluenzaA__ABD15757
augaagaccaucaucgcccucuccuacauccucugccucgucuucgcccagaagcuccccgucaacgacaacuccaccgccacccucugccucggccaccacgccguccccaacggcacccucgucaagaccaucaccaacgaccacaucgaggucaccaacgccaccgagcucguccaguccuccuccaccggccgcaucugcgacuccccccaccagauccucgacggcgagaacugcacccucaucgacgcccuccucggcgacccccacugcgacggcuuccagaacaaggagugggaccucuucgucgagcgcuccaccgccuacuccaacugcuaccccuacgacguccccgacuacgccucccuccgcucccucgucgccuccuccggcacccucgaguucaacaacgaguccuucaacuggaccggcgucgcccagaacggcaccuccuccgccugcaagcgccgcuccaucaaguccuucuucucccgccucaacuggcuccaccagcucaaguacaaguaccccgcccucaacgucaccaugcccaacaacgagaaguucgacaagcucuacaucuggggcguccaccaccccuccaccgacuccgaccagaucucccucuacgcccaggccuccggccgcgucaccgucuccaccaagcgcucccagcagaccgucauccccaacaucggcucccgccccuggguccgcggcgucuccucccgcaucuccaucuacuggaccaucgucaagcccggcgacauccuccucaucaacuccaccggcaaccucaucgccccccgcggcuacuucaagauccgcuccggcaaguccuccaucaugcgcuccaacgcccccaucggcaagugcaacuccgagugcaucacccccaacggcuccauccccaacgacaagcccuuccagaacgucaaccgcaucaccuacggcgccugcccccgcuacgucaagcagaacacccucaagcucgccaccggcaugcgcaacguccccgagaagcagacccgcggcaucuucggcgccaucgccggcuucaucgagaacggcugggagggcauggucgacggcugguacggcuuccgccaccagaacuccgagggcaccggccaggccgccgaccucaaguccacccaggccgccaucaaccagaucaacggcaagcucaaccgccucaucgagaagaccaacgagaaguuccaccagaucgagaaggaguucuccgaggucgagggccgcauccaggaccucgagaaguacgucgaggacaccaagaucgaccucugguccuacaacgccgagcuccucgucgcccucgagaaccagcacaccaucgaccucaccgacuccgagaugaacaagcucuucgagcgcacccgcaagcagcuccgcgagaacgccgaggagaugggcaacggcugcuucaagaucuaccacaagugcgacaacgccugcaucggcuccauccgcaacggcaccuacgaccacgacgucuaccgcgacgaggcccucaacaaccgcuuccagaucaagggcgucgagcucaaguccggcuacaaggacuggauccucuggaucuccuucgccaucuccugcuuccuccucugcgucguccuccucggcuucaucaugugggccugccagaagggcaacauccgcugcaacaucugcaucuga

SEQ ID NO: 96747 - RNA, 1701 nt, Artificial Sequence; identical to SEQ ID NO: 96686
  derived and/or modified CDS sequence (opt2) from hemagglutinin__InfluenzaA__ABD15779

SEQ ID NO: 96748 - RNA, 1701 nt, Artificial Sequence; identical to SEQ ID NO: 96686
  derived and/or modified CDS sequence (opt2) from hemagglutinin__InfluenzaA__ABD15790

SEQ ID NO: 96749 - RNA, 1701 nt, Artificial Sequence; identical to SEQ ID NO: 96686
  derived and/or modified CDS sequence (opt2) from hemagglutinin__InfluenzaA__ABD16292

SEQ ID NO: 96750 - RNA, 1701 nt, Artificial Sequence; identical to SEQ ID NO: 96669
  derived and/or modified CDS sequence (opt2) from hemagglutinin__InfluenzaA__ABD16303

SEQ ID NO: 96751 - RNA, 1701 nt, Artificial Sequence; identical to SEQ ID NO: 96669
  derived and/or modified CDS sequence (opt2) from hemagglutinin__InfluenzaA__ABD16325

SEQ ID NO: 96752 - RNA, 1701 nt, Artificial Sequence
  derived and/or modified CDS sequence (opt2) from hemagglutinin__InfluenzaA__ABD16336
augaagaccaucaucgcccucuccuacacccucugccucgucuucgcccagaagcuccccggcaacgacaacuccaccgccacccucugccucggccaccacgccguccccaacggcaccaucgucaagaccaucaccaacgaccagaucgaggucaccaacgccaccgagcucguccaguccuccuccaccggcggcaucugcgacuccccccaccagauccucgacggcgagaacugcacccucaucgacgcccuccucggcgacccccagugcgacggcuuccagaacaagaagugggaccucuucgucgagcgcuccaaggccuacuccaacugcuaccccuacgacguccccgacuacgccucccuccgcucccucaucgccuccuccggcacccucgaguucaacaacgaguccuucaacuggaccggcgucacccagaacggcaccuccuccgccugcaagcgccgcuccaacuccuccuucuucucccgccucaacuggcucacccaccucaaguucaaguaccccgcccucaacgucaccaugcccaacaacgaggaguucgacaagcucuacaucuggggcguccaccaccccggcaccuacaacgaccagaucucccucuacgcccaggccuccggccgcaucaccgucuccaccaagcgcucccagcagaccgucauccccaacaucggcucccgcccccgcguccgcgacauccccucccgcaucuccaucuacuggaccaucgucaagcccggcgacauccuccucaucaacuccaccggcaaccucaucgccccccgcggcuacuucaagauccgcuccggcaaguccuccaucaugcgcuccgacgcccccaucggcaagugcaacuccgagugcaucacccccaacggcuccauccccaacgacaagcccuuccagaacgucaaccgcaucaccuacggcgccugcccccgcuacgucaagcagaacacccucaagcucgccaccggcaugcgcaacguccccgagaagcagacccgcggcaucuucggcgccaucgccggcuucaucgagaacggcugggagggcauggucgacggcugguacggcuuccgccaccagaacuccgagggcaucggccaggccgccgaccucaaguccacccaggccgccaucgaccagaucaacggcaagcucaaccgccucaucggcaagaccaacgagaaguuccaccagaucgagaaggaguucuccgaggucgagggccgcauccaggaccucgagaaguacgucgaggacaccaagaucgaccucugguccuacaacgccgagcuccucgucgcccucgagaaccagcacaccaucgaccucaccgacuccgagaugaacaagcucuucgagcgcaccaagaagcagcuccgcgagaacgccgaggacaugggcaacggcugcuucaagaucuaccacaagugcgacaacgccugcaucggcuccauccgcaacggcaccuacgaccacgacgucuaccgcgacgaggcccucaacaaccgcuuccagaucaagggcgucgagcucaaguccggcuacaaggacuggauccucuggaucuccuucgccaucuccugcuuccuccucugcgucgcccuccucggcuucaucaugugggccugccagaagggcaacauccgcugcaacaucugcaucuga

SEQ ID NO: 96753 - RNA, 1701 nt, Artificial Sequence; identical to SEQ ID NO: 96669
  derived and/or modified CDS sequence (opt2) from hemagglutinin__InfluenzaA__ABD16347

SEQ ID NO: 96754 - RNA, 1701 nt, Artificial Sequence
  derived and/or modified CDS sequence (opt2) from hemagglutinin__InfluenzaA__ABD16358
augaagaccaucaucgcccucuccuacauccucugccucgucuucgcccagaagcuccccggcaacgacaacuccaccgccacccucugccucggccaccacgccguccccaacggcaccaucgucaagaccaucaccaacgaccagaucgaggucaccaacgccaccgagcucguccaguccuccuccaccggcggcaucugcgacuccccccaccagauccucgacggcgagaacugcacccucaucgacgcccuccucggcgacccccagugcgacggcuuccagaacaagaagugggaccucuucgucgagcgcuccaaggccuacuccaacugcuaccccuacgacguccccgacuacgccucccuccgcucccucaucgccuccuccggcacccucgaguucaacaacgaguccuucaacuggaccggcgucacccagaacggcaccuccuccgccugcaagcgccgcuccaacuccuccuucuucucccgccucaacuggcucacccaccucaaguucaaguaccccgcccucaacgucaccaugcccaacaacgaggaguucgacaagcucuacaucuggggcguccaccaccccggcaccuacaacgaccagaucucccucuacgcccaggccuccggccgcaucaccgucuccaccaagcgcucccagcagaccgucauccccaacaucggcucccgcccccgcguccgcgacauccccucccgcaucuccaucuacuggaccaucgucaagcccggcgacauccuccucaucaacuccaccggcaaccucaucgccccccgcggcuacuucaagauccgcuccggcaaguccuccaucaugcgcuccgacgcccccaucggcaagugcaacuccgagugcaucacccccaacggcuccauccccaacgacaagcccuuccagaacgucaaccgcaucaccuacggcgccugcccccgcuacgucaagcagaacacccucaagcucgccaccggcaugcgcaacguccccgagaagcagacccgcggcaucuucggcgccaucgccggcuucaucgagaacggcugggagggcauggucgacggcugguacggcuuccgccaccagaacuccgagggcaucggccaggccgccgaccucaaguccacccaggccgccaucgaccagaucaacggcaagcucaaccgccucaucggcaagaccaacgagaaguuccaccagaucgagaaggaguucuccgaggucgagggccgcauccaggaccucgagaaguacgucgaggacaccaagaucgaccucugguccuacaacgccgagcuccucgucgcccucgagaaccagcacaccaucgaccucaccgaccucgagaugaacaagcucuucgagcgcaccaagaagcagcuccgcgagaacgccgaggacaugggcaacggcugcuucaagaucuaccacaagugcgacaacgccugcaucggcuccauccgcaacggcaccuacgaccacgacgucuaccgcgacgaggcccucaacaaccgcuuccagaucaagggcgucgagcucaaguccggcuacaaggacuggauccucuggaucuccuucgccaucuccugcuuccuccucugcgucgcccuccucggcuucaucaugugggccugccagaagggcaacauccgcugcaacaucugcaucuga

SEQ ID NO: 96755 - RNA, 1701 nt, Artificial Sequence; identical to SEQ ID NO: 96669
  derived and/or modified CDS sequence (opt2) from hemagglutinin__InfluenzaA__ABD16472

SEQ ID NO: 96756 - RNA, 1701 nt, Artificial Sequence; identical to SEQ ID NO: 96669
  derived and/or modified CDS sequence (opt2) from hemagglutinin__InfluenzaA__ABD16483

SEQ ID NO: 96757 - RNA, 1701 nt, Artificial Sequence; identical to SEQ ID NO: 96666
  derived and/or modified CDS sequence (opt2) from hemagglutinin__InfluenzaA__ABD16494

SEQ ID NO: 96758 - RNA, 1701 nt, Artificial Sequence; identical to SEQ ID NO: 96669
  derived and/or modified CDS sequence (opt2) from hemagglutinin__InfluenzaA__ABD16505

SEQ ID NO: 96759 - RNA, 1701 nt, Artificial Sequence
  derived and/or modified CDS sequence (opt2) from hemagglutinin__InfluenzaA__ABD16516
augaagaccaucaucgcccucuccuacauccucugcauggucuucgcccagaagcuccccggcaacgacaacuccaccgccacccucugccucggccaccacgccguccccaacggcaccaucgucaagaccaucaccaacgaccagaucgaggucaccaacgccaccgagcucguccaguccuccuccaccggcggcaucugcgacuccccccaccagauccucgacggcgagaacugcacccucaucgacgcccuccucggcgacccccagugcgacggcuuccagaacaagaagugggaccucuucaucgagcgcuccaaggccuacuccaacugcuaccccuacgacguccccgacuacgccucccuccgcucccucgucgccuccuccggcacccucgaguucaacaacgaguccuucaacuggaccggcgucacccagaacggcaccuccuccgccugcaagcgccgcuccaacaacuccuucuucucccgccucaacuggcucacccaccucaaguucaaguaccccgcccucaacgucaccaugcccaacaacgagaaguucgacaagcucuacaucuggggcguccaccaccccggcaccgacaacgaccagaucucccucuacgcccaggccuccggccgcaucaccgucuccaccaagcgcucccagcagaccgucauccccaacaucggcucccgcccccgcguccgcgacauccccucccgcaucuccaucuacuggaccaucgucaagcccggcgacauccuccucaucaacuccaccggcaaccucaucgccccccgcggcuacuucaagauccgcuccggcaaguccuccaucaugcgcuccgacgcccccaucgacaagugcaacuccgagugcaucacccccaacggcuccauccccaacgacaagcccuuccagaacgucaaccgcaucaccuacggcgccugcccccgcuacgucaagcagaacacccucaagcucgccaccggcaugcgcaacguccccgagaagcagacccgcggcaucuucggcgccaucgccggcuucaucgagaacggcugggagggcauggucgacggcugguacggcuuccgccaccagaacuccgagggcaucggccaggccgccgaccucaaguccacccaggccgccaucaaccagaucaacggcaagcucaaccgccucaucggcaagaccaacgagaaguuccaccagaucgagaaggaguucuccgaggucgagggccgcauccaggaccucgagaaguacgucgaggacaccaaggucgaccucugguccuacaacgccgagcuccucgucgcccucgagaaccagcacaccaucgaccucaccgacuccgagaugaacaagcucuucgagcgcaccaagaagcagcuccgcgagaacgccgaggacaugggcaacggcugcuucaagaucuaccacaagugcgacaacgccugcaucggcuccauccgcaacggcaccuacgaccacgacgucuaccgcgacgaggcccucaacaaccgcuuccagaucaagggcgucgagcucaaguccggcuacaaggacuggauccucuggaucuccuucgccaucuccugcuuccuccucugcgucgcccuccucggcuucaucaugugggccugccagaagggcaacauccgcugcaacaucugcaucuga

SEQ ID NO: 96760 - RNA, 1701 nt, Artificial Sequence
  derived and/or modified CDS sequence (opt2) from hemagglutinin__InfluenzaA__ABD16527
augaagaccaucaucgcccucuccuacauccucugccucgucuucgcccagaagcuccccgagaacgacaacuccaccgccacccucugccucggccaccacgccguccccaacggcaccaucgucaagaccaucaccaacgaccagaucgaggucaccaacgccaccgagcucguccaguccuccuccaccggcggcaucugcgacuccccccaccagauccucgacggcgagaacugcacccucaucgacgcccuccucggcgacccccagugcgacggcuuccagaacaagaagugggaccucuucgucgagcgcuccaaggccuacuccaacugcuaccccuacgacguccccgaccacgccucccuccgcucccucgucgccuccuccggcacccucgaguucaacaacgaguccuucgacuggaccggcgucacccagaacggcaccuccuccgccugcaagcgccgcuccaacaaguccuucuucucccgccucaacuggcucacccaccucaaguacaaguaccccgcccucaacgucaccaugcccaacaacgagaaguucgacaagcucuacaucuggggcguccaccaccccggcaccgacuccgaccagaucucccucuacgcccaggccuccggccgcaucaccgucuccaccaagcgcucccagcagaccgucauccccaacaucggcucccgcccccgcguccgcgacgucuccucccgcaucuccaucuacuggaccaucgucaagcccggcgacauccuccucaucaacuccaccggcaaccucaucgccccccgcggcuacuucaagauccgcuccggcaaguccuccaucaugcgcuccgacgcccccaucggcaagugcaacuccgagugcaucacccccaacggcuccauccccaacgacaagcccuuccagaacgucaaccgcaucaccuacggcgccugcccccgcuacgucaagcagaacacccucaagcucgccaccggcaugcgcaacguccccgagaagcagacccgcggcaucuucggcgccaucgccggcuucaucgagaacggcugggagggcauggucgacggcugguacggcuuccgccaccagaacuccgagggcaccggccaggccgccgaccucaaguccacccaggccgccaucaaccagaucaacggcaagcucaaccgccucaucggcaagaccaacgagaaguuccaccagaucgagaaggaguucuccgaggucgagggccgcauccaggaccucgagaaguacgucgaggacaccaagaucgaccucugguccuacaacgccgagcuccucgucgcccucgagaaccagcacaccaucgaccucaccgacuccgagaugaacaagcucuucgagcgcaccaagaagcagcuccgcgagaacgccgaggacaugggcaacggcugcuucaagaucuaccacaagugcgacaacgccugcaucggcuccauccgcaacggcaccuacgaccacgacgucuaccgcgacgaggcccucaacaaccgcuuccagaucaagggcgucgagcucaaguccggcuacaaggacuggauccucuggaucuccuucgccaucuccugcuuccuccucugcgucgcccuccucggcuucaucaugugggccugccagaagggcaacauccgcugcgacaucugcaucuga

SEQ ID NO: 96761 - RNA, 1701 nt, Artificial Sequence; identical to SEQ ID NO: 96552
  derived and/or modified CDS sequence (opt2) from hemagglutinin__InfluenzaA__ABD16538

SEQ ID NO: 96762 - RNA, 1701 nt, Artificial Sequence
  derived and/or modified CDS sequence (opt2) from hemagglutinin__InfluenzaA__ABD16549
augaagaccaucaucgcccucuccuacauccucugccucgucuucgcccagaagcuccccggcaacgacaacuccaccgccacccucugccucggccaccacgccguccccaacggcaccaucgucaagaccaucaccaacgaccagaucgaggucaccaacgccaccgagcucguccaguccuccuccaccggcggcaucugcgacuccccccaccagauccucgacggcgagaacugcacccucaucgacgcccuccucggcgacccccagugcgacggcuuccagaacaagaagugggaccucuucgucgagcgcuccaaggccuacuccaacugcuaccccuacgacguccccgacuacgccucccuccgcucccucaucgccuccuccggcacccucgaguucaacaacgaguccuucaacuggaccggcgucacccagaacggcaccuccuccgccugcaagcgccgcuccaacuccuccuucuucucccgccucaacuggcucacccaccucaaguucaaguaccccgcccucaacgucaccaugcccaacaacgaggaguucgacaagcucuacaucuggggcguccaccaccccggcaccuacaacgaccagaucucccucuacgcccaggccuccggccgcaucaccgucuccaccaagcgcucccagcagaccgucauccccaacaucggcucccgcccccgcguccgcgacauccccucccgcaucuccaucuacuggaccaucgucaagcccggcgacauccuccucaucaacuccaccggcaaccucaucgccccccgcggcuacuucaagauccgcuccggcaaguccuccaucaugcgcuccgacgcccccaucggcaagugcaacuccgagugcaucacccccaacggcuccauccccaacgacaagcccuuccagaacgucaaccgcaucaccuacggcgccugcccccgcuacgucaagcagaacacccucaagcucgccaccggcaugcgcaacguccccgagaagcagacccgcggcaucuucggcgccaucgccggcuucaucgagaacggcugggagggcauggucgacggcugguacggcuuccgccaccagaacuccgagggcaucggccaggccgccgaccucaaguccacccaggccgccaucgaccagaucaacggcaagcucaaccgccucaucggcaagaccaacgagaaguuccaccagaucgagaaggaguucuccgaggucgagggccgcauccaggaccucgagaaguacgucgaggacaccaagaucgaccucugguccuacaacgccgagcuccucgucgcccucgagaaccagcacaccaucgaccucaccgacuccgagaugaacaagcucuucgagcgcaccaagaagcagcuccgcgagaacgccgaggacaugggcaacggcugcuucaagaucuaccacaagugcgacaacgccugcaucggcuccauccgcaacggcaccuacgaccacgacgucuaccgcgacgaggcccucaacaaccgcuuccagaucaagggcgucgagcucaaguccggcuacaaggacuggauccucuggaucuccuucgccaucuccugcuuccuccucugcgucgcccuccucggcuucaucgucugggccugccagaagggcaacauccgcugcaacaucugcaucuga

SEQ ID NO: 96763 - RNA, 1701 nt, Artificial Sequence; identical to SEQ ID NO: 96666
  derived and/or modified CDS sequence (opt2) from hemagglutinin__InfluenzaA__ABD16560

SEQ ID NO: 96764 - RNA, 1701 nt, Artificial Sequence
  derived and/or modified CDS sequence (opt2) from hemagglutinin__InfluenzaA__ABD16571
augaagaccaucaucgcccucuccuacaucuucugccucgucgucgcccagaagcuccccggcaacgacaacuccaccgccacccucugccucggccaccacgccguccccaacggcaccaucgucaagaccaucaccaacgaccagaucgaggucaccaacgccaccgagcucguccaguccuccuccaccggccgcaucugcaacuccccccaccgcauccucgacggcaagaacugcacccucaucgacgcccuccucggcgacccccacugcgacuccuuccagaacaaggagugggaccucuucgucgagcgcuccaaggccuacuccaacugcuaccccuacgacguccccgacuacgccucccuccgcucccucgucgccuccuccggcacccucgaguucaucaacgaggacuucaacuggaccggcgucgcccaguccggcggcuccuacgccugcaagcgcggcuccgucaacuccuucuucucccgccucaacuggcuccacgaguccgaguacaaguaccccgcccucaacgucaccaugcccaacaacggcaaguucgacaagcucuacaucuggggcguccaccaccccuccaccgaccgcgagcagaccaaccucuacguccgcgccuccggccgcgucaccgucuccaccaagcgcucccagcagaccgucauccccaacaucggcucccgccccuggguccgcggccucuccucccgcaucuccaucuacuggaccaucgucaagcccggcgacauccuccucaucaacuccaccggcaaccucaucgccccccgcggcuacuucaagauccgcaccggcaaguccuccaucaugcgcuccgacgcccccaucggcaccugcuccuccgagugcaucacccccaacggcuccauccccaacgacaagcccuuccagaacgucaaccgcaucaccuacggcgccugcccccgcuacgucaagcagaacacccucaagcucgccaccggcaugcgcaacguccccgagaagcagacccgcggcaucuucggcgccaucgccggcuucaucgagaacggcugggagggcauggucgacggcugguacggcuuccgccaccagaacuccgagggcaccggccaggccgccgaccucaaguccacccaggccgccaucgaccagaucaacggcaagcucaaccgccucaucgagaagaccaacgagaaguuccaccagaucgagaaggaguucuccgaggucgagggccgcauccaggaccucgagaaguacgucgaggacaccaagaucgaccucugguccuacaacgccgagcuccucgucgcccucgagaaccagcacaccaucgaccucaccgacuccgagaugaacaagcucuucgagaagacccgcaagcagcuccgcgagaacgccgaggacaugggcaacggcugcuucaagaucuaccacaagugcgacaacgccugcaucggcuccauccgcaacggcaccuacgaccacgacgucuaccgcgacgaggcccucaacaaccgcuuccagaucaagggcgucgagcucaaguccggcuacaaggacuggauccucuggaucuccuucgccaucuccugcuuccuccucugcgucguccuccucggcuucaucaugugggccugccagaagggcaacauccgcugcaacaucugcaucuga

SEQ ID NO: 96765 - RNA, 1701 nt, Artificial Sequence
  derived and/or modified CDS sequence (opt2) from hemagglutinin__InfluenzaA__ABD16718
augaagaccaucaucgcccucuccuacaucuucugccucgucuucgcccagaagcuccccggcaacgacaacuccaccgccacccucugccucggccaccacgccguccccaacggcacccucgucaagaccaucaccaacgaccagaucgaggucaccaacgccaccgagcucguccaguccuccuccaccggccgcaucugcgacuccccccaccgcauccucgacggcaagaacugcacccucaucgacgcccuccucggcgacccccacugcgacggcuuccagaacgagaagugggaccucuucaucgagcgcuccaaggccuucuccaacugcuaccccuacgacguccccgacuacgccucccuccgcucccucgucgccuccuccggcacccucgaguucaucaacgagggcuucaacuggaccggcgucacccaguccggcggcuccuacgccugcaagcgcggcuccgucaacuccuucuucucccgccucaacuggcucuacgaguccgaguacaaguaccccgcccucaacgucaccaugcccaacaacggcaaguucgacaagcucuacaucuggggcguccaccaccccaucaccgagaaggagcagaccaaccucuacguccgcgccuccggccgcgucaccgucuccaccaagcgcucccagcagaccgucauccccaacaucggcucccgccccuggguccgcggccucuccucccgcaucuccaucuacuggaccaucgucaagcccggcgacauccuccucaucaacuccaccggcaaccucaucgccccccgcggcuacuucaagauccgcaccggcaaguccuccaucaugcgcuccgacgcccccaucggcaccugcuccuccgagugcaucacccccaacggcuccauccccaacgacaagcccuuccagaacgucaacaagaucaccuacggcgccugcccccgcuacgucaagcagaacacccucaagcucgccaccggcaugcgcaacguccccgagaagcagacccgcggcaucuucggcgccaucgccggcuucaucgagaacggcugggagggcauggucgacggcugguacggcuuccgccaccagaacuccgagggcaccggccaggccgccgaccucaaguccacccaggccgccaucgaccagaucaacggcaagcucaaccgccucaucgagaagaccaacgagaaguuccaccagaucgagaaggaguucuccgaggucgagggccgcauccaggaccucgagaaguacgucgaggacaccaagaucgaccucugguccuacaacgccgagcuccucgucgcccucgagaaccagcacaccaucgaccucaccgacuccgagaugaacaagcucuucgagaagacccgcaagcagcuccgcgagaacgccgaggacaugggcaacggcugcuucaagaucuaccacaagugcgacaacgccugcaucggcuccauccgcaacggcaccuacgaccacgacgucuaccgcgacgaggcccucaacaaccgcuuccagaucaagggcgucgagcucaaguccggcuacaaggacuggauccucuggaucuccuucgccaucuccugcuuccuccucugcgucguccuccucggcuucaucaugugggccugccagaagggcaacauccgcugcaacaucugcaucuga

SEQ ID NO: 96766 - RNA, 1701 nt, Artificial Sequence
  derived and/or modified CDS sequence (opt2) from hemagglutinin__InfluenzaA__ABD16729
augaagaccaucaucgcccucuccuacaucuucugccucgucuucgcccagaagcuccccggcaacgacaacuccaccgccacccucugccucggccaccacgccguccccaacggcacccucgucaagaccaucaccaacgaccagaucgaggucaccaacgccaccgagcucguccaguccuccuccaccggccgcaucugcgacuccccccaccgcauccucgacggcaagaacugcacccucaucgacgcccuccucggcgacccccacugcgacggcuuccagaacgagaagugggaccucuucgucgagcgcuccaaggccuucuccaacugcuaccccuacgacguccccgacuacgccucccuccgcucccucgucgccuccuccggcacccucgaguucaucaacgagggcuucaacuggaccggcgucacccagaacggcggcuccuacaccugcaagcgcggcuccgucaacuccuucuucucccgccucaacuggcucuacgaguccgaguccaaguaccccguccucaacgucaccaugcccaacaacggcaaguucgacaagcucuacaucuggggcguccaccaccccuccaccgacaaggagcagaccaaccucuacguccgcgccuccggcaaggucaccgucuccaccaagcgcucccagcagaccgucauccccaacaucggcucccgccccuggguccgcggccucuccucccgcaucuccaucuacuggaccaucgucaagcccggcgacauccuccucaucaacuccaccggcaaccucaucgccccccgcggcuacuucaagauccgcaccggcaaguccuccaucaugcgcuccgacgcccccaucggcaccugcuccuccgagugcaucacccccaacggcuccauccccaacgacaagcccuuccagaacgucaacaagaucaccuacggcgccugcccccgcuacgucaagcagaacacccucaagcucgccaccggcaugcgcaacguccccgagaagcagacccgcggcaucuucggcgccaucgccggcuucaucgagaacggcugggagggcauggucgacggcugguacggcuuccgccaccagaacuccgagggcaccggccaggccgccgaccucaaguccacccaggccgccaucgaccagaucaacggcaagcucaaccgccucaucgagaagaccaacgagaaguuccaccagaucgagaaggaguucuccgaggucgagggccgcauccaggaccucgagaaguacgucgaggacaccaagaucgaccucugguccuacaacgccgagcuccucgucgcccucgagaaccagcacaccaucgaccucaccgacuccgagaugaacaagcucuucgagaagacccgcaagcagcuccgcgagaacgccgaggacaugggcaacggcugcuucaagaucuaccacaagugcgacaacgccugcaucggcuccauccgcaacggcaccuacgaccacgacgucuaccgcgacgaggcccucaacaaccgcuuccagaucaagggcgucgagcucaaguccggcuacaaggacuggauccucuggaucuccuucgccaucuccugcuuccuccucugcgucguccuccucggcuucaucaugugggccugccagaagggcaacauccgcugcaacaucugcaucuga

SEQ ID NO: 96767 - RNA, 1701 nt, Artificial Sequence
  derived and/or modified CDS sequence (opt2) from hemagglutinin__InfluenzaA__ABD16751
augaagaccaucaucgcccucuccuacaucuucugccucgucuucgcccaggaccuccccggcaacgacaacuccaccgccacccucugccucggccaccacgccguccccaacggcacccucgucaagaccaucaccaacgaccagaucgaggucaccaacgccaccgagcucguccacuccuccuccaccggcaagaucugcgacaacccccaccgcauccucgacggcaucaacugcacccucaucgacgcccuccucggcgacccccacugcgacggcuuccagaacgagaagugggaccucuucgucgagcgcuccaaggccuucuccaacugcuaccccuacgacguccccgacuacgccucccuccgcucccucgucgccuccuccggcacccucgaguucaucaacgagggcuucaacuggaccggcgucacccagaacggcggcuccuccgccugcaagcgcggccccgacaacggcuucuucucccgccucaacuggcucuacaaguccggcuccaccuaccccguccagaacgucaccaugcccaacaacgacaacuccgacaagcucuacaucuggggcguccaccaccccuccaccgacaaggagcagaccgaccucuacguccaggccuccggcaaggucaccgucuccaccaagcgcucccagcagaccgucauccccaacgucggcucccgccccuggguccgcggccucuccucccgcgucuccaucuacuggaccaucgucaagcccggcgacauccucgucaucaacuccaacggcaaccucaucgccccccgcggcuacuucaagaugcgcaccggcaaguccuccaucaugcgcuccgacgcccccaucggcaccugcuccuccgagugcaucacccccaacggcuccauccccaacgacaagcccuuccagaacgucaacaagaucaccuacggcgccugccccaaguacgucaagcagaacacccucaagcucgccaccggcaugcgcaacguccccgagaagcagacccgcggcaucuucggcgccaucgccggcuucaucgagaacggcugggagggcaugaucgacggcugguacggcuuccgccaccagaacuccgagggcaccggccaggccgccgaccucaaguccacccaggccgccaucgaccagaucaacggcaagcucaaccgcgucaucgagaagaccaacgagaaguuccaccagaucgagaaggaguucuccgaggucgagggccgcauccaggaccucgagaaguacgucgaggacaccaagaucgaccucugguccuacaacgccgagcuccucgucgcccucgagaaccagcacaccaucgaccucaccgacuccgagaugaacaagcucuucgagaagacccgccgccagcuccgcgagaacgccgaggacaugggcaacggcugcuucaagaucuaccacaagugcgacaacgccugcaucggcuccauccgcaacggcaccuacgaccacgacgucuaccgcgacgaggcccucaacaaccgcuuccagaucaagggcgucgagcucaaguccggcuacaaggacuggauccucuggaucuccuucgccaucuccugcuuccuccucugcgucguccuccucggcuucaucaugugggccugccagaagggcaacauccgcugcaacaucugcaucuga

SEQ ID NO: 96768 - RNA, 1701 nt, Artificial Sequence; identical to SEQ ID NO: 96629
  derived and/or modified CDS sequence (opt2) from hemagglutinin__InfluenzaA__ABD16762

SEQ ID NO: 96769 - RNA, 1701 nt, Artificial Sequence; identical to SEQ ID NO: 96341
  derived and/or modified CDS sequence (opt2) from hemagglutinin__InfluenzaA__ABD17323

SEQ ID NO: 96770 - RNA, 1701 nt, Artificial Sequence; identical to SEQ ID NO: 96598
  derived and/or modified CDS sequence (opt2) from hemagglutinin__InfluenzaA__ABD38134

SEQ ID NO: 96771 - RNA, 1698 nt, Artificial Sequence; identical to SEQ ID NO: 96337
  derived and/or modified CDS sequence (opt2) from hemagglutinin__InfluenzaA__ABD60779

SEQ ID NO: 96772 - RNA, 1701 nt, Artificial Sequence
  derived and/or modified CDS sequence (opt2) from hemagglutinin__InfluenzaA__ABD60790
augaagaccaucaucgcccucuccuacaucuucugccucguccucggccaggacuuccccggcaacgacaacuccaccgccacccucugccucggccaccacgccguccccaacggcacccucgucaagaccaucaccaacgaccagaucgaggucaccaacgccaccgagcucguccaguccuccuccaccggcaagaucugcaacaacccccaccgcauccucgacggcaucgacugcacccucaucgacgcccuccucggcgacccccacugcgacggcuuccagaacgagaccugggaccucuucgucgagcgcuccaaggccuucuccaacugcuaccccuacgacguccccgacuacgccucccuccgcucccucgucgccuccuccggcacccucgaguucaucaacgagggcuucaccuggaccggcgucacccagaacggcggcuccaacgccugcaagcgcggccccgacuccggcuucuucucccgccucaacuggcucuacaaguccggcuccaccuaccccguccucaacgucaccaugcccaacaacgacaacuucgacaagcucuacaucuggggcguccaccaccccuccaccgaccaggagcagaccucccucuacguccaggccuccggccgcgucaccgucuccaccaagcgcucccagcagaccaucauccccaacaucggcucccgccccuggguccgcggccucuccucccgcaucuccaucuacuggaccaucgucaagcccggcgacauccucaucaucaacuccaacggcaaccucaucgccccccgcggcuacuucaagaugcgcaccggcaaguccuccaucaugcgcuccgacgcccccaucggcaccugcaucuccgagugcaucacccccaacggcuccauccccaacgacaagcccuuccagaacgucaacaagaucaccuacggcgccugccccaaguacgucaagcagaacacccucaagcucgccaccggcaugcgcaacguccccgagaagcagacccgcggcaucuucggcgccaucgccggcuucaucgagaacggcugggagggcaugaucgacggcugguacggcuuccgccaccagaacuccgagggcaccggccaggccgccgaccucaaguccacccaggccgccaucgaccagaucaacggcaagcucaaccgcaucaucgagaagaccaacgagaaguuccaccagaucgagaaggaguucuccgaggucgagggccgcauccaggaccucgagaaguacgucgaggacaccaagaucgaccucugguccuacaacgccgagcuccucgucgcccucgagaaccagcacaccaucgaccucaccgacuccgagaugaacaagcucuucgagaagacccgccgccagcuccgcgagaacgccgaggacaugggcaacggcugcuucaagaucuaccacaagugcgacaacgccugcaucggcuccauccgcaacggcaccuacgaccacgacgucuaccgcgacgaggcccucaacaaccgcuuccagaucaagggcgucgagcucaaguccggcuacaaggacuggauccucuggaucuccuucgccaucuccugcuuccuccucugcgucguccuccucggcuucaucaugugggccugccagaagggcaacauccgcugcaacaucugcaucuga

SEQ ID NO: 96773 - RNA, 1701 nt, Artificial Sequence
  derived and/or modified CDS sequence (opt2) from hemagglutinin__InfluenzaA__ABD60801
augaagaccaucaucgcccucuccuacauccucugccucgucuucgcccagaagcuccccggcaacgacaacuccaccgccacccucugccucggccaccacgccguccccaacggcacccucgucaagaccaucaccaacgaccagaucgaggucaccaacgccaccgagcucguccaguccuccuccaccggccgccucugcgacuccccccaccgcauccucgacggcaagaacugcacccucaucgacgcccuccucggcgacccccacugcgacggcuuccagaacaaggagugggaccucuucgucgagcgcuccaaggccuacuccaacugcuaccccuacgacguccccgacuacgccucccuccgcucccucgucgccuccuccggcacccucgaguucaucaacgaggacuucaacuggaccggcgucgcccaggacggcggcuccuacgccugccgccgcggcuccgucaacuccuucuucucccgccucaacuggcuccacaagcucgaguacaaguaccccgcccucaacgucaccaugcccaacaacggcaaguucgacaagcucuacaucuggggcguccaccaccccuccaccgacuccgaccagaccucccucuacguccgcgccuccggccgcgucaccgucuccaccaagcgcucccagcagaccgucauccccaacaucggcucccgccccuggguccgcggccaguccucccgcauguccaucuacuggaccaucgucaagcccggcgacauccuccucaucaacuccaccggcaaccucaucgccccccgcggcuacuucaagauccgcaacggcaaguccuccaucaugcgcuccgacgcccccaucggcaacugcuccuccgagugcaucacccccaacggcuccauccccaacgacaagcccuuccagaacgucaaccgcaucaccuacggcgccugcccccgcuacgucaagcagcacacccucaagcucgccaccggcaugcgcaacguccccgagaagcagacccgcggcaucuucggcgccaucgccggcuucaucgagaacggcugggagggcauggucgacggcugguacggcuuccgccaccagaacuccgagggcaccggccaggccgccgaccucaaguccacccaggccgccaucgaccagaucaacggcaagcucaaccgccucaucgagaagaccaacgagaaguuccaccagaucgagaaggaguucuccgaggucgagggccgcauccaggaccucgagaaguacgucgaggacaccaagaucgaccucugguccuacaacgccgagcuccucgucgcccucgagaaccagcacaccaucgaccucaccgacuccgagaugaacaagcucuucgagcgcacccgcaagcagcuccgcgagaacgccgaggacaugggcaacggcugcuucaagaucuaccacaagugcgacaacgccugcaucggcuccauccgcaacggcaccuacgaccacgacgucuaccgcgacgaggcccucaacaaccgcuuccagaucaagggcgucgagcucaaguccggcuacaaggacuggauccucuggaucuccuucgccaucuccugcuuccuccucugcgucguccuccucggcuucaucaugugggccugccagaagggcaacauccgcugcaacaucugcaucuga

SEQ ID NO: 96774 - RNA, 1701 nt, Artificial Sequence
  derived and/or modified CDS sequence (opt2) from hemagglutinin__InfluenzaA__ABD60812
augaagaccaucaucgcccucuccuacauccucugccucaucuucgcccagaagcuccccggcaacgacaacuccaccgccacccucugccucggccaccacgccguccccaacggcaccaucgucaagaccaucaccaacgaccagaucgaggucaccaacgccaccgagcucguccaguccuccuccaccggcggcaucugcgacuccccccaccagauccucgacggcgagaacugcacccucaucgacgcccuccucggcgacccccagugcgacggcuuccagaacaagaagugggaccucuucgucgagcgcuccaaggccuacuccaacugcuaccccuacgacguccccgacuacgccucccuccgcucccucgucgccuccuccggcacccucgaguucaacaacgaguccuucaacuggaccggcgucacccagaacggcaccuccuccgccugcaagcgccgcuccaacaacuccuucuucucccgccucaacuggcucacccaccucaaguucaaguaccccgcccucaacgucaccaugcccaacaacgagaaguucgacaagcucuacaucuggggcguccaccaccccggcaccgacaacgaccagaucuuccucuacgcccaggccuccggccgcaucaccgucuccaccaagcgcucccagcagaccgucauccccuccaucggcucccgcccccgcguccgcaacauccccucccgcaucuccaucuacuggaccaucgucaagcccggcgacauccuccucaucaacuccaccggcaaccucaucgccccccgcggcuacuucaagauccgcuccggcaaguccuccaucaugcgcuccgacgcccccaucggcaagugcaacuccgagugcaucacccccaacggcuccauccccaacgacaagcccuuccagaacgucaaccgcaucaccuacggcgccugcccccgcuacgucaagcagaacacccucaagcucgccaccggcaugcgcaacguccccgagaagcagacccgcggcaucuucggcgccaucgccggcuucaucgagaacggcugggagggcauggucgacggcugguacggcuuccgccaccagaacuccgagggcaucggccaggccgccgaccucaaguccacccaggccgccaucaaccagaucaacggcaagcucaaccgccucaucggcaagaccaacgagaaguuccaccagaucgagaaggaguucuccgaggucgagggccgcauccaggaccucgagaaguacgucgaggacaccaagaucgaccucugguccuacaacgccgagcuccucgucgcccucgagaaccagcacaccaucgaccucaccgacuccgagaugaacaagcucuucgagcgcaccaagaagcagcuccgcgagaacgccgaggacaugggcaacggcugcuucaagaucuaccacaagugcgacaacgccugcaucggcuccauccgcaacggcaccuacgaccacgacgucuaccgcgacgaggcccucaacaaccgcuuccagaucaagggcgucgagcucaaguccggcuacaaggacuggauccucuggaucuccuucgccaucuccugcuuccuccucugcgucgcccuccucggcuucaucaugugggccugccagaagggcaacauccgcugcaacaucugcaucuga

SEQ ID NO: 96775 - RNA, 1701 nt, Artificial Sequence; identical to SEQ ID NO: 96669
  derived and/or modified CDS sequence (opt2) from hemagglutinin__InfluenzaA__ABD60823

SEQ ID NO: 96776 - RNA, 1701 nt, Artificial Sequence
  derived and/or modified CDS sequence (opt2) from hemagglutinin__InfluenzaA__ABD60845
augaagaccaucaucgcccucuccuacauccucugccucgucuucgcccagaagcuccccgucaacgacaacuccaccgccacccucugccucggccaccacgccguccccaacggcacccucgucaagaccaucaccaacgaccacaucgaggucaccaacgccaccgagcucguccaguccuccuccaccggccgcaucugcgacuccccccaccagauccucgacggcgagaacugcacccucaucgacgcccuccucggcgacccccacugcgacggcuuccagaacaaggagugggaccucuucgucgagcgcuccaccgccuacuccaacugcuaccccuacgacguccccgacuacgccucccuccgcucccucgucgccuccuccggcacccucgaguucaacaacgaguccuucaacuggaccggcgucgaccagaacggcaccuccuccgccugcaagcgccgcuccaccaaguccuucuucucccgccucaacuggcuccaccagcucaaguacaaguaccccgcccucaacgucaccaugcccaacaacgagaaguucgacaagcucuacaucuggggcguccaccaccccuccaccgacuccgaccagaucucccucuacgcccaggccuccggccgcgucaccgucuccaccaagcgcucccagcagaccgucacccccaacaucggcucccgccccuggguccgcggcgucuccucccgcaucuccaucuacuggaccaucgucaagcccggcgacauccuccucaucaacuccaccggcaaccucaucgccccccgcggcuacuucaagauccgcuccggcaaguccuccaucaugcgcuccaacgcccucaucggcaagugcaacuccgagugcaucacccccaacggcuccauccccaacgacaagcccuuccagaacgucaaccgcaucaccuacggcgccugcccccgcuacgucaagcagaacacccucaagcucgccaccggcaugcgcaacguccccgagaagcagacccgcggcaucuucggcgccaucgccggcuucaucgagaacggcugggagggcauggucgacggcugguacggcuuccgccaccagaacuccgagggcaccggccaggccgccgaccucaaguccacccaggccgccaucaaccagaucaacggcaagcucaaccgccucaucgagaagaccaacgagaaguuccaccagaucgagaaggaguucuccgaggucgagggccgcauccaggaccucgagaaguacgucgaggacaccaagaucgaccucugguccuacaacgccgagcuccucgucgcccucgagaaccagcacaccaucgaccucaccgacuccgagaugaacaagcucuucgagcgcacccgcaagcagcuccgcgagaacgccgaggacaugggcaacggcugcuucaagaucuaccacaagugcgacaacgccugcaucggcuccauccgcaacggcaccuacgaccacgacgucuaccgcgacgaggcccucaacaaccgcuuccagaucaagggcgucgagcucaaguccggcuacaaggacuggauccucuggaucuccuucgccaucuccugcuuccuccucugcgucguccuccucggcuucaucaugugggccugccagaagggcaacauccgcugcaacaucugcaucuga

SEQ ID NO: 96777 - RNA, 1698 nt, Artificial Sequence
  derived and/or modified CDS sequence (opt2) from hemagglutinin__InfluenzaA__ABD60878
augaaggucaagcuccucguccuccucugcaccuucaccgccaccuacgccgacaccaucugcaucggcuaccacgccaacaacuccaccgacaccgucgacaccguccucgagaagaacgucaccgucacccacuccgucaaccuccucgaggacucccacaacggcaagcucugccuccucaagggcaucgccccccuccagcucggcaacugcuccgucgccggcuggauccucggcaaccccgagugcgagcuccucaucuccaaggaguccugguccuacaucgucgagacccccaaccccgagaacggcaccugcuaccccggcuacuucgccgacuacgaggagcuccgcgagcagcucuccuccgucuccuccuucgagcgcuucgagaucuuccccaaggaguccuccuggcccaaccacaccgucaccggcgucuccgccuccugcucccacaacggcaaguccuccuucuaccgcaaccuccucuggcucaccggcaagaacggccucuaccccaaccucuccaaguccuacgccaacaacaaggagaaggagguccucguccucuggggcguccaccacccccccaacaucggcgaccagaaggcccucuaccacaccgagaacgccuacgucuccgucgucuccucccacuacucccgccgcuucacccccgagaucgccaagcgccccaagguccgcgaccaggagggccgcaucaacuacuacuggacccuccucgagcccggcgacaccaucaucuucgaggccaacggcaaccucaucgccccccgcuacgccuucgcccucucccgcggcuucggcuccggcaucaucaccuccaacgcccccauggacgagugcgacgccaagugccagaccccccagggcgccaucaacuccucccuccccuuccagaacguccaccccgucaccaucggcgagugccccaaguacguccgcuccgccaagcuccgcauggucaccggccuccgcaacauccccuccauccagucccgcggccucuucggcgccaucgccggcuucaucgagggcggcuggaccggcauggucgacggcugguacggcuaccaccaccagaacgagcagggcuccggcuacgccgccgaccagaaguccacccagaacgccaucaacggcaucaccaacaaggucaacuccgucaucgagaagaugaacacccaguucaccgccgucggcaaggaguucaacaagcucgagcgccgcauggagaaccucaacaagaaggucgacgacggcuuccucgacaucuggaccuacaacgccgagcuccucguccuccucgagaacgagcgcacccucgacuuccacgacuccaacgucaagaaccucuacgagaaggucaagucccagcucaagaacaacgccaaggagaucggcaacggcugcuucgaguucuaccacaagugcaacaacgagugcauggaguccgucaagaacggcaccuacgacuaccccaaguacuccgaggaguccaagcucaaccgcgagaagaucgacggcgucaagcucgaguccaugggcgucuaccagauccucgccaucuacuccaccgucgccuccucccucguccuccucgucucccucggcgccaucuccuucuggaugugcuccaacggcucccuccagugccgcaucugcaucuga

SEQ ID NO: 96778 - RNA, 1698 nt, Artificial Sequence
  derived and/or modified CDS sequence (opt2) from hemagglutinin__InfluenzaA__ABD60889
augaaggucaagcuccucguccuccucugcaccuucaccgccaccuacgccgacaccaucugcaucggcuaccacgccaacaacuccaccgacaccgucgacaccguccucgagaagaacgucaccgucacccacuccgucaaccuccucgaggacucccacaacggcaagcucugccuccucaagggcaucgccccccuccagcucggcaacugcuccgucgccggcuggauccucggcaaccccgagugcgagcuccucaucuccaaggaguccugguccuacaucgucgagacccccaaccccgagaacggcaccugcuaccccggcuacuucgccgacuacgaggagcuccgcgagcagcucuccuccgucuccuccuucgagcgcuucgagaucuuccccaaggaguccuccuggcccaaccacaccgucaccggcgucuccgccuccugcucccacaacggcaaguccuccuucuaccgcaaccuccucuggcucaccggcaagaacggccucuaccccaaccucuccaaguccuacgccaacaacaaggagaaggagguccucguccucuggggcguccaccacccccccaacaucggcgaccagcgcgcccucuaccacaccgagaacgccuacgucuccgucgucuccucccacuacucccgccgcuucacccccgagaucgccaagcgccccaagguccgcgaccaggagggccgcaucaacuacuacuggacccuccucgagcccggcgacaccaucaucuucgaggccaacggcaaccucaucgccccccgcuacgccuucgcccucucccgcggcuucggcuccggcaucaucaccuccaacgcccccauggacgagugcgacgccaagugccagaccccccagggcgccaucaacuccucccuccccuuccagaacguccaccccgucaccaucggcgagugccccaaguacguccgcuccgccaagcuccgcauggucaccggccuccgcaacauccccuccauccagucccgcggccucuucggcgccaucgccggcuucaucgagggcggcuggaccggcauggucgacggcugguacggcuaccaccaccagaacgagcagggcuccggcuacgccgccgaccagaaguccacccagaacgccaucaacggcaucaccaacaaggucaacuccgucaucgagaagaugaacacccaguucaccgccgucggcaaggaguucaacaagcucgagcgccgcauggagaaccucaacaagaaggucgacgacggcuuccucgacaucuggaccuacaacgccgagcuccucguccuccucgagaacgagcgcacccucgacuuccacgacuccaacgucaagaaccucuacgagaaggucaagucccagcucaagaacaacgccaaggagaucggcaacggcugcuucgaguucuaccacaagugcaacaacgagugcauggaguccgucaagaacggcaccuacgacuaccccaaguacuccgaggaguccaagcucaaccgcgagaagaucgacggcgucaagcucgaguccaugggcgucuaccagauccucgccaucuacuccaccgucgccuccucccucguccuccucgucucccucggcgccaucuccuucuggaugugcuccaacggcucccuccagugccgcaucugcaucuga

SEQ ID NO: 96779 - RNA, 1698 nt, Artificial Sequence
  derived and/or modified CDS sequence (opt2) from hemagglutinin__InfluenzaA__ABD60900
augaaggucaagcgccucguccuccucugcaccuucaccgccaccuacgccgacaccaucugcaucggcuaccacgccaacaacuccaccgacaccgucgacaccguccucgagaagaacgucaccgucacccacuccgucaaccuccucgaggacucccacaacggcaagcucugccuccucaagggcaucgccccccuccagcucggcaacugcuccgucgccggcuggauccucggcaaccccgagugcgagcuccucaucuccaaggaguccugguccuacaucgucgagacccccaaccccgagaacggcaccugcuaccccggcuacuucgccgacuacgaggagcuccgcgagcagcucuccuccgucuccuccuucgagcgcuucgagaucuuccccaaggaguccuccuggcccaaccacaccgucaccggcgucuccgccuccugcucccacaacggcaaguccuccuucuaccgcaaccuccucuggcucaccggcaagaacggccucuaccccaaccucuccaaguccuacgccaacaacaaggagaaggagguccucguccucuggggcguccaccacccccccaacaucggcgaccagaaggcccucuaccacaccgagaacgccuacgucuccgucgucuccucccacuacucccgccgcuucacccccgagaucgccaagcgccccaagguccgcgaccaggagggccgcaucaacuacuacuggacccuccucgagcccggcgacaccaucaucuucgaggccaacggcaaccucaucgccccccgcuacgccuucgcccucucccgcggcuucggcuccggcaucaucaccuccaacgcccccauggacgagugcgacgccaagugccagaccccccagggcgccaucaacuccucccuccccuuccagaacguccaccccgucaccaucggcgagugccccaaguacguccgcuccgccaagcuccgcauggucaccggccuccgcaacauccccuccauccagucccgcggccucuucggcgccaucgccggcuucaucgagggcggcuggaccggcauggucgacggcugguacggcuaccaccaccagaacgagcagggcuccggcuacgccgccgaccagaaguccacccagaacgccaucaacggcaucaccaacaaggucaacuccgucaucgagaagaugaacacccaguucaccgccgucggcaaggaguucaacaagcucgagcgccgcauggagaaccucaacaagaaggucgacgacggcuuccucgacaucuggaccuacaacgccgagcuccucguccuccucgagaacgagcgcacccucgacuuccacgacuccaacgucaagaaccucuacgagaaggucaagucccagcucaagaacaacgccaaggagaucggcaacggcugcuucgaguucuaccacaagugcaacaacgagugcauggaguccgucaagaacggcaccuacgacuaccccaaguacuccgaggaguccaagcucaaccgcgagaagaucgacggcgucaagcucgaguccaugggcgucuaccagauccucgccaucuacuccaccgucgccuccucccucguccuccucgucucccucggcgccaucuccuucuggaugugcuccaacggcucccuccagugccgcaucugcaucuga

SEQ ID NO: 96780 - RNA, 1698 nt, Artificial Sequence
  derived and/or modified CDS sequence (opt2) from hemagglutinin__InfluenzaA__ABD60911
augaaggccaagcucaugguccuccucugcaccuucaccgccaccuacgccgacaccaucugcaucggcuaccacgccaacaacuccaccgacaccgucgacaccguccucgagaagaacgucaccgucacccacuccgucaaccuccucgaggacucccacaacggcaagcucugccuccucaagggcaucgccccccuccagcucggcaacugcuccgucgccggcuggauccucggcaaccccgagugcgagcuccucaucuccaaggaguccugguccuacaucgucgagacccccaaccccgagaacggcaccugcuaccccggcuacuucgccgacuacgaggagcuccgcgagcagcucuccuccgucuccuccuucgagcgcuucgagaucuuccccaaggaguccuccuggcccaaccacaccgucaccggcgucuccgccuccugcucccacaacggcaaguccuccuucuaccgcaaccuccucuggcucaccggcaagaacggccucuaccccaaccucuccaaguccuacgccaacaacaaggagaaggagguccucguccucuggggcguccaccacccccccaacaucggcgaccagcgcgcccucuaccacaccgagaacgccuacgucuccgucgucuccucccacuacucccgccgcuucacccccgagaucgccaagcgccccaagguccgcgaccaggagggccgcaucaacuacuacuggacccuccucgagcccggcgacaccaucaucuucgaggccaacggcaaccucaucgcccccugguacgccuucgcccucucccgcggcuucggcuccggcaucaucaccuccaacgcccccaugggcgagugcgacgccaagugccagaccccccagggcgccaucaacuccucccuccccuuccagaacguccaccccgucaccaucggcgagugccccaaguacguccgcuccgccaagcuccgcauggucaccggccuccgcaacauccccuccauccagucccgcggccucuucggcgccaucgccggcuucaucgagggcggcuggaccggcauggucgacggcugguacggcuaccaccaccagaacgagcagggcuccggcuacgccgccgaccagaaguccacccagaacgccaucgacggcaucaccaacaaggucaacuccaucaucgagaagaugaacacccaguucaccgccgucggcaaggaguucaacaagcucgagcgccgcauggagaaccucaacaagaaggucgacgacggcuuccucgacaucuggaccuacaacgccgagcuccucguccuccucgagaacgagcgcacccucgacuuccacgacuccaacgucaagaaccucuacgagaaggucaagucccagcucaagaacaacgccaaggagaucggcaacggcugcuucgaguucuaccacaagugcaacaacgagugcauggaguccgucaagaacggcaccuacgacuaccccaaguacuccgaggaguccaagcucaaccgcgagaagaucgacggcgucaagcucgaguccaugggcgucuaccagauccucgccaucuacuccaccgucgccuccucccucguccuccucgucucccucggcgccaucuccuucuggaugugcuccaacggcucccuccagugccgcaucugcaucuga

SEQ ID NO: 96781 - RNA, 1701 nt, Artificial Sequence; identical to SEQ ID NO: 96068
  derived and/or modified CDS sequence (opt2) from hemagglutinin__InfluenzaA__ABD60922

SEQ ID NO: 96782 - RNA, 1701 nt, Artificial Sequence
  derived and/or modified CDS sequence (opt2) from hemagglutinin__InfluenzaA__ABD60933
augaaggccaagcuccucguccuccucugcgcccucuccgccaccgacgccgacaccaucugcaucggcuaccacgccaacaacuccaccgacaccgucgacaccguccucgagaagaacgucaccgucacccacuccgucaaccuccucgaggacucccacaacggcaagcucugccgccucaagggcaucgccccccuccagcucggcaagugcuccaucgccggcuggauccucggcaaccccgagugcgagucccucgucuccaagaaguccugguccuacaucgccgagacccccaacuccgagaacggcaccugcuaccccggcuacuucgccgacuacgaggagcuccgcgagcagcucuccuccgucuccuccuucgagcgcuucgagaucuuccccaaggagcgcuccuggcccaagcacaacgucacccgcggcgucaccgccuccugcucccacaagggcaaguccuccuucuaccgcaaccuccucuggcucaccgagaagaacggcuccuaccccaaccucuccaaguccuacgucaacaacaaggagaaggagguccucguccucuggggcguccaccaccccuccaacaucgaggaccagaagaccaucuaccgcaaggagaacgccuacgucuccgucgucuccuccaacuacaaccgccgcuucacccccgagaucgccgagcgccccaagguccgcggccaggccggccgcaucaacuacuacuggacccuccucgagcccggcgacaccaucaucuucgaggccaacggcaaccucaucgcccccuggcacgccuucgcccucaaccgcggcuucggcuccggcaucaucaccuccaacgccuccauggacgagugcgacaccaagugccagaccccccagggcgccaucaacuccucccuccccuuccagaacauccaccccgucaccaucggcgagugccccaaguacguccgcuccaccaagcuccgcauggucaccggccuccgcaacauccccuccauccagucccgcggccucuucggcgccaucgccggcuucaucgagggcggcuggaccggcaugaucgacggcugguacggcuaccaccaccagaacgagcagggcuccggcuacgccgccgaccagaaguccacccagaacgccaucaacggcaucaccaacaaggucaacuccgucaucgagaagaugaacacccaguucaccgccgucggcaaggaguucaacaagcucgagaagcgcauggagaaccucaacaagaaggucgacgacggcuuccucgacaucuggaccuacaacgccgagcuccucguccuccucgagaacgagcgcacccucgacuuccacgacuccaacgucaagaaccucuacgagaaggucaagucccagcucaagaacaacgccaaggagaucggcaacggcugcuucgaguucuaccacaagugcaacaacgagugcauggaguccgucaagaacggcaccuacgacuaccccaaguacuccgaggaguccaagcucaaccgcgagaagaucgacggcgucaagcucgaguccaugggcgucuaccagauccucgccaucuacuccaccgucgccuccucccucguccuccucgucucccucggcgccaucuccuucuggaugugcuccaacggcucccuccagugccgcaucugcaucuga

SEQ ID NO: 96783 - RNA, 1701 nt, Artificial Sequence
  derived and/or modified CDS sequence (opt2) from hemagglutinin__InfluenzaA__ABD60944
augaaggccaagcuccucguccuccucugcgcccucuccgccaccgacgccgacaccaucugcaucggcuaccacgccaacaacuccaccgacaccgucgacaccguccucgagaagaacgucaccgucacccacuccgucaaccuccucgaggacucccacaacggcaagcucugccgccucaagggcaucgccccccuccagcucggcaagugcuccaucgccggcuggauccucggcaaccccgagugcgagucccucuucuccaagaaguccugguccuacaucgccgagacccccaacuccgagaacggcaccugcuaccccggcuacuucgccgacuacgaggagcuccgcgagcagcucuccuccgucuccuccuucgagcgcuucgagaucuuccccaaggagcgcuccuggcccaagcacaacgucacccgcggcgucaccgccuccugcucccacaagggcaaguccuccuucuaccgcaaccuccucuggcucaccgagaagaacggcuccuaccccaaccucuccaaguccuacgucaacaacaaggagaaggagguccucguccucuggggcguccaccaccccuccaacaucgaggaccagaagaccaucuaccgcaaggagaacgccuacgucuccgucgucuccuccaacuacaaccgccgcuucacccccgagaucgccgagcgccccaagguccgcggccaggccggccgcaucaacuacuacuggacccuccucgagcccggcgacaccaucaucuucgaggccaacggcaaccucaucgcccccugguacgccuucgcccucucccgcggcuucggcuccggcaucaucaccuccaacgccuccauggacgagugcgacaccaagugccagaccccccagggcgccaucaacuccucccuccccuuccagaacguccaccccgucaccaucggcgagugccccaaguacguccgcuccaccaagcuccgcauggucaccggccuccgcaacauccccuccauccagucccgcggccucuucggcgccaucgccggcuucaucgagggcggcuggaccggcaugaucgacggcugguacggcuaccaccaccagaacgagcagggcuccggcuacgccgccgaccagaaguccacccagaacgccaucaacggcaucaccaacaaggucaacuccgucaucgagaagaugaacacccaguucaccgccgucggcaaggaguucaacaagcucgagaagcgcauggagaaccucaacaagaaggucgacgacggcuuccucgacaucuggaccuacaacgccgagcuccucguccuccucgagaacgagcgcacccucgacuuccacgacuccaacgucaagaaccucuacgagaaggucaagucccagcucaagaacaacgccaaggagaucggcaacggcugcuucgaguucuaccacaagugcaacaacgagugcauggaguccgucaagaacggcaccuacgacuaccccaaguacuccgaggaguccaagcucaaccgcgagaagaucgacggcgucaagcucgaguccaugggcgucuaccagauccucgccaucuacuccaccgucgccuccucccucguccuccucgucucccucggcgccaucuccuucuggaugugcuccaacggcucccuccagugccgcaucugcaucuga

SEQ ID NO: 96784 - RNA, 1701 nt, Artificial Sequence
  derived and/or modified CDS sequence (opt2) from hemagglutinin__InfluenzaA__ABD60955
augaaggccaagcuccucguccuccucugcgccuucaccgccaccuacgccgacaccaucugcaucggcuaccacgccaacaacuccaccgacaccgucgacaccguccucgagaagaacgucaccgucacccacuccgucaaccuccucgaggacucccacaacggcaagcucugccgccucaagggcaucgccccccuccagcucggcaacugcuccgucgccggcuggauccucggcaaccccaagugcgagucccucuucuccaaggaguccugguccuacaucgccgagacccccaaccccgagaacggcaccugcuaccccggcuacuucgccgacuacgaggagcuccgcgagcagcucuccuccgucuccuccuucgagcgcuucgagaucuuccccaaggaguccuccuggcccaaccacaccgucaccaagggcgucaccaccuccugcucccacaacggcaaguccuccuucuaccgcaaccuccucuggcucaccgagaagaacggccucuaccccaaccucuccaaguccuacgucaacaacaaggagaaggagguccucguccucuggggcguccaccaccccuccaacauccgcgaccagcgcgccaucuaccacaccgagaacgccuacgucuccgucgucuccucccacuacucccgccgcuucacccccgagaucgccaagcgccccaagguccgcgaccaggagggccgcaucaacuacuacuggacccuccucgagcccggcgacaccaucaucuucgaggccaacggcaaccucaucgcccccugguacgccuucgcccucucccgcggcuucggcuccggcaucaucaccuccaacgccuccauggacgagugcgacgccaagugccagaccccccagggcgccaucaacuccucccuccccuuccagaacguccaccccgucaccaucggcgagugccccaaguacguccgcuccaccaagcuccgcauggucaccggccuccgcaacauccccuccauccagucccgcggccucuucggcgccaucgccggcuucaucgagggcggcuggaccggcaugaucgacggcugguacggcuaccaccaccagaacgagcagggcuccggcuacgccgccgaccagaaguccacccagaacgccaucaacggcaucaccaacaaggucaacuccgucaucgagaagaugaacacccaguucaccgccgucggcaaggaguucaacaagcucgagcgccgcauggagaaccucaacaagaaggucgacgacggcuuccucgacaucuggaccuacaacgccgagcuccucguccuccucgagaacggccgcacccucgacuuccacgacuccaacgucaagaaccucuacgagaaggucaagucccagcucaagaacaacgccaaggagaucggcaacggcugcuucgaguucuaccacaagugcaacaacgagugcauggaguccgucaagaacggcaccuacgacuaccccaaguacuccgaggaguccaagcucaaccgcggcaagaucgacggcgucaagcucgaguccaugggcgucuaccagauccucgccaucuacuccaccgucgccuccucccucguccuccucgucucccucggcgccaucuccuucuggaugugcuccaacggcucccuccagugccgcaucugcaucuga

SEQ ID NO: 96785 - RNA, 1701 nt, Artificial Sequence; identical to SEQ ID NO: 96068
  derived and/or modified CDS sequence (opt2) from hemagglutinin__InfluenzaA__ABD61260

SEQ ID NO: 96786 - RNA, 1701 nt, Artificial Sequence; identical to SEQ ID NO: 96068
  derived and/or modified CDS sequence (opt2) from hemagglutinin__InfluenzaA__ABD61271

SEQ ID NO: 96787 - RNA, 1701 nt, Artificial Sequence; identical to SEQ ID NO: 96322
  derived and/or modified CDS sequence (opt2) from hemagglutinin__InfluenzaA__ABD61282

SEQ ID NO: 96788 - RNA, 1701 nt, Artificial Sequence; identical to SEQ ID NO: 96552
  derived and/or modified CDS sequence (opt2) from hemagglutinin__InfluenzaA__ABD61293

SEQ ID NO: 96789 - RNA, 1701 nt, Artificial Sequence; identical to SEQ ID NO: 96774
  derived and/or modified CDS sequence (opt2) from hemagglutinin__InfluenzaA__ABD61304

SEQ ID NO: 96790 - RNA, 1701 nt, Artificial Sequence; identical to SEQ ID NO: 96686
  derived and/or modified CDS sequence (opt2) from hemagglutinin__InfluenzaA__ABD61315

SEQ ID NO: 96791 - RNA, 1701 nt, Artificial Sequence; identical to SEQ ID NO: 96108
  derived and/or modified CDS sequence (opt2) from hemagglutinin__InfluenzaA__ABD61337

SEQ ID NO: 96792 - RNA, 1701 nt, Artificial Sequence
  derived and/or modified CDS sequence (opt2) from hemagglutinin__InfluenzaA__ABD61348
augaagaccaucaucgcccucuccuacauccucugccucgucuucgcccagaagcuccccgucaacgacaacuccaccgccacccucugccucggccaccacgccguccccaacggcacccucgucaagaccaucaccaacgaccacaucgaggucaccaacgccaccgagcucguccaguccuccuccaccggccgcaucugcgacuccccccaccagauccucgacggcgagaacugcacccucaucgacgcccuccucggcgacccccacugcgacggcuuccagaacaaggagugggaccucuucgucgagcgcuccaccgccuacuccaacugcuaccccuacgacguccccgacuacgccucccuccgcucccucgucgccuccuccggcacccucgaguucaacaacgaguccuucaacuggaccggcgucgcccagaacggcaccuccuccgccugcaagcgccgcuccaucaaguccuucuucucccgccucaacuggcuccaccagcucaaguacaaguaccccgcccucaacgucaccaugcccaacaacgagaaguucgacaagcucuacaucuggggcguccaccaccccuccaccgacuccgaccagaucucccucuacgcccaggccuccggccgcgucaccgucuccaccaagcgcucccagcagaccgucauccccaacaucggcucccgccccuggguccgcggcgucuccucccgcaucuccaucuacuggaccaucgucaagcccggcgacauccuccucaucaacuccaccggcaaccucaucgccccccgcggcuacuucaagauccgcuccggcaaguccuccaucaugcgcuccaacgcccccaucggcaagugcaacuccgagugcaucacccccaacggcuccauccccaacaacaagcccuuccagaacgucaaccgcaucaccuacggcgccugcccccgcuacgucaagcagaacacccucaagcucgccaccggcaugcgcaacguccccgagaagcagacccgcggcaucuucggcgccaucgccggcuucaucgagaacggcugggagggcauggucgacggcugguacggcuuccgccaccagaacuccgagggcaccggccaggccgccgaccucaaguccacccaggccgccaucaaccagaucaacggcaagcucaaccgccucaucgagaagaccaacgagaaguuccaccagaucgagaaggaguucuccgaggucgagggccgcauccaggaccucgagaaguacgucgaggacaccaagaucgaccucugguccuacaacgccgagcuccucgucgcccucgagaaccagcacaccaucgaccucaccgacuccgagaugaacaagcucuucgagcgcacccgcaagcagcuccgcgagaacgccgaggacaugggcaacggcugcuucaagaucuaccacaagugcgacaacgccugcaucggcuccauccgcaacggcaccuacgaccacgacgucuaccgcgacgaggcccucaacaaccgcuuccagaucaagggcgucgagcucaaguccggcuacaaggacuggauccucuggaucuccuucgccaucuccugcuuccuccucugcgucguccuccucggcuucaucaugugggccugccagaagggcaacauccgcugcaacaucugcaucuga

SEQ ID NO: 96793 - RNA, 1701 nt, Artificial Sequence; identical to SEQ ID NO: 96108
  derived and/or modified CDS sequence (opt2) from hemagglutinin__InfluenzaA__ABD61359

SEQ ID NO: 96794 - RNA, 1701 nt, Artificial Sequence; identical to SEQ ID NO: 96746
  derived and/or modified CDS sequence (opt2) from hemagglutinin__InfluenzaA__ABD61370

SEQ ID NO: 96795 - RNA, 1701 nt, Artificial Sequence; identical to SEQ ID NO: 96686
  derived and/or modified CDS sequence (opt2) from hemagglutinin__InfluenzaA__ABD61381

SEQ ID NO: 96796 - RNA, 1701 nt, Artificial Sequence
  derived and/or modified CDS sequence (opt2) from hemagglutinin__InfluenzaA__ABD61392
augaagaccaucaucgcccucuccuacauccucugccucgucuucgcccagaagcuccccggcaacgacaacuccaccgccacccucugccucggccaccacgccguccccaacggcacccucgucaagaccaucaccaacgaccagaucgaggucaccaacgccaccgagcucguccaguccuccuccaccggcggcaucugcgacuccccccaccagauccucgacggcgagaacugcacccucaucgacgcccuccucggcgacccccacugcgacggcuuccagaacaaggagugggaccucuucgucgagcgcuccaaggccuacuccaacugcuaccccuacgacguccccgacuacgccucccuccgcucccucgucgccuccuccggcacccucgaguucaacaacgaguccuucaacuggaccggcgucgcccagaacggcaccuccuccgccugcaagcgcggcuccaacaaguccuucuucucccgccucaacuggcuccaccagcucaaguacaaguaccccgcccucaacgucaccaugcccaacaacgagaaguucgacaagcucuacaucuggggcguccaccaccccuccaccgacuccgaccagaucucccucuacgcccaggcccccggccgcgucaccgucuccaccaagcgcucccagcagaccgucauccccaacaucggcucccgccccuggguccgcggcgucuccucccgcaucuccaucuacuggaccaucgucaagcccggcgacauccuccucaucaacugcaccggcaaccucaucgccccccgcggcuacuucaagauccgcuccggcaaguccuccaucaugcgcuccgacgccuccaucggcaagugcaacuccgagugcaucacccccaacggcuccauccccaacgacaagcccuuccagaacgucaaccgcaucaccuacggcgccugcccccgcuacgucaagcagaacacccucaagcucgccaccggcaugcgcaacguccccgagaagcagacccgcggcaucuucggcgccaucgccggcuucaucgagaacggcugggagggcauggucgacggcugguacggcuuccgccaccagaacuccgagggcaccggccaggccgccgaccucaaguccacccaggccgccaucaaccagaucaacggcaagcucaaccgccucaucgagaagaccaacgagaaguuccaccagaucgagaaggaguucuccgaggucgagggccgcauccaggaccucgagaaguacgucgaggacaccaagaucgaccucugguccuacaacgccgagcuccucgucgcccucgagaaccagcacaccaucgaccucaccgacuccgagaugaacaagcucuucgagcgcaccaagaagcagcuccgcgagaacgccgaggacaugggcaacggcugcuucaagaucuaccacaagugcgacaacgccugcaucggcuccauccgcaacggcaccuacgaccacgacgucuaccgcgacgaggcccucaacaaccgcuuccagaucaagggcgucgagcucaaguccggcuacaaggacuggauccucuggaucuccuucgccaucuccugcuuccuccucugcgucguccuccucggcuucaucaugugggccugccagaagggcaacauccgcugcaacaucugcaucuga

SEQ ID NO: 96797 - RNA, 1701 nt, Artificial Sequence; identical to SEQ ID NO: 96776
  derived and/or modified CDS sequence (opt2) from hemagglutinin__InfluenzaA__ABD61403

SEQ ID NO: 96798 - RNA, 1701 nt, Artificial Sequence
  derived and/or modified CDS sequence (opt2) from hemagglutinin__InfluenzaA__ABD61529
augaagaccaucaucgcccucuccuacaucuucugccucgucuucgcccagaagcuccccggcaacgacaacuccaccgccacccucugccucggccaccacgccguccccaacggcacccucgucaagaccaucaccaacgaccagaucgaggucaccaacgccaccgagcucguccaguccuccuccaccggccgcaucugcgacuccccccaccgcauccucgacggcaagaacugcacccucaucgacgcccuccucggcgacccccacugcgacggcuuccagaacgagaagugggaccucuucgucgagcgcuccaaggccuucuccaacugcuaccccuacgacguccccgacuacgccucccuccgcucccucgucgccuccuccggcacccucgaguucaucaacgagggcuucaacuggaccggcgucacccaguccggcggcuccuacgccugcaagcgcggcuccgucaacuccuucuucucccgccucaacuggcucuacgaguccgaguccaaguaccccguccucaacgucaccaugcccaacaacggcaaguucgacaagcucuacaucuggggcguccaccaccccuccaccgacaaggagcagaccaaccucuacguccgcgccuccggccgcgucaccgucuccaccaagcgcucccagcagaccgucauccccaacaucggcucccgccccuggguccgcggccucuccucccgcaucuccaucuacuggaccaucgucaagcccggcgacauccuccucaucaacuccaccggcaaccucaucgccccccgcggcuacuucaagauccgcaccggcaaguccuccaucaugcgcuccgacgcccccaucggcaccugcuccuccgagugcaucacccccaacggcuccauccccaacgacaagcccuuccagaacgucaacaagaucaccuacggcgccugcccccgcuacgucaagcagaacacccucaagcucgccaccggcaugcgcaacguccccgagaagcagacccgcggcaucuucggcgccaucgccggcuucaucgagaacggcugggagggcauggucgacggcugguacggcuuccgccaccagaacuccgagggcaccggccaggccgccgaccucaaguccacccaggccgccaucgaccagaucaacggccgccucaaccgccucaucgagaagaccaacgagaaguuccaccagaucgagaaggaguucuccgaggucgagggccgcauccaggaccucgagaaguacgucgaggacaccaagaucgaccucugguccuacaacgccgagcuccucgucgcccucgagaaccagcacaccaucgaccucaccgacuccgagaugaacaagcucuucgagaagacccgcaagcagcuccgcgagaacgccgaggacaugggcaacggcugcuucaagaucuaccacaagugcgacaacgccugcaucggcuccauccgcaacggcaccuacgaccacgacgucuaccgcgacgaggcccucaacaaccgcuuccagaucaagggcgucgagcucaaguccggcuacaaggacuggauccucuggaucuccuucgccaucuccugcuuccuccucugcgucguccuccucggcuucaucaugugggccugccagaagggcaacauccgcugcaacaucugcaucuga

SEQ ID NO: 96799 - RNA, 1698 nt, Artificial Sequence; identical to SEQ ID NO: 96777
  derived and/or modified CDS sequence (opt2) from hemagglutinin__InfluenzaA__ABD61540

SEQ ID NO: 96800 - RNA, 1701 nt, Artificial Sequence
  derived and/or modified CDS sequence (opt2) from hemagglutinin__InfluenzaA__ABD61757
augaagaccaucaucgcccucuccuacaucuucugccucgucuucgcccaggaccuccccggcaacgacaacuccaccgccacccucugccucggccaccacgccguccccaacggcacccucgucaagaccaucaccaacgaccagaucgaggucaccaacgccaccgagcucguccaguccuccuccaccggcaagaucugcgacaacccccaccgcauccucgacggcaucaacugcacccucaucgacgcccuccucggcgacccccacugcgacggcuuccagaacgagaagugggaccucuucgucgagcgcuccaaggccuucuccaacugcuaccccuacgacguccccgacuacgccucccuccgcucccucgucgccuccuccggcacccucgaguucaucaacgagggcuucaacuggaccggcgucacccagaacggcggcuccuccgccugcaagcgcggccccgacaacggcuucuucucccgccucaacuggcucuacaaguccggcuccaccuaccccguccagaacgucaccaugcccaacaacgacaacuccgacaagcucuacaucuggggcguccaccaccccuccaccgacaaggagcagaccgaccucuacguccaggccuccggcaaggucaccgucuccaccaagcgcucccagcagaccgucauccccaacgucggcucccgccccuggguccgcggccucuccucccgcgucuccaucuacuggaccaucgucaagcccggcgacauccucgucaucaacuccaacggcaaccucaucgccccccgcggcuacuucaagaugcgcaccggcaaguccuccaucaugcgcuccgacgcccccaucggcaccugcuccuccgagugcaucacccccaacggcuccauccccaacgacaagcccuuccagaacgucaacaagaucaccuacggcgccugccccaaguacgucaagcagaacacccucaagcucgccaccggcaugcgcaacguccccgagaagcagacccgcggcaucuucggcgccaucgccggcuucaucgagaacggcugggagggcaugaucgacggcugguacggcuuccgccaccagaacuccgagggcaccggccaggccgccgaccucaaguccacccaggccgccaucgaccagaucaacggcaagcucaaccgcgucaucgagaagaccaacgagaaguuccaccagaucgagaaggaguucuccgaggucgagggccgcauccaggaccucgagaaguacgucgaggacaccaagaucgaccucugguccuacaacgccgagcuccucgucgcccucgagaaccagcacaccaucgaccucaccgacuccgagaugaacaagcucuucgagaagacccgccgccagcuccgcgagaacgccgaggacaugggcaacggcugcuucaagaucuaccacaagugcgacaacgccugcaucggcuccauccgcaacggcaccuacgaccacgacgucuaccgcgacgaggcccucaacaaccgcuuccagaucaagggcgucgagcucaaguccggcuacaaggacuggauccucuggaucuccuucgccaucuccugcuuccuccucugcgucguccuccucggcuucaucaugugggccugccagaagggcaacauccgcugcaacaucugcaucuga

SEQ ID NO: 96801 - RNA, 1701 nt, Artificial Sequence
  derived and/or modified CDS sequence (opt2) from hemagglutinin__InfluenzaA__ABD61777
augaagaccaucaucgcccucuccuacaucuucugccucggcuucgcccagaagcuccccggcaacgacaacuccaccgccacccucugccucggccaccacgccguccccaacggcacccucgucaagaccaucaccaacgaccagaucgaggucaccaacgccaccgagcucguccaguccuccuccaccggccgcaucugcgacuccccccaccgcauccucgacggcaagaacugcacccucaucgacgcccuccucggcgacccccacugcgacggcuuccagaacgagaagugggaccucuucgucgagcgcuccaaggccuucuccaacugcuaccccuacgacguccccgacuacgccucccuccgcucccucgucgccuccuccggcacccucgaguucaucaacgagggcuucaacuggaccggcgucacccaguccggcggcuccuacgccugcaagcgcggcuccgucaacuccuucuucucccgccucaacuggcucuacgaguccgaguccaaguaccccgcccucaacgucaccaugcccaacaacggcaaguucgacaagcucuacaucuggggcguccaccaccccuccaccgacaaggagcagaccaaccucuacguccgcgccuccggccgcgucaccgucuccaccaagcgcucccagcagaccgucauccccaacaucggcucccgccccuggguccgcggccucuccucccgcaucuccaucuacuggaccaucgucaagcccggcgacauccuccucaucaacuccaccggcaaccucaucgccccccgcggcuacuucaagauccgcaccggcaaguccuccaucaugcgcuccgacgcccccaucggcaccugcuccuccgagugcaucacccccaacggcuccauccccaacgacaagcccuuccagaacgucaacaagaucaccuacggcgccugcccccgcuacgucaagcagaacacccucaagcucgccaccggcaugcgcaacguccccgagaagcagacccgcggcaucuucggcgccaucgccggcuucaucgagaacggcugggagggcauggucgacggcugguacggcuuccgccaccagaacuccgagggcaccggccaggccgccgaccucaaguccacccaggccgccaucgaccagaucaacggcaagcucaaccgccucaucgagaagaccaacgagaaguuccaccagaucgagaaggaguucuccgaggucgagggccgcauccaggaccucgagaaguacgucgaggacaccaagaucgaccucugguccuacaacgccgagcuccucgucgcccucgagaaccagcacaccaucgaccucaccgacuccgagaugaacaagcucuucgagaagacccgcaagcagcuccgcgagaacgccgaggacaugggcaacggcugcuucaagaucuaccacaagugcgacaacgccugcaucggcuccauccgcaacggcaccuacgaccacgacgucuaccgcgacgaggcccucaacaaccgcuuccagaucaagggcgucgagcucaaguccggcuacaaggacuggauccucuggaucuccuucgccaucuccugcuuccuccucugcgucguccuccucggcuucaucaugugggccugccagaagggcaacauccgcugcaacaucugcaucuga

SEQ ID NO: 96802 - RNA, 1701 nt, Artificial Sequence
  derived and/or modified CDS sequence (opt2) from hemagglutinin__InfluenzaA__ABD77598
augaagaccaucaucgcccucuccuacauccucugccucgucuucgcccagaagcuccccgucaacgacaacuccaccgccacccucugccucggccaccacgccguccccaacggcacccucgucaagaccaucaccaacgaccacaucgaggucaccaacgccaccgagcucguccaguccucccccaccggccgcaucugcgacuccccccaccagauccucgacggcgagaacugcacccucaucgacgcccuccucggcgacccccacugcgacggcuuccagaacaaggagugggaccucuucgucgagcgcuccaccgccuacuccaacugcuaccccuacgacguccccgacuacgccucccuccgcucccucgucgccuccuccggcacccucgaguucaacaacgaguccuucaacuggaccggcgucgcccagaacggcaccuccuccgccugcaagcgccgcuccaucaaguccuucuucucccgccucaacuggcuccaccagcucaaguacaaguaccccgcccucaacgucaccaugcccaacaacgagaaguucgacaagcucuacaucuggggcguccaccaccccuccaccgacuccgaccagaucucccucuacgcccaggccuccggccgcgucaccgucuccaccaagcgcucccagcagaccgucauccccaacaucggcucccgccccuggguccgcggcgucuccucccgcaucuccaucuacuggaccaucgucaagcccggcgacauccuccucaucaacuccaccggcaaccucaucgccccccgcggcuacuucaagauccgcuccggcaaguccuccaucaugcgcuccaacgcccccaucggcaagugcaacuccgagugcaucacccccaacggcuccauccccaacgacaagcccuuccagaacgucaaccgcaucaccuacggcgccugcccccgcuacgucaagcagaacacccucaagcucgccaccggcaugcgcaacguccccgagaagcagacccgcggcaucuucggcgccaucgccggcuucaucgagaacggcugggagggcauggucgacggcugguacggcuuccgccaccagaacuccgagggcaccggccaggccgccgaccucaaguccacccaggccgccaucaaccagaucaacggcaagcucaaccgccucaucgagaagaccaacgagaaguuccaccagaucgagaaggaguucuccgaggucgagggccgcauccaggaccucgagaaguacgucgaggacaccaagaucgaccucugguccuacaacgccgagcuccucgucgcccucgagaaccagcacaccaucgaccucaccgacuccgagaugaacaagcucuucgagcgcacccgcaagcagcuccgcgagaacgccgaggacaugggcaacggcugcuucaagaucuaccacaagugcgacaacgccugcaucggcuccauccgcaacggcaccuacgaccacgacgucuaccgcgacgaggcccucaacaaccgcuuccagaucaagggcgucgagcucaaguccggcuacaaggacuggauccucuggaucuccuucgccaucuccugcuuccuccucugcgucguccuccucggcuucaucaugugggccugccagaagggcaacauccgcugcaacaucugcaucuga

SEQ ID NO: 96803 - RNA, 1701 nt, Artificial Sequence; identical to SEQ ID NO: 96686
  derived and/or modified CDS sequence (opt2) from hemagglutinin__InfluenzaA__ABD77609

SEQ ID NO: 96804 - RNA, 1701 nt, Artificial Sequence; identical to SEQ ID NO: 96686
  derived and/or modified CDS sequence (opt2) from hemagglutinin__InfluenzaA__ABD77620

SEQ ID NO: 96805 - RNA, 1701 nt, Artificial Sequence; identical to SEQ ID NO: 96686
  derived and/or modified CDS sequence (opt2) from hemagglutinin__InfluenzaA__ABD77631

SEQ ID NO: 96806 - RNA, 1701 nt, Artificial Sequence; identical to SEQ ID NO: 96686
  derived and/or modified CDS sequence (opt2) from hemagglutinin__InfluenzaA__ABD77642

SEQ ID NO: 96807 - RNA, 1701 nt, Artificial Sequence; identical to SEQ ID NO: 96686
  derived and/or modified CDS sequence (opt2) from hemagglutinin__InfluenzaA__ABD77653

SEQ ID NO: 96808 - RNA, 1698 nt, Artificial Sequence; identical to SEQ ID NO: 96777
  derived and/or modified CDS sequence (opt2) from hemagglutinin__InfluenzaA__ABD77708

SEQ ID NO: 96809 - RNA, 1698 nt, Artificial Sequence
  derived and/or modified CDS sequence (opt2) from hemagglutinin__InfluenzaA__ABD77719
augaaggucaagcuccucguccuccucugcaccuucaccgccaccuacgccgacaccaucugcaucggcuaccacgccaacaacuccaccgacaccgucgacaccguccucgagaagaacgucaccgucacccacuccgucaaccuccucgaggacucccacaacggcaagcucugccuccucaagggcaucgccccccuccagcucggcaacugcuccgucgccggcuggauccucggcaaccccgagugcgagcuccucaucuccaaggaguccugguccuacaucgucgagacccccaaccccgagaacggcaccugcuaccccggcuacuucgccgacuacgaggagcuccgcgagcagcucuccuccgucuccuccuucgagcgcuucgagaucuuccccaaggaguccuccuggcccaaccacaccgucaccggcgucuccgccuccugcucccacaacggcaaguccuccuucuaccgcaaccuccucuggcucaccggcaagaacggccucuaccccaaccucuccaaguccuacgccaacaacaaggagaaggagguccucguccucuggggcguccaccacccccccaacaucggcgaccagcgcgcccucuaccacaccgagaacgccuacgucuccgucgucuccucccacuacucccgccgcuucacccccgagaucgccaagcgccccaagguccgcaaccaggagggccgcaucaacuacuacuggacccuccucgagcccggcgacaccaucaucuucgaggccaacggcaaccucaucgccccccgcuacgccuucgcccucucccgcggcuucggcuccggcaucaucaccuccaacgcccccauggacgagugcgacgccaagugccagaccccccagggcgccaucaacuccucccuccccuuccagaacguccaccccgucaccaucggcgagugccccaaguacguccgcuccgccaagcuccgcauggucaccggccuccgcaacauccccuccauccagucccgcggccucuucggcgccaucgccggcuucaucgagggcggcuggaccggcauggucgacggcugguacggcuaccaccaccagaacgagcagggcuccggcuacgccgccgaccagaaguccacccagaacgccaucaacggcaucaccaacaaggucaacuccgucaucgagaagaugaacacccaguucaccgccgucggcaaggaguucaacaagcucgagcgccgcauggagaaccucaacaagaaggucgacgacggcuuccucgacaucuggaccuacaacgccgagcuccucguccuccucgagaacgagcgcacccucgacuuccacgacuccaacgucaagaaccucuacgagaaggucaagucccagcucaagaacaacgccaaggagaucggcaacggcugcuucgaguucuaccacaagugcaacaacgagugcauggaguccgucaagaacggcaccuacgacuaccccaaguacuccgaggaguccaagcucaaccgcgagaagaucgacggcgucaagcucgaguccaugggcgucuaccagauccucgccaucuacuccaccgucgccuccucccucguccuccucgucucccucggcgccaucuccuucuggaugugcuccaacggcucccuccagugccgcaucugcaucuga

SEQ ID NO: 96810 - RNA, 1698 nt, Artificial Sequence; identical to SEQ ID NO: 96777
  derived and/or modified CDS sequence (opt2) from hemagglutinin__InfluenzaA__ABD77730

SEQ ID NO: 96811 - RNA, 1701 nt, Artificial Sequence; identical to SEQ ID NO: 96686
  derived and/or modified CDS sequence (opt2) from hemagglutinin__InfluenzaA__ABD77752

SEQ ID NO: 96812 - RNA, 1701 nt, Artificial Sequence; identical to SEQ ID NO: 96686
  derived and/or modified CDS sequence (opt2) from hemagglutinin__InfluenzaA__ABD77763

SEQ ID NO: 96813 - RNA, 1701 nt, Artificial Sequence
  derived and/or modified CDS sequence (opt2) from hemagglutinin__InfluenzaA__ABD77774
augaagaccaucaucgcccucuccuacauccucugccucgucuucgcccagaagcuccccgucaacgacaacuccaccgccacccucugccucggccaccacgccguccccaacggcacccucgucaagaccaucaccaacgacaacaucgaggucaccaacgccaccgagcucguccaguccuccuccaccggccgcaucugcgacuccccccaccagauccucgacggcgagaacugcacccucaucgacgcccuccucggcgacccccacugcgacggcuuccagaacaaggagugggaccucuucgucgagcgcuccaccgccuacuccaacugcuaccccuacgacguccccgacuacgccucccuccgcucccucgucgccuccuccggcacccucgaguucaacaacgaguccuucaacuggaccggcgucgaccagaacggcaccuccuccgccugcaagcgccgcuccaacaaguccuucuucucccgccucaacuggcuccaccagcucaaguacaaguaccccgcccucaacgucaccaugcccaacaacgagaaguucgacaagcucuacaucuggggcguccaccaccccuccaccgacuccgaccagaucucccucuacgcccaggccuccggccgcgucaccgucuccaccaagcgcucccagcagaccgucauccccaacaucggcucccgccccuggguccgcggcgucuccucccgcaucuccaucuacuggaccaucgucaagcccggcgacauccuccucaucaacuccaccggcaaccucaucgccccccgcggcuacuucaagauccgcuccggcaaguccuccaucaugcgcuccaacgcccccaucggcaagugcaacuccgagugcaucacccagaacggcuccauccccaacgacaagcccuuccagaacgucaaccgcaucaccuacggcgccugcccccgcuacgucaagcagaacacccucaagcucgccaccggcaugcgcaacguccccgagaagcagacccgcggcaucuucggcgccaucgccggcuucaucgagaacggcugggagggcauggucgacggcugguacggcuuccgccaccagaacuccgagggcaccggccaggccgccgaccucaaguccacccaggccgccaucaaccagaucaacggcaagcucaaccgccucaucgagaagaccaacgagaaguuccaccagaucgagaaggaguucuccgaggucgagggccgcauccaggaccucgagaaguacgucgaggacaccaagaucgaccucugguccuacaacgccgagcuccucgucgcccucgagaaccagcacaccaucgaccucaccgacuccgagaugaacaagcucuucgagcgcacccgcaagcagcuccgcgagaacgccgaggacaugggcaacggcugcuucaagaucuaccacaagugcgacaacgccugcaucggcuccauccgcaacggcaccuacgaccacgacgucuaccgcgacgaggcccucaacaaccgcuuccagaucaagggcgucgagcucaaguccggcuacaaggacuggauccucuggaucuccuucgccaucuccugcuuccuccucugcgucguccuccucggcuucaucaugugggccugccagaagggcaacauccgcugcaacaucugcaucuga

SEQ ID NO: 96814 - RNA, 1701 nt, Artificial Sequence; identical to SEQ ID NO: 96813
  derived and/or modified CDS sequence (opt2) from hemagglutinin__InfluenzaA__ABD77785

SEQ ID NO: 96815 - RNA, 1701 nt, Artificial Sequence
  derived and/or modified CDS sequence (opt2) from hemagglutinin__InfluenzaA__ABD77807
augaaggccaagcuccucauccuccucugcgcccucuccgccaccgacgccgacaccaucugcaucggcuaccacgccaacaacuccaccgacaccgucgacaccguccucgagaagaacgucaccgucacccacuccgucaaccuccucgaggacucccacaacggcaagcucugccgccucaagggcaucgccccccuccagcucggcaagugcaacaucgccggcuggauccucggcaaccccgagugcgagucccuccucuccaagcgcuccugguccuacaucgccgagacccccaacuccgagaacggcaccugcuaccccggcgacuucgccgacuacgaggagcuccgcgagcagcucuccuccgucuccuccuucgagcgcuucgagaucuuccccaaggagcgcuccuggcccaagcacaacaucacccgcggcgucaccgccgccugcucccacgccggcaaguccuccuucuacaagaaccuccucuggcucaccgagaccaacggcuccuaccccaagcucuccaaguccuacgucaacaacaaggagaaggagguccucguccucuggggcguccaccaccccuccaacaucgaggaccagaagacccucuaccgcaaggagaacgccuacgucuccgucgucuccuccaacuacaaccgccgcuucacccccgagaucgccgagcgccccaagguccgcggccaggccggccgcaugaacuacuacuggacccuccucgagcccggcgacaccaucaucuucgaggccaacggcaaccucaucgcccccugguacgccuucgcccucucccgcggcuucggcuccggcaucaucaccuccaacgccuccauggacgagugcgacaccaagugccagaccccccagggcgccaucaacuccucccuccccuuccagaacauccaccccgucaccaucggcgagugccccaaguacgucaaguccaccaagcuccgcauggucaccggccuccgcaacauccccuccauccagucccgcggccucuucggcgccaucgccggcuucaucgagggcggcuggaccggcaugaucgacggcugguacggcuaccaccaccagaacgagcagggcuccggcuacgccgccgaccagaaguccacccagaacgccaucaacggcaucaccaacaaggucaacuccgucaucgagaagaugaacacccaguucaccgccgucggcaaggaguucaacaagcucgagaagcgcauggagaaccucaacaagaaggucgacgacggcuuccucgacaucuggaccuacaacgccgagcuccucguccuccucgagaacgagcgcacccucgacuuccacgacuccaacgucaagaaccucuacgagaaggucaagaaccagcuccgcaacaacgccaaggagaucggcaacggcugcuucgaguucuaccacaagugcaacaacgagugcauggaguccgucaagaacggcaccuacgacuaccccaaguacuccgaggaguccaagcucaaccgcgagaagaucgacggcgucaagcucgaguccaugggcgucuaccagauccucgccaucuacuccaccgucgccuccucccucguccuccucgucucccucggcgccaucuccuucuggaugugcuccaacggcucccuccagugccgcaucugcaucuga

SEQ ID NO: 96816 - RNA, 1701 nt, Artificial Sequence
  derived and/or modified CDS sequence (opt2) from hemagglutinin__InfluenzaA__ABD77818
augaaggccaagcuccucguccuccucugcgcccucuccgccaccgacgccgacaccaucugcaucggcuaccacgccaacaacuccaccgacaccgucgacaccguccucgagaagaacgucaccgucacccacuccgucaaccuccucgaggacucccacaacggcaagcucugccgccucaagggcaucgccccccuccagcucggcaagugcuccaucgccggcuggauccucggcaaccccgagugcgagucccucuucuccaagaaguccugguccuacaucgccgagacccccaacuccgagaacggcaccugcuaccccggcuacuucgccgacuacgaggagcuccgcgagcagcucuccuccgucuccuccuucgagcgcuucgagaucuuccccaaggaguccuccuggcccaagcacaccgucacccgcggcgucaccgccuccugcucccacaagggcaaguccuccuucuaccgcaaccuccucuggcucaccgagaagaacggcuccuaccccaaccucuccaaguccuacgucaacaacaaggagaaggagguccucguccucuggggcguccaccaccccuccaacaucgaggaccagaagaccaucuaccgcaaggagaacgccuacgucuccgucgucuccucccacuacaaccgccgcuucacccccgagaucgccaagcgccccaagguccgcgaccaggagggccgcaucaacuacuacuggacccuccucgagcccggcgacaccaucaucuucgaggccaacggcaaccucaucgcccccugguacgccuucgcccucucccgcggcuucggcuccggcaucaucaccuccaacgccuccauggacgagugcgacgccaagugccagaccccccagggcgccaucaacuccucccuccccuuccagaacguccaccccgucaccaucggcgagugccccaaguacguccgcuccaccaagcuccgcauggucaccggccuccgcaacauccccuccauccagucccgcggccucuucggcgccaucgccggcuucaucgagggcggcuggaccggcaugaucgacggcugguacggcuaccaccaccagaacgagcagggcuccggcuacgccgccgaccagaaguccacccagaacgccaucaacggcaucaccaacaaggucaacuccgucaucgagaagaugaacacccaguucaccgccgucggcaaggaguucaacaagcucgagaagcgcauggagaaccucaacaagaaggucgacgacggcuuccucgacaucuggaccuacaacgccgagcuccucguccuccucgagaacgagcgcacccucgacuuccacgacuccaacgucaagaaccucuacgagaaggucaagucccagcucaaguccaacgccaaggagaucggcaacggcugcuucgaguucuaccacaagugcaacaacgagugcauggaguccgucaagaacggcaccuacgacuaccccaaguacuccgaggaguccaagcucaaccgcgagaagaucgacggcgucaagcucgaguccaugggcgucuaccagauccucgccaucuacuccaccgucgccuccucccucguccuccucgucucccucggcgccaucuccuucuggaugugcuccaacggcucccuccagugccgcaucugcaucuga

SEQ ID NO: 96817 - RNA, 1701 nt, Artificial Sequence
  derived and/or modified CDS sequence (opt2) from hemagglutinin__InfluenzaA__ABD77829
augaagaccaucaucgcccucuccuacauccucuaccucgucuucgcccagaagcuccccggcaacgacaacuccaccgccacccucugccucggccaccacgccguccccaacggcacccucgucaagaccaucaccaacgaccagaucgaggucaccaacgccaccgagcucguccaguccuccuccaccggccgccucugcgacuccccccaccgcauccucgacggcaagaacugcacccucaucgacgcccuccucggcgacccccacugcgacggcuuccagaacaaggagugggaccucuucgucgagcgcuccaaggccuacuccgacugcuaccccuacgacguccccgacuacgccucccuccgcucccucgucgccuccuccggcacccucgaguucaccaacgagggcuucaacuggaccggcgucgcccagaacggcaccuccuacgccugcaagcgcggcuccgucaaguccuucuucucccgccucaacuggcuccacaagcucgaguacaaguaccccgcccucaacgucaccaugcccaacaacgacaaguucgacaagcucuacaucuggggcguccaccaccccuccaccgacuccgaccagaccucccucuacguccaggccuccggccgcgucaccgucuccaccaagcgcucccagcagaccgucauccccaacaucggcucccgccccuggguccgcggcgucuccucccgcaucuccaucuacuggaccaucgucaagcccggcgacauccuccucaucaacuccaccggcaaccucaucgccccccgcggcuacuucaagauccgcuccggcaaguccuccaucaugcgcuccgacgcccccaucggcaacugcaacuccgagugcaucacccccaacggcuccauccccaacgacaagcccuuccagaacgucaaccgcaucaccuacggcgccugcccccgcuacgucaagcagaacacccucaagcucgccaccggcaugcgcaacguccccgagaagcagacccgcggcaucuucggcgccaucgccggcuucaucgagaacggcugggagggcauggucgacggcugguacggcuuccgccaccagaacuccgagggcaccggccaggccgccgaccucaaguccacccaggccgccaucaaccagaucaacggcaagcucaaccgccucaucgagaagaccaacgagaaguuccaccagaucgagaaggaguucuccgaggucgagggccgcauccaggaccucgagaaguacgucgaggacaccaagaucgaccucugguccuacaacgccgagcuccucgucgcccucgagaaccagcacaccaucgaccucaccgacuccgagaugaacaagcucuucgagcgcacccgcaagcagcuccgcgagaacgccgaggacaugggcaacggcugcuucaagaucuaccacaagugcgacaacgccugcaucggcuccauccgcaacggcaccuacgaccacgacgucuaccgcgacgaggcccucaacaaccgcuuccagaucaagggcgucgagcucaaguccggcuacaaggacuggauccucuggaucuccuucgccaucuccugcuuccuccucugcgucguccuccucggcuucaucaugugggccugccagaagggcaacauccgcugcaacaucugcaucuga

SEQ ID NO: 96818 - RNA, 1701 nt, Artificial Sequence
  derived and/or modified CDS sequence (opt2) from hemagglutinin__InfluenzaA__ABD77862
augaagaccaucaucgcccucuccuacauccucugccucgucuucgcccagaagcuccccggcaacgacaacuccaccgccacccucugccucggccaccacgccguccccaacggcacccucgucaagaccaucaccaacgaccagaucgaggucaccaacgccaccgagcucguccaguccuccuccaccggccgcaucugcgacuccccccaccgcauccucgacggcaagaacugcacccucaucgacgcccuccucggcgacccccacugcgacggcuuccagaacaaggagugggaccucuucgucgagcgcuccaaggccuacuccgacugcuaccccuacgacguccccgacuacgccucccuccgcucccucgucgccuccuccggcacccucgaguucaccaacgagggcuucaacuggaccggcgucgcccaggacggcaccuccuacgccugcaagcgcggcuccgucaaguccuucuucucccgccucaacuggcuccacaagcucgaguacaaguaccccgcccucaacgucaccaugcccaacaacgacaaguucgacaagcucuacaucuggggcguccaccaccccuccaccgacuccgaccagaccuccaucuacguccaggccuccggccgcgucaccgucuccaccaagcgcucccagcagaccgucauccccaacaucggcucccgccccuggguccgcggcgucuccucccgcaucuccaucuacuggaccaucgucaagcccggcgacauccuccucaucaacuccaccggcaaccucaucgccccccgcggcuacuucaagauccgcuccggcaaguccuccaucaugcgcuccgacgcccccaucggcaacugcaacuccgagugcaucacccccaacggcuccauccccaacgacaagcccuuccagaacgucaaccgcaucaccuacggcgccugcccccgcuacgucaagcagaacacccucaagcucgccaccggcaugcgcaacguccccgagaagcagacccgcggcaucuucggcgccaucgccggcuucaucgagaacggcugggagggcauggucgacggcugguacggcuuccgccaccagaacuccgagggcaccggccaggccgccgaccucaaguccacccaggccgccaucaaccagaucaacggcaagcucaaccgccucaucgagaagaccaacgagaaguuccaccagaucgagaaggaguucuccgaggucgagggccgcauccaggaccucgagaaguacgucgaggacaccaagaucgaccucugguccuacaacgccgagcuccucgucgcccucgagaaccagcacaccaucgaccucaccgacuccgagaugaacaagcucuucgagcgcacccgcaagcagcuccgcgagaacgccgaggacaugggcaacggcugcuucaagaucuaccacaagugcgacaacgccugcaucggcuccauccgcaacggcaccuacgaccacgacgucuaccgcgacgaggcccucaacaaccgcuuccagaucaagggcgucgagcucaaguccggcuacaaggacuggauccucuggaucuccuucgccaucuccugcuuccuccucugcgucguccuccucggcuucaucaugugggccugccagaagggcaacauccgcugcaacaucugcaucuga

SEQ ID NO: 96819 - RNA, 1701 nt, Artificial Sequence
  derived and/or modified CDS sequence (opt2) from hemagglutinin__InfluenzaA__ABD77884
augaagaccaucaucgcccucuccuacauccucugccucgucuucgcccagaagcuccccggcaacgacaacuccaccgccacccucugccucggccaccacgccguccccaacggcacccucgucaagaccaucaccaacgaccagaucgaggucaccaacgccaccgagcucguccagggcuccuccaccggccgcaucugcgacuccccccaccgcauccucgacggcaagaacugcacccucaucgacgcccuccucggcgacccccacugcgacggcuuccagaacaaggagugggaccucuucgucgagcgcuccaaggccuacuccaacugcuaccccuacgacguccccgacuacgccucccuccgcucccucgucgccuccuccggcacccucgaguucaacaacgaguccuucaacuggaccggcgucgcccagaacggcaccuccuacgccugcaagcgccgcuccgucaaguccuucuucucccgccucaacuggcuccacaagcucgaguacaaguaccccgcccucaacgucaccaugcccaacaacgacaaguucgacaagcucuacaucuggggcguccaccaccccuccaccgacuccgaccagaccucccucuacguccaggccuccggccgcgucaccgucuccaccaagcgcucccagcagaccgucauccccaacaucggcucccgccccuggguccgcggcgucuccucccgcaucuccaucuacuggaccaucgucaagcccggcgacauccuccucaucaacuccaccggcaaccucaucgccccccgcggcuacuucaagauccgcuccggcaaguccuccaucaugcgcuccgacgcccccaucgacaacugcaacuccgagugcaucacccccaacggcuccauccccaacgacaagcccuuccagaacgucaaccgcaucaccuacggcgccugcccccgcuacgucaagcagaacacccucaagcucgccaccggcaugcgcaacguccccgagaagcagacccgcggcaucuucggcgccaucgccggcuucaucgagaacggcugggagggcauggucgacggcugguacggcuuccgccaccagaacuccgagggcaccggccaggccgccgaccucaaguccacccaggccgccaucaaccagaucaacggcaagcucaaccgccucaucgagaagaccaacgagaaguuccaccagaucgagaaggaguucuccgaggucgagggccgcauccaggaccucgagaaguacgucgaggacaccaagaucgaccucugguccuacaacgccgagcuccucgucgcccucgagaaccagcacaccaucgaccucaccgacuccgagaugaacaagcucuucgagcgcacccgcaagcagcuccgcgagaacgccgaggacaugggcaacggcugcuucaagaucuaccacaagugcgacaacgccugcaucggcuccauccgcaacggcaccuacgaccacgacgucuaccgcgacgaggcccucaacaaccgcuuccagaucaagggcgucgagcucaaguccggcuacaaggacuggauccucuggaucuccuucgccaucuccugcuuccuccucugcgucguccuccucggcuucaucaugugggccugccagaagggcaacauccgcugcaacaucugcaucuga

SEQ ID NO: 96820 - RNA, 1701 nt, Artificial Sequence
  derived and/or modified CDS sequence (opt2) from hemagglutinin__InfluenzaA__ABD77895
augaagaccaucaucgcccucuccuacauccucugccucgucuucgcccagaagcuccccggcaacgacaacuccaccgccacccucugccucggccaccacgccguccccaacggcacccucgucaagaccaucaccaacgaccagaucgaggucaccaacgccaccgagcucguccaguccuccuccaccggccgcaucugcgacuccccccaccgcauccucgacggcaagaacugcacccucaucgacgcccuccucggcgacccccacugcgacggcuuccagaacaaggagugggaccucuucgucgagcgcuccaaggccuacuccaacugcuaccccuacgacguccccgacuacgccucccuccgcucccucgucgccuccuccggcacccucgaguucaacaacgaguccuucaacuggaccggcgucgcccagaacggcaccuccuacgccugcaagcgccgcuccgucaaguccuucuucucccgccucaacuggcuccacaagcucgaguacaaguaccccgcccucaacgucaccaugcccaacaacgacaaguucgacaagcucuacaucuggggcguccaccaccccuccaccgacuccgaccagaccucccucuacguccaggccuccggccgcgucaccgucuccaccaagcgcucccagcagaccgucauccccaacaucggcucccgccccuggguccgcggcaucuccucccgcaucuccaucuacuggaccaucgucaagcccggcgacauccuccucaucaacuccaccggcaaccucaucgccccccgcggcuacuucaagauccgcuccggcaaguccuccaucaugcgcuccgacgcccccaucgacaacugcaacuccgagugcaucacccccaacggcuccauccccaacgacaagcccuuccagaacgucaaccgcaucaccuacggcgccugcccccgcuacgucaagcagaacacccucaagcucgccaccggcaugcgcaacguccccgagaagcagacccgcggcaucuucggcgccaucgccggcuucaucgagaacggcugggagggcauggucgacggcugguacggcuuccgccaccagaacuccgagggcaccggccaggccgccgaccucaaguccacccaggccgccaucaaccagaucuccggcaagcucaaccgccucaucgagaagaccaacgagaaguuccaccagaucgagaaggaguucuccgaggucgagggccgcauccaggaccucgagaaguacgucgaggacaccaagaucgaccucugguccuacaacgccgagcuccucgucgcccucgagaaccagcacaccaucgaccucaccgacuccgagaugaacaagcucuucgagcgcacccgcaagcagcuccgcgagaacgccgaggacaugggcaacggcugcuucaagaucuaccacaagugcgacaacgccugcaucggcuccauccgcaacggcaccuacgaccacgacgucuaccgcgacgaggcccucaacaaccgcuuccagaucaagggcgucgagcucaaguccggcuacaaggacuggauccucuggaucuccuucgccaucuccugcuuccuccucugcgucguccuccucggcuucaucaugugggccugccagaagggcaacauccgcugcaacaucugcaucuga

SEQ ID NO: 96821 - RNA, 1701 nt, Artificial Sequence; identical to SEQ ID NO: 96819
  derived and/or modified CDS sequence (opt2) from hemagglutinin__InfluenzaA__ABD77906

SEQ ID NO: 96822 - RNA, 1698 nt, Artificial Sequence
  derived and/or modified CDS sequence (opt2) from hemagglutinin__InfluenzaA__ABD77917
augaaggucaagcuccucguccuccucugcaccuucaccgccaccuacgccgacaccaucugcaucggcuaccacgccaacaacuccaccgacaccgucgacaccguccucgagaagaacgucaccgucacccacuccgucaaccuccucgaggacucccacaacggcaagcucugccuccucaagggcaucgccccccuccagcucggcaacugcuccgucgccggcuggauccucggcaaccccgagugcgagcuccucaucuccaaggaguccugguccuacaucgucgagacccccaaccccgagaacggcaccugcuaccccggcuacuucgccgacuacgaggagcuccgcgagcagcucuccuccgucuccuccuucgagcgcuucgagaucuuccccaaggaguccuccuggcccaaccacaccgucaccggcgucuccgccuccugcucccacaacggcaaguccuccuucuaccgcaaccuccucuggcucaccggcaagaacggccucuaccccaaccucuccaaguccuacgccaacaacaaggagaaggagguccucguccucuggggcguccaccacccccccaacaucggcaaccagaaggcccucuaccacaccgagaacgccuacgucuccgucgucuccucccacuacucccgccgcuucacccccgagaucgccaagcgccccaagguccgcgaccaggagggccgcaucaacuacuacuggacccuccucgagcccggcgacaccaucaucuucgaggccaacggcaaccucaucgccccccgcuacgccuucgcccucucccgcggcuucggcuccggcaucaucaccuccaacgcccccauggacgagugcgacgccaagugccagaccccccagggcgccaucaacuccucccuccccuuccagaacguccaccccgucaccaucggcgagugccccaaguacguccgcuccgccaagcuccgcauggucaccggccuccgcaacauccccuccauccagucccgcggccucuucggcgccaucgccggcuucaucgagggcggcuggaccggcauggucgacggcugguacggcuaccaccaccagaacgagcagggcuccggcuacgccgccgaccagaaguccacccagaacgccaucaacggcaucaccaacaaggucaacuccgucaucgagaagaugaacacccaguucaccgccgucggcaaggaguucaacaagcucgagcgccgcauggagaaccucaacaagaaggucgacgacggcuuccucgacaucuggaccuacaacgccgagcuccucguccuccucgagaacgagcgcacccucgacuuccacgacuccaacgucaagaaccucuacgagaaggucaagucccagcucaagaacaacgccaaggagaucggcaacggcugcuucgaguucuaccacaagugcaacaacgagugcauggaguccgucaagaacggcaccuacgacuaccccaaguacuccgaggaguccaagcucaaccgcgagaagaucgacggcgucaagcucgaguccaugggcgucuaccagauccucgccaucuacuccaccgucgccuccucccucguccuccucgucucccucggcgccaucuccuucuggaugugcuccaacggcucccuccagugccgcaucugcaucuga

SEQ ID NO: 96823 - RNA, 1698 nt, Artificial Sequence
  derived and/or modified CDS sequence (opt2) from hemagglutinin__InfluenzaA__ABD77928
augaaggucaagcuccucguccuccucugcaccuucaccgccaccuacgccgacaccaucugcaucggcuaccacgccaacaacuccaccgacaccgucgacaccguccucgagaagaacgucaccgucacccacuccgucaaccuccucgaggacucccacaacggcaagcucugccuccucaagggcaucgccccccuccagcucggcaacugcuccgucgccggcuggauccucggcaaccccgagugcgagcuccucaucuccaaggaguccugguccuacaucgucgagacccccaaccccgagaacggcaccugcuaccccggcuacuucgccgacuacgaggagcuccgcgagcagcucuccuccgucuccuccuucgagcgcuucgagaucuuccccaaggaguccuccuggcccaaccacaccgucaccggcgucuccgccuccugcucccacaacggcaaguccuccuucuaccgcaaccuccucuggcucaccggcaagaacggccucuaccccaaccucuccaaguccuacgccaacaacaaggagaagaagguccucguccucuggggcguccaccacccccccaacaucggcgaccagaaggcccucuaccacaccgagaacgccuacgucuccgucgucuccucccacuacucccgccgcuucacccccgagaucgccaagcgccccaagguccgcgaccaggagggccgcaucaacuacuacuggacccuccucgagcccggcgacaccaucaucuucgaggccaacggcaaccucaucgccccccgcuacgccuucgcccucucccgcggcuucggcuccggcaucaucaccuccaacgcccccauggacgagugcgacgccaagugccagaccccccagggcgccaucaacuccucccuccccuuccagaacguccaccccgucaccaucggcgagugccccaaguacguccgcuccgccaagcuccgcauggucaccggccuccgcaacauccccuccauccagucccgcggccucuucggcgccaucgccggcuucaucgagggcggcuggaccggcauggucgacggcugguacggcuaccaccaccagaacgagcagggcuccggcuacgccgccgaccagaaguccacccagaacgccaucaacggcaucaccaacaaggucaacuccgucaucgagaagaugaacacccaguucaccgccgucggcaaggaguucaacaagcucgagcgccgcauggagaaccucaacaagaaggucgacgacggcuuccucgacaucuggaccuacaacgccgagcuccucguccuccucgagaacgagcgcacccucgacuuccacgacuccaacgucaagaaccucuacgagaaggucaagucccagcucaagaacaacgccaaggagaucggcaacggcugcuucgaguucuaccacaagugcaacaacgagugcauggaguccgucaagaacggcaccuacgacuaccccaaguacuccgaggaguccaagcucaaccgcgagaagaucgacggcgucaagcucgaguccaugggcgucuaccagauccucgccaucuacuccaccgucgccuccucccucguccuccucgucucccucggcgccaucuccuucuggaugugcuccaacggcucccuccagugccgcaucugcaucuga

SEQ ID NO: 96824 - RNA, 1698 nt, Artificial Sequence; identical to SEQ ID NO: 96778
  derived and/or modified CDS sequence (opt2) from hemagglutinin__InfluenzaA__ABD77939

SEQ ID NO: 96825 - RNA, 1698 nt, Artificial Sequence; identical to SEQ ID NO: 96778
  derived and/or modified CDS sequence (opt2) from hemagglutinin__InfluenzaA__ABD77950

SEQ ID NO: 96826 - RNA, 1698 nt, Artificial Sequence; identical to SEQ ID NO: 96777
  derived and/or modified CDS sequence (opt2) from hemagglutinin__InfluenzaA__ABD77961

SEQ ID NO: 96827 - RNA, 1698 nt, Artificial Sequence; identical to SEQ ID NO: 96778
  derived and/or modified CDS sequence (opt2) from hemagglutinin__InfluenzaA__ABD77983

SEQ ID NO: 96828 - RNA, 1698 nt, Artificial Sequence; identical to SEQ ID NO: 96778
  derived and/or modified CDS sequence (opt2) from hemagglutinin__InfluenzaA__ABD77994

SEQ ID NO: 96829 - RNA, 1698 nt, Artificial Sequence; identical to SEQ ID NO: 96777
  derived and/or modified CDS sequence (opt2) from hemagglutinin__InfluenzaA__ABD78005

SEQ ID NO: 96830 - RNA, 1698 nt, Artificial Sequence; identical to SEQ ID NO: 96777
  derived and/or modified CDS sequence (opt2) from hemagglutinin__InfluenzaA__ABD78016

SEQ ID NO: 96831 - RNA, 1698 nt, Artificial Sequence; identical to SEQ ID NO: 96778
  derived and/or modified CDS sequence (opt2) from hemagglutinin__InfluenzaA__ABD78027

SEQ ID NO: 96832 - RNA, 1698 nt, Artificial Sequence; identical to SEQ ID NO: 96778
  derived and/or modified CDS sequence (opt2) from hemagglutinin__InfluenzaA__ABD78038

SEQ ID NO: 96833 - RNA, 1701 nt, Artificial Sequence; identical to SEQ ID NO: 96813
  derived and/or modified CDS sequence (opt2) from hemagglutinin__InfluenzaA__ABD78049

SEQ ID NO: 96834 - RNA, 1698 nt, Artificial Sequence; identical to SEQ ID NO: 96332
  derived and/or modified CDS sequence (opt2) from hemagglutinin__InfluenzaA__ABD78060

SEQ ID NO: 96835 - RNA, 1698 nt, Artificial Sequence
  derived and/or modified CDS sequence (opt2) from hemagglutinin__InfluenzaA__ABD78071
augaaggccaagcuccucguccuccucugcaccuucaccgccaccuacgccgacaccaucugcaucggcuaccacgccaacaacuccaccgacaccgucgacaccguccucgagaagaacgucaccgucacccacuccgucaaccuccucgaggacucccacaacggcaagcucugccuccucaagggcaucgccccccuccagcucggcaacugcuccgucgccggcuggauccucggcaaccccgagugcgagcuccucaucuccaaggaguccugguccuacaucgucgagacccccaaccccgagaacggcaccugcuaccccggcuacuucgccgacuacgaggagcuccgcgagcagcucuccuccgucuccuccuucgagcgcuucgagaucuuccccaagggcuccuccuggcccaaccacaccgucaccggcgucuccgccuccugcucccacaacggcaaguccuccuucuaccgcaaccuccucuggcucaccggcaagaacggccucuaccccaaccucuccauguccuacgucaacaacaaggagaaggagguccucguccucuggggcguccaccacccccccaacaucggcgaccagcgcgcccucuaccacaccgagaacgccuacgucuccgucgucuccucccacuacucccgccgcuucacccccgagaucgccaagcgccccaagguccgcgaccaggagggccgcaucaacuacuacuggacccuccucgagcccggcgacaccaucaucuucgaggccaacggcaaccucaucgcccccugguacgccuucgcccucuccggcggcuucggcuccggcaucaucaccuccaacgcccccaugggcgagugcgacgccaagugccagaccccccagggcgccaucaacuccucccuccccuuccagaacguccaccccgucaccaucggcgagugccccaaguacguccgcuccgccaagcuccgcauggucaccggccuccgcaacauccccuccauccagucccgcggccucuucggcgccaucgccggcuucaucgagggcggcuggaccggcauggucgacggcugguacggcuaccaccaccagaacgagcagggcuccggcuacgccgccgaccagaaguccacccagaacgccaucaacggcaucaccaacaaggucaacuccgucaucgagaagaugaacacccaguucaccgccgucggcaaggaguucaacaagcucgagcgccgcauggagaaccucaacaagaaggucgacgacggcuuccucgacaucuggaccuacaacgccgagcuccucguccuccucgagaacgagcgcacccucgacuuccacgacuccaacgucaagaaccucuacgagaaggucaagucccagcucaagaacaacgccaaggagaucggcaacggcugcuucgaguucuaccacaagugcaacaacgagugcauggaguccgucaagaacggcaccuacgacuaccccaaguacuccgaggaguccaagcucaaccgcgagaagaucgacggcgucaagcucgaguccaugggcgucuaccagauccucgccaucuacuccaccgucgccuccucccucguccuccucgucucccucggcgccaucuccuucuggaugugcuccaacggcucccuccagugccgcaucugcaucuga

SEQ ID NO: 96836 - RNA, 1698 nt, Artificial Sequence
  derived and/or modified CDS sequence (opt2) from hemagglutinin__InfluenzaA__ABD78093
augaaggccaagcuccucguccuccucugcaccuucaccgccaccuacgccgacaccaucugcaucggcuaccacgccaacaacuccaccgacaccgucgacaccguccucgagaagaacgucaccgucacccacuccgucaaccuccucgaggacucccacaacggcaagcucugccuccucaagggcaucgccccccuccagcucggcaacugcuccgucgccggcuggauccucggcaaccccgagugcgagcuccucaucuccaaggaguccugguccuacaucgucgagacccccaaccccgagaacggcaccugcuaccccggcuacuucgccgacuacgaggagcuccgcgagcagcucuccuccgucuccuccuucgagcgcuucgagaucuuccccaagggcuccuccuggcccaaccacaccgucaccggcgucuccgccuccugcucccacaacggcaaguccuccuucuaccgcaaccuccucuggcucaccggcaagaacggccucuaccccaaccucuccauguccuacgucaacaacaaggagaaggagguccucguccucuggggcguccaccacccccccaacaucggcgaccagcgcgcccucuaccacaccgagaacgccuacgucuccgucgucuccucccacuacucccgccgcuucacccccgagaucgccaagcgccccaagguccgcgaccaggagggccgcaucaacuacuacuggacccuccucgagcccggcgacaccaucaucuucgaggccaacggcaaccucaucgcccccugguacgccuucgcccucucccgcggcuucggcuccggcaucaucaccuccaacgcccccaugggcgagugcgacgccaagugccagaccccccagggcgccaucaacuccucccuccccuuccagaacguccaccccgucaccaucggcgagugccccaaguacguccgcuccgccaagcuccgcauggucaccggccuccgcaacauccccuccauccagucccgcggccucuucggcgccaucgccggcuucaucgagggcggcuggaccggcauggucgacggcugguacggcuaccaccaccagaacgagcagggcuccggcuacgccgccgaccagaaguccacccagaacgccaucaacggcaucaccaacaaggucaacuccgucaucgagaagaugaacacccaguucaccgccgucggcaaggaguucaacaagcucgagcgccgcauggagaaccucaacaagaaggucgacgacggcuuccucgacaucuggaccuacaacgccgagcuccucguccuccucgagaacgagcgcacccucgacuuccacgacuccaacgucaagaaccucuacgagaaggucaagucccagcucaagaacaacgccaaggagaucggcaacggcugcuucgaguucuaccacaagugcaacaacgagugcauggaguccgucaagaacggcaccuacgacuaccccaaguacuccgaggaguccaagcucaaccgcgagaagaucgacggcgucaagcucgaguccaugggcgucuaccagauccucgccaucuacuccaccgucgccuccucccucguccuccucgucucccucggcgccaucuccuucuggaugugcuccaacggcucccuccagugccgcaucugcaucuga

SEQ ID NO: 96837 - RNA, 1701 nt, Artificial Sequence
  derived and/or modified CDS sequence (opt2) from hemagglutinin__InfluenzaA__ABD78115
augaagaccaucaucgcccucuccuacauccucugccucgucuucgcccagaagcuccccggcaacgacaacuccaccgccacccucugccucggccaccacgccguccccaacggcacccucgucaagaccaucaccaacgaccagaucgaggucaccaacgccaccgagcucguccaguccuccuccaccggccgcaucugcgacuccccccaccgcauccucgacggcaagaacugcacccucaucgacgcccuccucggcgacccccacugcgacggcuuccagaacaaggagugggaccucuucgucgagcgcuccaaggccuacuccgacugcuaccccuacgacguccccgacuacgccucccuccgcucccucgucgccuccuccggcacccucgaguucaccaacgagggcuucaacuggaccggcgucgcccaggacggcaccuccuacgccugcaagcgcggcuccgucaaguccuucuucucccgccucaacuggcuccacaagcucgaguacaaguaccccgcccucaacgucaccaugcccaacaacgacaaguucgacaagcucuacaucuggggcguccaccaccccuccaccgacuccgaccagaccucccucuacguccaggccuccggccgcgucaccgucuccaccaagcgcucccagcagaccgucauccccaacaucggcucccgccccuggguccgcggcgucuccucccgcaucuccaucuacuggaccaucgucaagcccggcgacauccuccucaucaacuccaccggcaaccucaucgccccccgcggcuacuucaagauccgcuccggcaaguccuccaucaugcgcuccgacgcccccaucggcaacugcaacuccgagugcaucacccccaacggcuccauccccaacgacaagcccuuccagaacgucaaccgcaucaccuacggcgccugcccccgcuacgucaagcagaacacccucaagcucgccaccggcaugcgcaacguccccgagaagcagacccgcggcaucuucggcgccaucgccggcuucaucgagaacggcugggagggcauggucgacggcugguacggcuuccgccaccagaacuccgagggcaccggccaggccgccgaccucaaguccacccaggccgccaucaaccagaucaacggcaagcucaaccgccucaucgagaagaccaacgagaaguuccaccagaucgagaaggaguucuccgaggucgagggccgcauccaggaccucgagaaguacgucgaggacaccaagaucgaccucugguccuacaacgccgagcuccucgucgcccucgagaaccagcacaccaucgaccucaccgacuccgagaugaacaagcucuucgagcgcacccgcaagcagcuccgcgagaacgccgaggacaugggcaacggcugcuucaagaucuaccacaagugcgacaacgccugcaucggcuccauccgcaacggcaccuacgaccacgacgucuaccgcaacgaggcccucaacaaccgcuuccagaucaagggcgucgagcucaaguccggcuacaaggacuggauccucuggaucuccuucgccaucuccugcuuccuccucugcgucguccuccucggcuucaucaugugggccugccagaagggcaacauccgcugcaacaucugcaucuga

SEQ ID NO: 96838 - RNA, 1701 nt, Artificial Sequence
  derived and/or modified CDS sequence (opt2) from hemagglutinin__InfluenzaA__ABD78126
augaagaccaucaucgcccucuccuacauccucugccucgucuucgcccagaagcuccccggcaacgacaacuccaccgccacccucugccucggccaccacgccguccccaacggcacccucgucaagaccaucaccaacgaccagaucgaggucaccaacgccaccgagcucguccaguccuccuccaccggccgcaucugcgacuccccccaccgcauccucgacggcaagaacugcacccucaucgacgcccuccucggcgacccccacugcgacggcuuccagaacaaggagugggaccucuucgucgagcgcuccaaggccuacuccgacugcuaccccuacgacguccccgacuacgccucccuccgcucccucgucgccuccuccggcacccucgaguucaccaacgagggcuucaacuggaccggcgucgcccaggacggcaccuccuacgccugcaagcgcggcuccgucaaguccuucuucucccgccucaacuggcuccacaagcucgaguacaaguaccccgcccucaacgucaccaugcccaacaacgacaaguucgacaagcucuacaucuggggcguccaccaccccuccaccgacuccgaccagaccucccucuacguccaggccuccggccgcgucaccgucuccaccaagcgcucccagcagaccgucauccccaacaucggcucccgccccuggguccgcggcgucuccuccaucaucuccaucuacuggaccaucgucaagcccggcgacauccuccucaucaacuccaccggcaaccucaucgccccccgcggcuacuucaagauccgcuccggcaaguccuccaucaugcgcuccgacgcccccaucggcaacugcaacuccgagugcaucacccccaacggcuccauccccaacgacaagcccuuccagaacgucaaccgcaucaccuacggcgccugcccccgcuacgucaagcagaacacccucaagcucgccaccggcaugcgcaacguccccgagaagcagacccgcggcaucuucggcgccaucgccggcuucaucgagaacggcugggagggcauggucgacggcugguacggcuuccgccaccagaacuccgagggcaccggccaggccgccgaccucaaguccacccaggccgccaucaaccagaucaacggcaagcucaaccgccucaucgagaagaccaacgagaaguuccaccagaucgagaaggaguucuccgaggucgagggccgcauccaggaccucgagaaguacgucgaggacaccaagaucgaccucugguccuacaacgccgagcuccucgucgcccucgagaaccagcacaccaucgaccucaccgacuccgagaugaacaagcucuucgagcgcacccgcaagcagcuccgcgagaacgccgaggacaugggcaacggcugcuucaagaucuaccacaagugcgacaacgccugcaucggcuccauccgcaacggcaccuacgaccacgacgucuaccgcgacgaggcccucaacaaccgcuuccagaucaagggcgucgagcucaaguccggcuacaaggacuggauccucuggaucuccuucgccaucuccugcuuccuccucugcgucguccuccucggcuucaucaugugggccugccagaagggcaacauccgcugcaacaucugcaucuga

SEQ ID NO: 96839 - RNA, 1701 nt, Artificial Sequence
  derived and/or modified CDS sequence (opt2) from hemagglutinin__InfluenzaA__ABD79032
augaagaccaucaucgcccucuccuacaucuucugccucguccucggccaggacuuccccggcaacgacaacuccaccgccacccucugccucggccaccacgccguccccaacggcacccucgucaagaccaucaccaacgaccagaucgaggucaccaacgccaccgagcucguccaguccuccuccaccggcaagaucugcaacaacccccaccgcauccucgacggcaucgacugcacccucaucgacgcccuccucggcgacccccacugcgacggcuuccagaacgagaccugggaccucuucgucgagcgcuccaaggccuucuccaacugcuaccccuacgacguccccgacuacgccucccuccgcucccucgucgccuccuccggcacccucgaguucaucuccgagggcuucaccuggaccggcgucacccagaacggcggcuccaacgccugcaagcgcggccccgacaucggcuucuucucccgccucaacuggcucuacaaguccggcuccaccuaccccguccucaacgucaccaugcccaacaacgacaacuucgacaagcucuacaucuggggcguccaccaccccuccaccgaccaggagcagaccucccucuacguccaggccuccggccgcgucaccgucuccaccaagcgcucccagcagaccaucauccccaacaucggcucccgccccuggguccgcggccucuccucccgcaucuccaucuacuggaccaucgucaagcccggcgacauccucgucaucaacuccaacggcaaccucaucgccccccgcggcuacuucaagaugcgcaccggcaaguccuccaucaugcgcuccgacgcccccaucggcaccugcaucuccgagugcaucacccccaacggcuccauccccaacgacaagcccuuccagaacgucaacaagaucaccuacggcgccugccccaaguacgucaagcagaacacccucaagcucgccaccggcaugcgcaacguccccgagaagcagacccgcggccucuucuccgccaucgccggcuucaucgagaacggcugggagggcaugaucgacggcugguacggcuuccgccaccagaacuccgagggcaccggccaggccgccgaccucaaguccacccaggccgccaucgaccagaucaacggcaagcucaaccgcgucaucgagaagaccaacgagaaguuccaccagaucgagaaggaguucuccgaggucgagggccgcauccaggaccucgagaaguacgucgaggacaccaagaucgaccucugguccuacaacgccgagcuccucgucgcccucgagaaccagcacaccaucgaccucaccgacuccgagaugaacaagcucuucgagaagacccgccgccagcuccgcgagaacgccgaggacaugggcaacggcugcuucaagaucuaccacaagugcgacaacgccugcaucggcuccauccgcaacggcaccuacgaccacgacgucuaccgcgacgaggcccucaacaaccgcuuccagaucaagggcgucgagcucaaguccggcuacaaggacuggauccucuggaucuccuucgccaucuccugcuuccuccucugcgucguccuccucggcuucaucaugugggccugccagaagggcaacauccgcugcaacaucugcaucuga

SEQ ID NO: 96840 - RNA, 1701 nt, Artificial Sequence
  derived and/or modified CDS sequence (opt2) from hemagglutinin__InfluenzaA__ABD79112
augaaggccaagcuccucauccuccucugcgcccucuccgccaccgacgccgacaccaucugcaucggcuaccacgccaacaacuccaccgacaccgucgacaccguccucgagaagaacgucaccgucacccacuccgucaaccuccucgaggacucccacaacggcaagcucugccgccucaagggcaucgccccccuccagcucggcaagugcaacaucgccggcuggauccucggcaaccccgagugcgagucccuccucuccaagcgcuccugguccuacaucgccgagacccccaacuccgagaacggcgccugcuaccccggcgacuucgccgacuacgaggagcuccgcgagcagcucuccuccgucuccuccuucgagcgcuucgagaucuuccccaagggccgcuccuggcccgagcacaacaucgacaucggcgucaccgccgccugcucccacgccggcaaguccuccuucuacaagaaccuccucuggcucaccgagaaggacggcuccuaccccaaccucaacaaguccuacgucaacaagaaggagaaggagguccucauccucuggggcguccaccacccccccaacaucgagaaccagaagacccucuaccgcaaggagaacgccuacgucuccgucgucuccuccaacuacaaccgccgcuucacccccgagaucgccgagcgccccaagguccgcggccaggccggccgcaucaacuacuacuggacccuccucgagcccggcgacaccaucaucuucgaggccaacggcaaccucaucgcccccugguacgccuucgcccucaaccgcggcaucggcuccggcaucaucaccuccaacgccuccauggacgagugcgacaccaagugccagaccccccagggcgccaucaacuccucccuccccuuccagaacauccaccccuucaccaucggcgagugccccaaguacguccgcuccaccaagcuccgcauggucaccggccuccgcaacauccccuccauccagucccgcggccucuucggcgccaucgccggcuucaucgagggcggcugggacggcaugaucgacggcugguacggcuaccaccaccagaacgagcagggcuccggcuacgccgccgaccagaaguccacccagaacgccaucaacggcaucaccaacaaggucaacuccgucaucgagaagaugaacacccaguucaccgccgucggcaaggaguucaacaagcucgagaagcgcauggagaaccucaacaagaaggucgacgacggcuuccucgacaucuggaccuacaacgccgagcuccucguccuccucgagaacgagcgcacccucgacuuccacgacuccaacgucaagaaccucuacgagaaggucaagaaccagcuccgcaacaacgccaaggagaucggcaacggcugcuucgaguucuaccacaagugcaacaacgagugcauggaguccgucaagaacggcaccuacgacuaccccaaguucuccgaggaguccaagcucaaccgcgagaagaucgacggcgucaagcucgaguccaugggcgucuaccagauccucgccaucuacuccaccgucgccuccucccucguccuccucgucucccucggcgccaucuccuucuggaugugcuccaacggcucccuccagugccgcaucugcaucuga

SEQ ID NO: 96841 - RNA, 1701 nt, Artificial Sequence
  derived and/or modified CDS sequence (opt2) from hemagglutinin__InfluenzaA__ABD79123
augaagaccaucaucgcccucuccuacauccucugccucgucuucgcccagaagcuccccggcaacgacaacuccaccgccacccucugccucggccaccacgccguccccaacggcacccucgucaagaccaucaccaacgaccagaucgaggucaccaacgccaccgagcucguccaguccuccuccaccggccgcaucugcgacuccccccaccagauccucgacggcaagaacugcacccucaucgacgcccuccucggcgacccccacugcgacggcuuccagaacaaggagugggaccucuucgucgagcgcuccaccgccuacuccaacugcuaccccuacgacguccccgacuacgccucccuccgcucccucgucgccuccuccggcacccucgaguucaccaaggagggcuucaacuggaccggcgucgcccaggacggcaccuccuacgccugcaagcgcggcuccgucaaguccuucuucucccgccucaacuggcuccacaagcucgaguacaaguaccccgcccucaacgucaccaugcccaacaacgacaaguucgacaagcucuacaucuggggcguccaccaccccuccaccgacuccgaccagaccucccucuacguccaggccuccggccgcgucaccgucuccaccaagcgcucccagcagaccgucauccccaacaucggcucccgccccuggguccgcggcgucuccucccgcaucuccaucuacuggaccaucgucaagcccggcgacauccuccucaucaacuccaccggcaaccucaucgccccccgcggcuacuucaagauccgcuccggcaaguccuccaucaugcgcuccgacgcccccaucgacaacugcaacuccgagugcaucacccccaacggcuccaucuccaacgacaagcccuuccagaacgucaaccgcaucaccuacggcgccugcccccgcuacgucaagcagaacacccucaagcucgccaccggcaugcgcaacguccccgagaagcagacccgcggcaucuucggcgccaucgccggcuucaucgagaacggcugggagggcauggucgacggcugguacggcuuccgccaccagaacuccgagggcaccggccaggccgccgaccucaaguccacccaggccgccaucaaccagaucaacggcaagcucaaccgccucaucgagaagaccaacgagaaguuccaccagaucgagaaggaguucuccgaggucgagggccgcauccaggaccucgagaaguacgucgaggacaccaagaucgaccucugguccuacaacgccgagcuccucgucgcccucgagaaccagcacaccaucgaccucaccgacuccgagaugaacaagcucuucgagcgcacccgcaagcagcuccgcgagaacgccgaggacaugggcaacggcugcuuccgcaucuaccacaagugcgacaacgccugcaucggcuccauccgcaacggcaccuacgaccacgacgucuaccgcgacgaggcccucaacaaccgcuuccagaucaagggcgucgagcucaaguccggcuacaaggacuggauccucuggaucuccuucgccaucuccugcuuccuccucugcgucguccuccucggcuucaucaugugggccugccagaagggcaacauccgcugcaacaucugcaucuga

SEQ ID NO: 96842 - RNA, 1701 nt, Artificial Sequence
  derived and/or modified CDS sequence (opt2) from hemagglutinin__InfluenzaA__ABD79134
augaagaccaucaucgcccucuccuacauccucugccucgucuucgcccagaagcuccccggcaacgacaacuccaccgccacccucugccucggccaccacgccguccccaacggcacccucgucaagaccaucaccaacgaccagaucgaggucaccaacgccaccgagcucguccaguccuccuccaccggccgcaucugcgacuccccccaccagauccucgacggcaagaacugcacccucaucgacgcccuccucggcgacccccacugcgacggcuuccagaacaagaagugggaccucuucgucgagcgcuccaccgccuacuccaacugcuaccccuacgacguccccgacuacgccucccuccgcucccucgucgccuccuccggcacccucgaguucaccaaggagggcuucaacuggaccggcgucgcccaggacggcaccuccuacgccugcaagcgcggcuccgucaaguccuucuucucccgccucaacuggcuccacaagcucgaguacaaguaccccgcccucaacgucaccaugcccaacaacgacaaguucgacaagcucuacaucuggggcguccaccaccccuccaccgacuccgaccagaccucccucuacguccaggccuccggccgcgucaccgucuccaccaagcgcucccagcagaccgucauccccaacaucggcucccgccccuggguccgcggcgucuccucccgcaucuccaucuacuggaccaucgucaagcccggcgacauccuccucaucaacuccaccggcaaccucaucgccccccgcggcuacuucaagauccgcuccggcaaguccuccaucaugcgcuccgacgcccccaucgacaacugcaacuccgagugcaucacccccaacggcuccaucuccaacgacaagcccuuccagaacgucaaccgcaucaccuacggcgccugcccccgcuacgucaagcagaacacccucaagcucgccaccggcaugcgcaacguccccgagaagcagacccgcggcaucuucggcgccaucgccggcuucaucgagaacggcugggagggcauggucgacggcugguacggcuuccgccaccagaacuccgagggcaccggccaggccgccgaccucaaguccacccaggccgccaucaaccagaucaacggcaagcucaaccgccucaucgagaagaccaacgagaaguuccaccagaucgagaaggaguucuccgaggucgagggccgcauccaggaccucgagaaguacgucgaggacaccaagaucgaccucugguccuacaacgccgagcuccucgucgcccucgagaaccagcacaccaucgaccucaccgacuccgagaugaacaagcucuucgagcgcacccgcaagcagcuccgcgagaacgccgaggacaugggcaacggcugcuucaagaucuaccacaagugcgacaacgccugcaucggcuccauccgcaacggcaccuacgaccacgacgucuaccgcgacgaggcccucaacaaccgcuuccagaucaagggcgucgagcucaaguccggcuacaaggacuggauccucuggaucuccuucgccaucuccugcuuccuccucugcgucguccuccucggcuucaucaugugggccugccagaagggcaacauccgcugcaacaucugcaucuga

SEQ ID NO: 96843 - RNA, 1701 nt, Artificial Sequence
  derived and/or modified CDS sequence (opt2) from hemagglutinin__InfluenzaA__ABD79145
augaagaccaucaucgcccucuccuacauccucugccucgucuucgcccagaagcuccccggcaacgacaacuccaccgccacccucugccucggccaccacgccguccccaacggcacccucgucaagaccaucaccaacgaccagaucgaggucaccaacgccaccgagcucguccaguccuccuccaccggccgcaucugcgacuccccccaccagauccucgacggcaagaacugcacccucaucgacgcccuccucggcgacccccacugcgacggcuuccagaacaaggagugggaccucuucgucgagcgcuccaccgccuacuccaacugcuaccccuacgacguccccgacuacgccucccuccgcucccucgucgccuccuccggcacccucgaguucaccaaggagggcuucaacuggaccggcgucgcccaggacggcaccuccuacgccugcaagcgcggcuccgucaaguccuucuucucccgccucaacuggcuccacaagcucgaguacaaguaccccgcccucaacgucaccaugcccaacaacgacaaguucgacaagcucuacaucuggggcguccaccaccccuccaccgacuccgaccagaccucccucuacguccaggccuccggccgcgucaccgucuccaccaagcgcucccagcagaccgucauccccaacaucggcucccgccccuggguccgcggcgucuccucccgcaucuccaucuacuggaccaucgucaagcccggcgacauccuccucaucaacuccaccggcaaccucaucgccccccgcggcuacuucaagauccgcuccggcaaguccuccaucaugcgcuccgacgcccccaucgacaacugcaacuccgagugcaucacccccaacggcuccaucuccaacgacaagcccuuccagaacgucaaccgcaucaccuacggcgccugcccccgcuacgucaagcagaacacccucaagcucgccaccggcaugcgcaacguccccgagaagcagacccgcggcaucuucggcgccaucgccggcuucaucgagaacggcugggagggcauggucgacggcugguacggcuuccgccaccagaacuccgagggcaccggccaggccgccgaccucaaguccacccaggccgccaucaaccagaucaacggcaagcucaaccgccucaucgagaagaccaacgagaaguuccaccagaucgagaaggaguucuccgaggucgagggccgcauccaggaccucgagaaguacgucgaggacaccaagaucgaccucugguccuacaacgccgagcuccucgucgcccucgagaaccagcacaccaucgaccucaccgacuccgagaugaacaagcucuucgagcgcacccgcaagcagcuccgcgagaacgccgaggacaugggcaacggcugcuucaagaucuaccacaagugcgacaacgccugcaucggcuccauccgcaacggcaccuacgaccacgacgucuaccgcgacgaggcccucaacaaccgcuuccagaucaagggcgucgagcucaaguccggcuacaaggacuggauccucuggaucuccuucgccaucuccugcuuccuccucugcgucguccuccucggcuucaucaugugggccugccagaagggcaacauccgcugcaacaucugcaucuga

SEQ ID NO: 96844 - RNA, 1701 nt, Artificial Sequence; identical to SEQ ID NO: 96843
  derived and/or modified CDS sequence (opt2) from hemagglutinin__InfluenzaA__ABD79156

SEQ ID NO: 96845 - RNA, 1701 nt, Artificial Sequence; identical to SEQ ID NO: 96059
  derived and/or modified CDS sequence (opt2) from hemagglutinin__InfluenzaA__ABD79167

SEQ ID NO: 96846 - RNA, 1701 nt, Artificial Sequence; identical to SEQ ID NO: 96843
  derived and/or modified CDS sequence (opt2) from hemagglutinin__InfluenzaA__ABD79178

SEQ ID NO: 96847 - RNA, 1701 nt, Artificial Sequence
  derived and/or modified CDS sequence (opt2) from hemagglutinin__InfluenzaA__ABD79189
augaagaccaucaucgcccucuccuacauccucugccucgucuucgcccagaagcuccccggcaacgacaacuccaccgccacccucugccucggccaccacgccguccccaacggcacccucgucaagaccaucaccaacgaccagaucgaggucaccaacgccaccgagcucguccaguccuccuccaccggccgcaucugcgacuccccccaccagauccucgacggcaagaacugcacccucaucgacgcccuccucggcgacccccacugcgacggcuuccagaacaaggagugggaccucuucgucgagcgcuccaccgccuacuccaacugcuaccccuacgacguccccgacuacgccucccuccgcucccucgucgccuccuccggcacccucgaguucaccaaggagggcuucaacuggaccggcgucgcccaggacggcaccuccuacgccugcaagcgcggcuccgucaaguccuucuucucccgccucaacuggcuccacaagcucgaguacaaguaccccgcccucaacgucaccaugcccaacaacgacaaguucgacaagcucuacaucuggggcguccaccaccccuccaccgacuccgaccagaccucccucuacguccaggccuccggccgcgucaccgucuccaccaagcgcucccagcagaccgucauccccaacaucggcucccgccccuggguccgcggcgucuccucccgcaucuccaucuacuggaccgucgucaagcccggcgacauccuccucaucaacuccaccggcaaccucaucgccccccgcggcuacuucaagauccgcuccggcaaguccuccaucaugcgcuccgacgcccccaucgacuccugcaacuccgagugcaucacccccaacggcuccaucuccaacgacaagcccuuccagaacgucaaccgcaucaccuacggcgccugcccccgcuacgucaagcagaacacccucaagcucgccaccggcaugcgcaacguccccgagaagcagacccgcggcaucuucggcgccaucgccggcuucaucgagaacggcugggagggcauggucgacggcugguacggcuuccgccaccagaacuccgagggcaccggccaggccgccgaccucaaguccacccaggccgccaucaaccagaucaacggcaagcucaaccgccucaucgagaagaccaacgagaaguuccaccagaucgagaaggaguucuccgaggucgagggccgcauccaggaccucgagaaguacgucgaggacaccaagaucgaccucugguccuacaacgccgagcuccucgucgcccucgagaaccagcacaccaucgaccucaccgacuccgagaugaacaagcucuucgagcgcacccgcaagcagcuccgcgagaacgccgaggacaugggcaacggcugcuucaagaucuaccacaagugcgacaacgccugcaucggcuccauccgcaacggcaccuacgaccacgacgucuaccgcgacgaggcccucaacaaccgcuuccagaucaagggcgucgagcucaaguccggcuacaaggacuggauccucuggaucuccuucgccaucuccugcuuccuccucugcgucguccuccucggcuucaucaugugggccugccagaagggcaacauccgcugcaacaucugcaucuga

SEQ ID NO: 96848 - RNA, 1701 nt, Artificial Sequence; identical to SEQ ID NO: 96843
  derived and/or modified CDS sequence (opt2) from hemagglutinin__InfluenzaA__ABD79200

SEQ ID NO: 96849 - RNA, 1701 nt, Artificial Sequence
  derived and/or modified CDS sequence (opt2) from hemagglutinin__InfluenzaA__ABD79211
augaagaccaucaucgcccucuccuacauccucugccucgucuucgcccagaagcuccccggcaacgacaacuccaccgccacccucugccucggccaccacgccguccccaacggcacccucgucaagaccaucaccaacgaccagaucgaggucaccaacgccaccgagcucguccaguccuccuccaccggccgcaucugcgacuccccccaccagauccucgacggcaagaacugcacccucaucgacgcccuccucggcgacccccacugcgacggcuuccagaacaaggagugggaccucuucgucgagcgcuccaccgccuacuccaacugcuaccccuacgacguccccgacuacgccucccuccgcucccucgucgccuccuccggcacccucgaguucaccaaggagggcuucaacuggaccggcgucgcccaggacggcaccuccuacgccugcaagcgcggcuccgucaaguccuucuucucccgccucaacuggcuccacaagcucgaguacaaguaccccgcccucaacgucaccaugcccaacaacgacaaguucgacaagcucuacaucuggggcguccaccaccccuccaccgacuccgaccagaccucccucuacguccaggccuccggccgcgucaccgucuccaccaagcgcucccagcagaccgucauccccaacaucggcucccgccccuggauccgcggcgucuccucccgcaucuccaucuacuggaccaucgucaagcccggcgacauccuccucaucaacuccaccggcaaccucaucgccccccgcggcuacuucaagauccgcuccggcaaguccuccaucaugcgcuccgacgcccccaucgacaacugcaacuccgagugcaucacccccaacggcuccaucuccaacgacaagcccuuccagaacgucaaccgcaucaccuacggcgccugcccccgcuacgucaagcagaacacccucaagcucgccaccggcaugcgcaacguccccgagaagcagacccgcggcaucuucggcgccaucgccggcuucaucgagaacggcugggagggcauggucgacggcugguacggcuuccgccaccagaacuccgagggcaccggccaggccgccgaccucaaguccacccaggccgccaucaaccagaucaacggcaagcucaaccgccucaucgagaagaccaacgagaaguuccaccagaucgagaaggaguucuccgaggucgagggccgcauccaggaccucgagaaguacgucgaggacaccaagaucgaccucugguccuacaacgccgagcuccucgucgcccucgagaaccagcacaccaucgaccucaccgacuccgagaugaacaagcucuucgagcgcacccgcaagcagcuccgcgagaacgccgaggacaugggcaacggcugcuucaagaucuaccacaagugcgacaacgccugcaucggcuccauccgcaacggcaccuacgaccacgacgucuaccgcgacgaggcccucaacaaccgcuuccagaucaagggcgucgagcucaaguccggcuacaaggacuggauccucuggaucuccuucgccaucuccugcuuccuccucugcgucguccuccucggcuucaucaugugggccugccagaagggcaacauccgcugcaacaucugcaucuga

SEQ ID NO: 96850 - RNA, 1701 nt, Artificial Sequence; identical to SEQ ID NO: 96059
  derived and/or modified CDS sequence (opt2) from hemagglutinin__InfluenzaA__ABD79222

SEQ ID NO: 96851 - RNA, 1701 nt, Artificial Sequence; identical to SEQ ID NO: 96059
  derived and/or modified CDS sequence (opt2) from hemagglutinin__InfluenzaA__ABD79233

SEQ ID NO: 96852 - RNA, 1701 nt, Artificial Sequence
  derived and/or modified CDS sequence (opt2) from hemagglutinin__InfluenzaA__ABD79244
augaagaccaucaucgcccucuccuacauccucugccucgucuucgcccagaagcuccccggcaacgacaacuccaccgccacccucugccucggccaccacgccguccccaacggcacccucgucaagaccaucaccaacgaccagaucgaggucaccaacgccaccgagcucguccaguccuccuccaccggccgcaucugcgacuccccccaccagauccucgacggcaagaacugcacccucaucgacgcccuccucggcgacccccacugcgacggcuucaagaacaaggagugggaccucuucgucgagcgcuccaccgccuacuccaacugcuaccccuacgacguccccgacuacgccucccuccgcucccucgucgccuccuccggcacccucgaguucaccaacgagggcuucaacuggaccggcgucgcccaggacggcaccuccuacgccugcaagcgcggcuccgucaaguccuucuucucccgccucaacuggcuccacaagcucgaguacaaguaccccgcccucaacgucaccaugcccaacaacgacaaguucgacaagcucuacaucuggggcguccaccaccccuccaccgacuccgaccagaccucccucuacguccaggccuccggccgcgucaccgucuccaccaagcgcucccagcagaccgucauccccaacaucggcucccgccccuggguccgcggcgucuccucccgcaucuccaucuacuggaccaucgucaagcccggcgacauccuccucaucaacuccaccggcaaccucaucgccccccgcggcuacuucaagauccgcuccggcaaguccuccaucaugcgcuccgacgcccccaucgacaacugcaacuccgagugcaucacccccaacggcuccauccccaacgacaagcccuuccagaacgucaaccgcaucaccuacggcgccugcccccgcuacgucaagcagaacacccucaagcucgccaccggcaugcgcaacguccccgagaagcagacccgcggcaucuucggcgccaucgccggcuucaucgagaacggcugggagggcauggucgacggcugguacggcuuccgccaccagaacuccgagggcaccggccaggccgccgaccucaaguccacccaggccgccaucaaccagaucaacggcaagcucaaccgccucaucgagaagaccaacgagaaguuccaccagaucgagaaggaguucuccgaggucgagggccgcauccaggaccucgagaaguacgucgaggacaccaagaucgaccucugguccuacaacgccgagcuccucgucgcccucgagaaccagcacaccaucgaccucaccgacuccgagaugaacaagcucuucgagcgcacccgcaagcagcuccgcgagaacgccgaggacaugggcaacggcugcuucaagaucuaccacaagugcgacaacgccugcaucggcuccauccgcaacggcaccuacgaccacgacgucuaccgcgacgaggcccucaacaaccgcuuccagaucaagggcgucgagcucaaguccggcuacaaggacuggauccucuggaucuccuucgccaucuccugcuuccuccucugcgucguccuccucggcuucaucaugugggccugccagaagggcaacauccgcugcaacaucugcaucuga

SEQ ID NO: 96853 - RNA, 1701 nt, Artificial Sequence; identical to SEQ ID NO: 96279
  derived and/or modified CDS sequence (opt2) from hemagglutinin__InfluenzaA__ABD94734

SEQ ID NO: 96854 - RNA, 1701 nt, Artificial Sequence; identical to SEQ ID NO: 96666
  derived and/or modified CDS sequence (opt2) from hemagglutinin__InfluenzaA__ABD94745

SEQ ID NO: 96855 - RNA, 1701 nt, Artificial Sequence
  derived and/or modified CDS sequence (opt2) from hemagglutinin__InfluenzaA__ABD94767
augaagaccaucaucgcccucuccuacauccucugccucgucuucgcccagaagcuccccgucaacgacaacuccaccgccacccucugccucggccaccacgccguccccaacggcacccucgucaagaccaucaccaacgacaacaucgaggucaccaacgccaccgagcucguccaguccuccuccaccggccgcaucugcgacuccccccaccagauccucgacggcgagaacugcacccucaucgacgcccuccucggcgacccccacugcgacggcuuccagaacaaggagugggaccucuucgucgagcgcuccaccgccuacuccaacugcuaccccuacgacguccccgacuacgccucccuccgcucccucgucgccuccuccggcacccucgaguucaacaacgaguccuucaacuggaccggcgucgaccagaacggcaccuccuccgccugcaagcgccgcuccaacaaguccuucuucucccgccucaacuggcuccaccagcucaaguacaaguaccccgcccucaacgucaccaugcccaacaacgagaaguucgacaagcucuacaucuggggcguccaccaccccuccaccgacuccgaccagaucucccucuacgcccaggccuccggccgcgucaccgucuccaccaagcgcucccagcagaacgucauccccaacaucggcucccgccccuggguccgcggcgucuccucccgcaucuccaucuacuggaccaucgucaagcccggcgacauccuccucaucaacuccaccggcaaccucaucgccccccgcggcuacuucaagauccgcuccggcaaguccuccaucaugcgcuccaacgcccccaucggcaagugcaacuccgagugcaucacccccaacggcuccauccccaacgacaagcccuuccagaacgucaaccgcaucaccuacggcgccugcccccgcuacgucaagcagaacacccucaagcucgccaccggcaugcgcaacguccccgagaagcagacccgcggcaucuucggcgccaucgccggcuucaucgagaacggcugggagggcauggucgacggcugguacggcuuccgccaccagaacuccgagggcaccggccaggccgccgaccucaaguccacccaggccgccaucaaccagaucaacggcaagcucaaccgccucaucgagaagaccaacgagaaguuccaccagaucgagaaggaguucuccgaggucgagggccgcauccaggaccucgagaaguacgucgaggacaccaagaucgaccucugguccuacaacgccgagcuccucgucgcccucgagaaccagcacaccaucgaccucaccgacuccgagaugaacaagcucuucgagcgcacccgcaagcagcuccgcgagaacgccgaggacaugggcaacggcugcuucaagaucuaccacaagugcgacaacgccugcaucggcuccauccgcaacggcaccuacgaccacgacgucuaccgcgacgaggcccucaacaaccgcuuccagaucaagggcgucgagcucaaguccggcuacaaggacuggauccucuggaucuccuucgccaucuccugcuuccuccucugcgucguccuccucggcuucaucaugugggccugccagaagggcaacauccgcugcaacaucugcaucuga

SEQ ID NO: 96856 - RNA, 1698 nt, Artificial Sequence; identical to SEQ ID NO: 96836
  derived and/or modified CDS sequence (opt2) from hemagglutinin__InfluenzaA__ABD94778

SEQ ID NO: 96857 - RNA, 1698 nt, Artificial Sequence; identical to SEQ ID NO: 96836
  derived and/or modified CDS sequence (opt2) from hemagglutinin__InfluenzaA__ABD94789

SEQ ID NO: 96858 - RNA, 1701 nt, Artificial Sequence
  derived and/or modified CDS sequence (opt2) from hemagglutinin__InfluenzaA__ABD94822
augaagaccaucaucgcccucuccuacauccucugccucgucuucgcccagaagauccccggcaacgacaacuccaccgccacccucugccucggccaccacgccguccccaacggcacccucgucaagaccaucaccaacgaccagaucgaggucaccaacgccaccgagcucguccaguccuccuccaccggccgcaucugcgacuccccccaccgcauccucgacggcgagaacugcacccucaucgacgcccuccucggcgacccccacugcgacggcuuccagaacaaggagugggaccucuucgucgagcgcuccaaggccuacuccaacugcuaccccuacgacguccccgacuacgccucccuccgcucccucgucgccuccuccggcacccucgaguucaacaacgaguccuucaacuggaccggcgucgcccagaacggcaccuccuacgccugcaagcgcuccuccaucaaguccuucuucucccgccucaacuggcuccaccagcucaaguacaaguaccccgcccucaacgucaccaugcccaacaacgacaaguucgacaagcucuacaucuggggcguccaccaccccuccaccgacuccgaccagaccucccucuacgcccaggccuccggccgcgucaccgucuccaccaagcgcucccagcagaccgucauccccaacaucggcucccgccccuggguccgcggcgucuccucccgcaucuccaucuacuggaccaucgucaagcccggcgacauccuccucaucaacuccaccggcaaccucaucgccccccgcggcuacuucaagauccgcuccggcaaguccuccaucaugcgcuccgacgcccccaucggcaagugcaacuccgagugcaucacccccaacggcuccauccccaacgacaagcccuuccagaacgucaaccgcaucaccuacggcgccugcccccgcuacgucaagcagaacacccucaagcucgccaccggcaugcgcaacguccccgagaagcagacccgcggcaucuucggcgccaucgccggcuucaucgagaacggcugggagggcauggucgacggcugguacggcuuccgccaccagaacuccgagggcaccggccaggccgccgaccucaaguccacccaggccgccaucaaccagaucaacggcaagcucaaccgccucaucgagaagaccaacgagaaguuccaccagaucgagaaggaguucuccgaggucgagggccgcauccaggaccucgagaaguacgucgaggacaccaagaucgaccucugguccuacaacgccgagcuccucgucgcccucgagaaccagcacaccaucgaccucaccgacuccgagaugaacaagcucuucgagcgcacccgcaagcagcuccgcgagaacgccgaggacaugggcaacggcugcuucaagaucuaccacaagugcgacaacgccugcaucggcuccauccgcaacggcaccuacgaccacgacgucuaccgcgacgaggcccucaacaaccgcuuccagaucaagggcgucgagcucaaguccggcuacaaggacuggauccucuggaucuccuucgccaucuccugcuuccuccucugcgucguccuccucggcuucaucaugugggccugccagaagggcaacauccgcugcaacaucugcaucuga

SEQ ID NO: 96859 - RNA, 1701 nt, Artificial Sequence
  derived and/or modified CDS sequence (opt2) from hemagglutinin__InfluenzaA__ABD94833
augaagaccaucaucgcccucuccuacauccucugccucgucuucgcccagaagcuccccggcaacgacaacuccaccgccacccucugccucggccaccacgccguccccaacggcacccucgucaagaccaucaccaacgaccagaucgaggucaccaacgccaccgagcucguccaguccuccuccaccggccgcaucugcgacuccccccaccgcauccucgacggcaagaacugcacccucaucgacgcccuccucggcgacccccacugcgacggcuuccagaacaaggagugggaccucuucgucgagcgcuccaaggccuacuccgacugcuaccccuacgacguccccgacuacgccucccuccgcucccucgucgccuccuccggcacccucgaguucaccaacgagggcuucaacuggaccggcgucgcccaggacggcaccuccuacgccugcaagcgcggcuccgucaaguccuucuucucccgccucaacuggcuccacaagcucgaguacaaguaccccgcccucaacgucaccaugcccaacaacgacaaguucgacaagcucuacaucuggggcguccaccaccccuccaccgacuccgaccagaccucccucuacguccaggccuccggccgcgucaccgucuccaccaagcgcucccagcagaccgucauccccaacaucggcucccgccccuggguccgcggcgucuccucccgcaucuccaucuacuggaccaucgucaagcccggcgacauccuccucaucaacuccaccggcaaccucaucgccccccgcggcuacuucaagauccgcuccggcaaguccuccaucaugcgcuccgacgcccccaucggcaacugcaacuccgagugcaucacccccaacggcuccauccccaacgacaagcccuuccagaacgucaaccgcaucaccuacggcgccugcccccgcuacgucaagcagaacacccucaagcucgccaccggcaugcgcaacguccccgagaagcagacccgcggcaucuucggcgccaucgccggcuucaucgagaacggcugggagggcauggucgacggcugguacggcuuccgccaccagaacuccgagggcaccggccaggccgccgaccucaaguccacccaggccgccaucaaccagaucaacggcaagcucaaccgccucaucgagaagaccaacgagaaguuccaccagaucgagaaggaguucuccgaggucgagggccgcauccaggaccucgagaaguacgucgaggacaccaagaucgaccucugguccuacaacgccgagcuccucgucgcccucgagaaccagcacaccaucgaccucaccgacuccgagaugaacaagcucuucgagcgcacccgcaagcagcuccgcgagaacgccgaggacaugggcaacggcugcuucaagaucuaccacaagugcgacaacgccugcaucggcuccauccgcaacggcaccuacgaccacgacgucuaccgcgacgaggcccucaacaaccgcuuccagaucaagggcgucgagcucaaguccggcuacaaggacuggauccucuggaucuccuucgccaucuccugcuuccuccucugcgucguccuccucggcuucaucaugugggccugccagaagggcaacauccgcugcaacaucugcaucuga

SEQ ID NO: 96860 - RNA, 1701 nt, Artificial Sequence
  derived and/or modified CDS sequence (opt2) from hemagglutinin__InfluenzaA__ABD94844
augaagaccaucaucgcccucuccuacauccucugcauggucuucgcccagaagcuccccggcaacgacaacuccaccgccacccucugccucggccaccacgccguccccaacggcacccucgucaagaccaucaccaacgaccagaucgaggucaccaacgccaccgagcucguccaguccuccuccaccggccgcaucugcgacuccccccaccgcauccucgacggcaagaacugcacccucaucgacgcccuccucggcgacccccacugcgacggcuuccagaacaaggagugggaccucuucgucgagcgcuccaaggccuacuccaacugcuaccccuacgacguccccgacuacgccucccuccgcucccucgucgccuccuccggcacccucgaguucaacaacgaguccuucaacuggaccggcgucgcccagaacggcaccuccuacgccugcaagcgccgcuccgucaaguccuucuucucccgccucaacuggcuccacaagcucgaguacaaguaccccgcccucaacgucaccaugcccaacaacgacaaguucgacaagcucuacaucuggggcguccaccaccccuccaccgacuccgaccagaccucccucuacguccaggccuccggccgcgucaccgucuccaccaagcgcucccagcagaccgucauccccaacaucggcucccgccccuggguccgcggcgucuccuccaucaucuccaucuacuggaccaucgucaagcccggcgacauccuccucaucaacuccaccggcaaccucaucgccccccgcggcuacuucaagauccgcuccggcaaguccuccaucaugcgcuccgacgcccccaucggcaacugcaacuccgagugcaucacccccaacggcuccauccccaacgacaagcccuuccagaacgucaaccgcaucaccuacggcgccugcccccgcuacgucaagcagaacacccucaagcucgccaccggcaugcgcaacguccccgagaagcagacccgcggcaucuucggcgccaucgccggcuucaucgagaacggcugggagggcauggucgacggcugguacggcuuccgccaccagaacuccgagggcaccggccaggccgccgaccucaaguccacccaggccgccaucaaccagaucaacggcaagcucaaccgccucaucgagaagaccaacgagaaguuccaccagaucgagaaggaguucuccgaggucgagggccgcauccaggaccucgagaaguacgucgaggacaccaagaucgaccucugguccuacaacgccgagcuccucgucgcccucgagaaccagcacaccaucgaccucaccgacuccgagaugaacaagcucuucgagcgcacccgcaagcagcuccgcgagaacgccgaggacaugggcaacggcugcuucaagaucuaccacaagugcgacaacgccugcaucggcuccauccgcaacggcaccuacgaccacgacgucuaccgcgacgaggcccucaacaaccgcuuccagaucaagggcgucgagcucaaguccggcuacaaggacuggauccucuggaucuccuucgccaucuccugcuuccuccucugcgucguccuccucggcuucaucaugugggccugccagaagggcaacauccgcugcaacaucugcaucuga

SEQ ID NO: 96861 - RNA, 1701 nt, Artificial Sequence
  derived and/or modified CDS sequence (opt2) from hemagglutinin__InfluenzaA__ABD94855
augaagaccaucaucgcccucuccuacauccucugccucgucuucgcccagaagcuccccggcaacgacaacuccaccgccacccucugccucggccaccacgccguccccaacggcacccucgucaagaccaucaccaacgaccagaucgaggucaccaacgccaccgagcucguccagggcuccuccaccggccgcaucugcgacuccccccaccgcauccucgacggcaagaacugcacccucaucgacgcccuccucggcgacccccacugcgacggcuuccagaacaaggagugggaccucuucgucgagcgcuccaaggccuacuccaacugcuaccccuacgacguccccgacuacgccucccuccgcucccucgucgccuccuccggcacccucgaguucaacaacgaguccuucaacuggaccggcgucgcccagaacggcaccuccuacgccugcaagcgcggcuccgucaaguccuucuucucccgccucaacuggcuccacaagcucgaguacaaguaccccgcccucaacgucaccaugcccaacaacgacaaguucgacaagcucuacaucuggggcguccaccaccccuccaccgacuccgaccagaccucccucuacguccaggccuccggccgcgucaccgucuccaccaagcgcucccagcagaccgucauccccaacaucggcucccgccccuggguccgcggcgucuccucccgcaucuccaucuacuggaccaucgucaagcccggcgacauccuccucaucaacuccaccggcaaccucaucgccccccgcggcuacuucaagauccgcuccggcaaguccuccaucaugcgcuccgacgcccccaucgacaacugcaacuccgagugcaucacccccaacggcuccauccccaacgacaagcccuuccagaacgucaaccgcaucaccuacggcgccugcccccgcuacgucaagcagaacacccucaagcucgccaccggcaugcgcaacguccccgagaagcagacccgcggcaucuucggcgccaucgccggcuucaucgagaacggcugggagggcauggucgacggcugguacggcuuccgccaccagaacuccgagggcaccggccaggccgccgaccucaaguccacccaggccgccaucaaccagaucaacggcaagcucaaccgccucaucgagaagaccaacgagaaguuccaccagaucgagaaggaguucuccgaggucgagggccgcauccaggaccucgagaaguacgucgaggacaccaagaucgaccucugguccuacaacgccgagcuccucgucgcccucgagaaccagcacaccaucgaccucaccgacuccgagaugaacaagcucuucgagcgcacccgcaagcagcuccgcgagaacgccgaggacaugggcaacggcugcuucaagaucuaccacaagugcgacaacgccugcaucggcuccauccgcaacggcaccuacgaccacgacgucuaccgcgacgaggcccucaacaaccgcuuccagaucaagggcgucgagcucaaguccggcuacaaggacuggauccucuggaucuccuucgccaucuccugcuuccuccucugcgucguccuccucggcuucaucaugugggccugccagaagggcaacauccgcugcaacaucugcaucuga

SEQ ID NO: 96862 - RNA, 1701 nt, Artificial Sequence
  derived and/or modified CDS sequence (opt2) from hemagglutinin__InfluenzaA__ABD94866
augaagaccaucaucgcccucuccuacaucuccugccucgucuucgcccagaagcuccccggcaacgacaacuccaccgccacccucugccucggccaccacgccguccccaacggcacccucgucaagaccaucaccaacgaccagaucgaggucaccaacgccaccgagcucguccaguccuccuccaccggccgcaucugcgacggcccccaccagauccucgacggcaagaacugcacccucaucgacgcccuccucggcgacccccacugcgacggcuuccagaacaaggagugggaccucuucgucgagcgcuccaaggccuacuccaacugcuaccccuacgacguccccgacuacgccucccuccgcucccucgucgccuccuccggcacccucgaguucaccaacgaguccuucaacuggaccggcgucgcccagaacggcaccuccuacgccugcaagcgcggcuccgucaaguccuucuucucccgccucaacuggcuccacaagcucgaguacaaguaccccgcccucaacgucaccaugcccaacaacgacaaguucgacaagcucuacaucuggggcguccaccaccccuccaccgacuccgaccagaccucccucuacguccaguccuccggccgcaucaccgucuccaccaagcgcucccagcagaccgucacccccaacaucggcucccgccccuggguccgcggcgucuccucccgcaucuccaucuacuggaccaucgucaagcccggcgacauccuccucaucaccuccaccggcaaccucaucgccccccgcggcuacuucaagauccgccgcggcaaguccuccaucaugcgcuccgacgcccccaucgacaacugcaacuccgagugcaucacccccaacggcuccauccccaacgacaagcccuuccagaacgucaaccgcaucaccuacggcgccugcccccgcuacgucaagcagaacacccucaagcucgccaccggcaugcgcaacguccccgagaagcagacccgcggcaucuucggcgccaucgccggcuucaucgagaacggcugggagggcauggucgacggcugguacggcuuccgccaccagaacuccgagggcaccggccaggccgccgaccucaaguccacccaggccgccaucaaccagaucaacggcaagcucaaccgccucaucgagaagaccaacgagaaguuccaccagaucgagaaggaguucuccgaggucgagggccgcauccaggaccucgagaaguacgucgaggacaccaagaucgaccucugguccuacaacgccgagcuccucgucgcccucgagaaccagcacaccaucgaccucaccgacuccgagaugaacaagcucuucgagcgcacccgcaagcagcuccgcgagaacgccgaggacaugggcaacggcugcuucaagaucuaccacaagugcgacaacgccugcaucggcuccauccgcaacggcaccuacgaccacgacgucuaccgcgacgaggcccucaacaaccgcuuccagaucaagggcgucgagcucaaguccggcuacaaggacuggauccucuggaucuccuucgccaucuccugcuuccuccucugcgucguccuccucggcuucaucaugugggccugccagaagggcaacauccgcugcaacaucugcaucuga

SEQ ID NO: 96863 - RNA, 1701 nt, Artificial Sequence
  derived and/or modified CDS sequence (opt2) from hemagglutinin__InfluenzaA__ABD94877
augaagaccaucaucgcccucuccuacauccucugccucgucuucgcccagaagcuccccggcaacgacaacuccaccgccacccucugccucggccaccacgccguccccaacggcacccucgucaagaccaucaccaacgaccagaucgaggucaccaacgccaccgagcucguccaguccuccuccaccggccgcaucugcgacuccccccaccgcauccucgacggcaagaacugcacccucaucgacgcccuccucggcgacccccacugcgacggcuuccagaacaaggagugggaccucuucgucgagcgcuccaaggccuacuccaacugcuaccccuacgacguccccgacuacgccucccuccgcucccucgucgccuccuccggcacccucgaguucaacaacgaguccuucaacuggaccggcgucgcccagaacggcaccuccuacgccugcaagcgccgcuccgucaaguccuucuucucccgccucaacuggcuccacaagcucgaguacaaguaccccgcccucaacgucaccaugcccaacaacgacaaguucgacaagcucuacaucuggggcguccaccaccccuccaccgacuccgaccagaccucccucuacguccaggccuccggccgcgucaccgucuccaccaagcgcucccagcagaccgucauccccaacaucggcucccgccccuggguccgcggcgucuccucccgcaucuccaucuacuggaccaucgucaagcccggcgacauccuccucaucaacuccaccggcaaccucaucgccccccgcggcuacuucaagauccgcuccggcaaguccuccaucaugcgcuccgacgcccccaucgacaacugcaacuccgagugcaucacccccaacggcuccauccccaacgacaagcccuuccagaacgucaaccgcaucaccuacggcgccugcccccgcuacgucaagcagaacacccucaagcucgccaccggcaugcgcaacguccccgagaagcagacccgcggcaucuucggcgccaucgccggcuucaucgagaacggcugggagggcauggucgacggcugguacggcuuccgccaccagaacuccgagggcaccggccaggccgccgaccucaaguccacccaggccgccaucaaccagaucaacggcaagcucaaccgccucaucgagaagaccaacgagaaguuccaccagaucgagaaggaguucuccgaggucgagggccgcauccaggaccucgagaaguacgucgaggacaccaagaucgaccucugguccuacaacgccgagcuccucgucgcccucgagaaccagcacaccaucgaccucaccgacuccgagaugaacaagcucuucgagcgcacccgcaagcagcuccgcgagaacgccgaggacaugggcaacggcugcuucaagaucuaccacaagugcgacaacgccugcaucggcuccauccgcaacggcaccuacgaccacgacgucuaccgcgacgaggcccucaacaaccgcuuccagaucaagggcgucgagcucaaguccggcuacaaggacuggauccucuggaucuccuucgccaucuccugcuuccuccucugcgucguccuccucggcuucaucaugugggccugccagaagggcaacauccgcugcaacaucugcaucuga

SEQ ID NO: 96864 - RNA, 1701 nt, Artificial Sequence
  derived and/or modified CDS sequence (opt2) from hemagglutinin__InfluenzaA__ABD94888
augaagaccaucaucgcccucuccuacauccucugccucgucuucgcccagaagcuccccggcaacgacaacuccaccgccacccucugccucggccaccacgccguccccaacggcacccucgucaagaccaucaccaacgaccagaucgaggucaccaacgccaccgagcucguccaguccuccuccaccggccgcaucugcgacuccccccaccgcauccucgacggcaagaacugcacccucaucgacgcccuccucggcgacccccacugcgacggcuucaagaacaaggagugggaccucuucgucgagcgcuccaccgccuacuccaacugcuaccccuacgacguccccgacuacgccucccuccgcucccucgucgccuccuccggcacccucgaguucaccaacgagggcuucaacuggaccggcgucgcccaggacggcaccuccuacgccugcaagcgcggcuccgucaaguccuucuucucccgccucaacuggcuccacaagcucgaguacaaguaccccgcccucaacgucaccaugcccaacaacgacaaguucgacaagcucuacaucuggggcguccaccaccccuccaccgacuccgaccagaccucccucuacguccaggccuccggccgcgucaccgucuccaccaagcgcucccagcagaccgucauccccaacaucggcucccgccccuggguccgcggcgucuccucccgcaucuccaucuacuggaccaucgucaagcccggcgacauccuccucaucaacuccaccggcaaccucaucgccccccgcggcuacuucaagauccgcuccggcaaguccuccaucaugcgcuccgacgcccccaucgacaacugcaacuccgagugcaucacccccaacggcuccauccccaacgacaagcccuuccagaacgucaaccgcaucaccuacggcgccugcccccgcuacgucaagcagaacacccucaagcucgccaccggcaugcgcaacguccccgagaagcagacccgcggcaucuucggcgccaucgccggcuucaucgagaacggcugggagggcauggucgacggcugguacggcuuccgccaccagaacuccgagggcaccggccaggccgccgaccucaaguccacccaggccgccaucaaccagaucaacggcaagcucaaccgccucaucgagaagaccaacgagaaguuccaccagaucgagaaggaguucuccgaggucgagggccgcauccaggaccucgagaaguacgucgaggacaccaagaucgaccucugguccuacaacgccgagcuccucgucgcccucgagaaccagcacaccaucgaccucaccgacuccgagaugaacaagcucuucgagcgcacccgcaagcagcuccgcgagaacgccgaggacaugggcaacggcugcuucaagaucuaccacaagugcgacaacgccugcaucggcuccauccgcaacggcaccuacgaccacgacgucuaccgcgacgaggcccucaacaaccgcuuccagaucaagggcgucgagcucaaguccggcuacaaggacuggauccucuggaucuccuucgccaucuccugcuuccuccucugcgucguccuccucggcuucaucaugugggccugccagaagggcaacauccgcugcaacaucugcaucuga

SEQ ID NO: 96865 - RNA, 1701 nt, Artificial Sequence; identical to SEQ ID NO: 96843
  derived and/or modified CDS sequence (opt2) from hemagglutinin__InfluenzaA__ABD94899

SEQ ID NO: 96866 - RNA, 1701 nt, Artificial Sequence
  derived and/or modified CDS sequence (opt2) from hemagglutinin__InfluenzaA__ABD94910
augaagaccaucaucgcccucuccuacauccucugccucgucuucgcccagaagcuccccggcaacgacaacuccaccgccacccucugccucggccaccacgccguccccaacggcacccucgucaagaccaucaccaacgaccagaucgaggucaccaacgccaccgagcucguccagaacuccuccaccggccgcaucugcgacuccccccaccgcauccucgacggcaagaacugcacccucaucgacgcccuccucggcgacccccacugcgacggcuuccagaacaaggagugggaccucuucgucgagcgcuccaaggccuacuccaacugcuaccccuacgacguccccgacuacgccucccuccgcucccucgucgccuccuccggcacccucgaguucaacaacgaguccuucaacuggaccggcgucgcccagaacggcaccuccuacgccugcaagcgccgcuccgucaaguccuucuucucccgccucaacuggcuccacaagcucgaguacaaguaccccgcccucaacgucaccaugcccaacaacgacaaguucgacaagcucuacaucuggggcguccaccaccccuccaccgacuccgaccagaccucccucuacguccaggccuccggccgcgucaccgucuccaccaagcgcucccagcagaccgucauccccaacaucggcucccgccccuggguccgcggcgucuccucccgcaucuccaucuacuggaccaucgucaagcccggcgacauccuccucaucaacuccaccggcaaccucaucgccccccgcggcuacuucaagauccgcuccggcaaguccuccaucaugcgcuccgacgcccccaucggcaacugcaacuccgagugcaucacccccaacggcuccauccccaacgacaagcccuuccagaacgucaaccgcaucaccuacggcgccugcccccgcuacgucaagcagaacacccucaagcucgccaccggcaugcgcaacguccccgagaagcagacccgcggcaucuucggcgccaucgccggcuucaucgagaacggcugggagggcauggucgacggcugguacggcuuccgccaccagaacuccgagggcaccggccaggccgccgaccucaaguccacccaggccgccaucaaccagaucaacggcaagcucaaccgccucaucgagaagaccaacgagaaguuccaccagaucgagaaggaguucuccgaggucgagggccgcauccaggaccucgagaaguacgucgaggacaccaagaucgaccucugguccuacaacgccgagcuccucgucgcccucgagaaccagcacaccaucgaccucaccgacuccgagaugaacaagcucuucgagcgcacccgcaagcagcuccgcgagaacgccgaggacaugggcaacggcugcuuccgcaucuaccacaagugcgacaacgccugcaucggcuccauccgcaacggcaccuacgaccacgacgucuaccgcgacgaggcccucaacaaccgcuuccagaucaagggcgucgagcucaaguccggcuacaaggacuggauccucuggaucuccuucgccaucuccugcuuccuccucugcgucguccuccucggcuucaucaugugggccugccagaagggcaacauccgcugcaacaucugcaucuga

SEQ ID NO: 96867 - RNA, 1701 nt, Artificial Sequence
  derived and/or modified CDS sequence (opt2) from hemagglutinin__InfluenzaA__ABD94921
augaagaccaucaucgcccucuccuacauccucugccucgucuucgcccagaagcuccccggcaacgacaacuccaccgccacccucugccucggccaccacgccguccccaacggcacccucgucaagaccaucaccaacgaccagaucgaggucaccaacgccaccgagcucguccaguccuccuccaccggccgcaucugcgacggcccccaccagauccucgacggcaagaacugcacccucaucgacgcccuccucggcgacccccacugcgacggcuuccagaacaaggagugggaccucuucgucgagcgcuccaaggccuacuccaacugcuaccccuacgacguccccgacuacgccucccuccgcucccucgucgccuccuccggcacccucgaguucaccaacgaguccuucaacuggaccggcgucgcccagaacggcaccuccuacgccugcaagcgcggcuccgucaaguccuucuucucccgccucaacuggcuccacaagcucgaguacaaguaccccgcccucaacgucaccaugcccaacaacgacaaguucgacaagcucuacaucuggggcguccaccaccccuccaccgacuccgaccagaccucccucuacguccaguccuccggccgcgucaccgucuccaccaagcgcucccagcagaccgucacccccaacaucggcucccgccccuggguccgcggcgucuccucccgcaucuccaucuacuggaccaucgucaagcccggcgacauccuccucaucaacuccaccggcaaccucaucgccccccgcggcuacuucaagauccgccgcggcaaguccuccaucaugcgcuccgacgcccccaucgacaacugcaacuccgagugcaucacccccaacggcuccauccccaacgacaagcccuuccagaacgucaaccgcaucaccuacggcgccugcccccgcuacgucaagcagaacacccucaagcucgccaccggcaugcgcaacguccccgagaagcagacccgcggcaucuucggcgccaucgccggcuucaucgagaacggcugggagggcauggucgacggcugguacggcuuccgccaccagaacuccgagggcaccggccaggccgccgaccucaaguccacccaggccgccaucaaccagaucaacggcaagcucaaccgccucaucgagaagaccaacgagaaguuccaccagaucgagaaggaguucuccgaggucgagggccgcauccaggaccucgagaaguacgucgaggacaccaagaucgaccucugguccuacaacgccgagcuccucgucgcccucgagaaccagcacaccaucgaccucaccgacuccgagaugaacaagcucuucgagcgcacccgcaagcagcuccgcgagaacgccgaggacaugggcaacggcugcuucaagaucuaccacaagugcgacaacgccugcaucggcuccauccgcaacggcaccuacgaccacgacgucuaccgcgacgaggcccucaacaaccgcuuccagaucaagggcgucgagcucaaguccggcuacaaggacuggauccucuggaucuccuucgccaucuccugcuuccuccucugcgucguccuccucggcuucaucaugugggccugccagaagggcaacauccgcugcaacaucugcaucuga

SEQ ID NO: 96868 - RNA, 1701 nt, Artificial Sequence; identical to SEQ ID NO: 96843
  derived and/or modified CDS sequence (opt2) from hemagglutinin__InfluenzaA__ABD94932

SEQ ID NO: 96869 - RNA, 1698 nt, Artificial Sequence
  derived and/or modified CDS sequence (opt2) from hemagglutinin__InfluenzaA__ABD94943
augaaggucaagcuccucauccuccucugcaccuucaccgccaccuacgccgacaccaucugcaucggcuaccacgccaacaacuccaccgacaccgucgacaccguccucgagaagaacgucaccgucacccacuccgucaaccuccucgaggacucccacaacggcaagcucugccuccucaagggcaucgccccccuccagcucggcaacugcuccgucgccggcuggauccucggcaaccccgagugcgagcuccucaucuccaaggaguccugguccuacaucgucgagacccccaaccccgagaacggcgccugcuaccccggcuacuucgccgacuacgaggagcuccgcgagcagcucuccuccgucuccuccuucgagcgcuucgagaucuuccccaaggaguccuccuggcccaaccacaccgucaccggcgucuccgccuccugcucccacaacggcaaguccuccuucuaccgcaaccuccucuggcucaccggcaagaacggccucuaccccaaccucuccaaguccuacgccaacaacaagaagaaggagguccucauccucuggggcguccaccacccccccaacaucggcgaccagcgcacccucuaccacaccgagaacgccuacgucuccgucgucuccucccacuacucccgccgcuucacccccgagaucaccaagcgccccaagguccgcgaccaggagggccgcaucaacuacuacuggacccuccucgagcccggcgacaccaucaucuucgaggccaacggcaaccucaucgcccccugguacgccuucgcccucucccgcggcuucggcuccggcaucaucaccuccaacgcccccauggacgagugcgacgccaagugccagaccccccagggcgccaucaacuccucccuccccuuccagaacguccaccccgucaccaucggcgagugccccaaguacguccgcuccgccaagcuccgcauggucaccggccuccgcaacauccccuccauccagucccgcggccucuucggcgccaucgccggcuucaucgagggcggcuggaccggcauggucgacggcugguacggcuaccaccaccagaacgagcagggcuccggcuacgccgccgaccagaaguccacccagaacgccaucaacggcaucaccaacaaggucaacuccgucaucgagaagaugaacacccaguucaccgccgucggcaaggaguucaacaagcucgagcgccgcauggagaaccucaacaagaaggucgacgacggcuuccucgacaucuggaccuacaacgccgagcuccucguccuccucgagaacgagcgcacccucgacuuccacgacuccaacgucaagaaccucuacgagaaggucaagucccagcucaagaacaacgccaaggagaucggcaacggcugcuucgaguucuaccacaagugcaacaacgagugcauggaguccgucaagaacggcaccuacgacuaccccaaguacuccgaggaguccaagcucaaccgcgagaagaucgacggcgucaagcucgacuccaugggcgucuaccagauccucgccaucuacuccaccgucgccuccucccucguccuccucgucucccucggcgccaucuccuucuggaugugcuccaacggcucccuccagugccgcaucugcaucuga

SEQ ID NO: 96870 - RNA, 1701 nt, Artificial Sequence; identical to SEQ ID NO: 96669
  derived and/or modified CDS sequence (opt2) from hemagglutinin__InfluenzaA__ABD94954

SEQ ID NO: 96871 - RNA, 1698 nt, Artificial Sequence; identical to SEQ ID NO: 96778
  derived and/or modified CDS sequence (opt2) from hemagglutinin__InfluenzaA__ABD94965

SEQ ID NO: 96872 - RNA, 1698 nt, Artificial Sequence; identical to SEQ ID NO: 96777
  derived and/or modified CDS sequence (opt2) from hemagglutinin__InfluenzaA__ABD94987

SEQ ID NO: 96873 - RNA, 1698 nt, Artificial Sequence; identical to SEQ ID NO: 96777
  derived and/or modified CDS sequence (opt2) from hemagglutinin__InfluenzaA__ABD94998

SEQ ID NO: 96874 - RNA, 1698 nt, Artificial Sequence; identical to SEQ ID NO: 96777
  derived and/or modified CDS sequence (opt2) from hemagglutinin__InfluenzaA__ABD95009

SEQ ID NO: 96875 - RNA, 1698 nt, Artificial Sequence; identical to SEQ ID NO: 96778
  derived and/or modified CDS sequence (opt2) from hemagglutinin__InfluenzaA__ABD95020

SEQ ID NO: 96876 - RNA, 1698 nt, Artificial Sequence
  derived and/or modified CDS sequence (opt2) from hemagglutinin__InfluenzaA__ABD95031
augaaggucaagcuccucguccuccucugcaccuucaccgccaccuacgccgacaccaucugcaucggcuaccacgccaacaacuccaccgacaccgucgacaccguccucgagaagaacgucaccgucacccacuccgucaaccuccucgaggacucccacaacggcaagcucugccuccucaagggcaucgccccccuccagcucggcaacugcuccgucgccggcuggauccucggcaaccccgagugcgagcuccucaucuccaaggaguccugguccuacaucgucgagacccccaaccccgagaacggcaccugcuaccccggcuacuucaccgacuacgaggagcuccgcgagcagcucuccuccgucuccuccuucgagcgcuucgagaucuuccccaaggaguccuccuggcccaaccacaccgucaccggcgucuccgccuccugcucccacaacggcaaguccuccuucuaccgcaaccuccucuggcucaccggcaagaacggccucuaccccaaccuccgccgcuccuacgccaacaacaaggagaaggagguccucguccucuggggcguccaccacccccccaacaucggcgaccagaaggcccucuaccacaccgagaacgccuacgucuccgucgucuccucccacuacucccgccgcuucacccccgagaucgccaagcgccccaagguccgcggccaggagggccgcaucaacuacuacuggacccuccucgagcccggcgacaccaucaucuucgaggccaacggcaaccucaucgccccccgcuacgccuucgcccucucccgcggcuucggcuccggcaucaucaccuccaacgcccccauggacgagugcgacgccaagugccagaccccccagggcgccaucaacuccucccuccccuuccagaacguccaccccgucaccaucggcgagugccccaaguacguccgcuccgccaagcuccgcauggucaccggccuccgcaacauccccuccauccagucccgcggccucuucggcgccaucgccggcuucaucgagggcggcuggaccggcauggucgacggcugguacggcuaccaccaccagaacgagcagggcuccggcuacgccgccgaccagaaguccacccagaacgccaucaacggcaucaccaacaaggucaacuccaucaucgagaagaugaacacccaguucaccgccgucggcaaggaguucaacaagcucgagcgccgcauggagaaccucaacaagaaggucgacgacggcuuccucgacaucuggaccuacaacgccgagcuccucguccuccucgagaacgagcgcacccucgacuuccacgacuccaacgucaagaaccucuacgagaaggucaagucccagcucaagaacaacgccaaggagaucggcaacggcugcuucgaguucuaccacaagugcaacaacgagugcauggaguccgucaagaacggcaccuacgacuaccccaaguacuccgaggaguccaagcucaaccgcgagaagaucgacggcgucaagcucgaguccaugggcgucuaccagauccucgccaucuacuccaccgucgccuccucccucguccuccucgucucccucggcgccaucuccuucuggaugugcuccaacggcucccuccagugccgcaucugcaucuga

SEQ ID NO: 96877 - RNA, 1698 nt, Artificial Sequence
  derived and/or modified CDS sequence (opt2) from hemagglutinin__InfluenzaA__ABD95042
augaaggccaagcuccucguccuccucugcaccuucaccgccaccuacgccgacaccaucugcaucggcuaccacgccaacaacuccaccgacaccgucgacaccguccucgagaagaacgucaccgucacccacuccgucaaccuccucgaggacucccacaacggcaagcucugccuccucaagggcaucgccccccuccagcucggcaacugcuccgucgccggcuggauccucggcaaccccgagugcgagcuccucaucuccaaggaguccugguccuacaucgucgagacccccaaccccgagaacggcaccugcuaccccggcuacuucgccgacuacgaggagcuccgcgagcagcucuccuccgucuccuccuucgagcgcuucgagaucuuccccaagggcuccuccuggcccaaccacaccgucaccggcgucuccgccuccugcucccacaacggcaaguccuccuucuaccgcaaccuccucuggcucaccggcaagaacggccucuaccccaaccucuccauguccuacgucaacaacaagggcaaggagguccucguccucuggggcguccaccacccccccaacaucggcgaccagcgcgcccucuaccacaccgagaacgccuacgucuccgucgucuccucccacuacucccgccgcuucacccccgagaucgccaagcgccccaagguccgcgaccaggagggccgcaucaacuacuacuggacccuccucgagcccggcgacaccaucaucuucgaggccaacggcaaccucaucgcccccugguacgccuucgcccucucccgcggcuucggcuccggcaucaucaccuccaacgcccccaugggcgagugcgacgccaagugccagaccccccagggcgccaucaacuccucccuccccuuccagaacguccaccccgucaccaucggcgagugccccaaguacguccgcuccgccaagcuccgcauggucaccggccuccgcaacauccccuccauccagucccgcggccucuucggcgccaucgccggcuucaucgagggcggcuggaccggcauggucgacggcugguacggcuaccaccaccagaacgagcagggcuccggcuacgccgccgaccagaaguccacccagaacgccaucaacggcaucaccaacaaggucaacuccgucaucgagaagaugaacacccaguucaccgccgucggcaaggaguucaacaagcucgagcgccgcauggagaaccucaacaagaaggucgacgacggcuuccucgacaucuggaccuacaacgccgagcuccucguccuccucgagaacgagcgcacccucgacuuccacgacuccaacgucaagaaccucuacgagaaggucaagucccagcucaagaacaacgccaaggagaucggcaacggcugcuucgaguucuaccacaagugcaacaacgagugcauggaguccgucaagaacggcaccuacgacuaccccaaguacuccgaggaguccaagcucaaccgcgagaagaucgacggcgucaagcucgaguccaugggcgucuaccagauccucgccaucuacuccaccgucgccuccucccucguccuccucgucucccucggcgccaucuccuucuggaugugcuccaacggcucccuccagugccgcaucugcaucuga

SEQ ID NO: 96878 - RNA, 1698 nt, Artificial Sequence; identical to SEQ ID NO: 96877
  derived and/or modified CDS sequence (opt2) from hemagglutinin__InfluenzaA__ABD95053

SEQ ID NO: 96879 - RNA, 1698 nt, Artificial Sequence; identical to SEQ ID NO: 96836
  derived and/or modified CDS sequence (opt2) from hemagglutinin__InfluenzaA__ABD95064

SEQ ID NO: 96880 - RNA, 1698 nt, Artificial Sequence
  derived and/or modified CDS sequence (opt2) from hemagglutinin__InfluenzaA__ABD95075
augaaggccaagcuccucguccuccucugcaccuucaccgccaccuacgccgacaccaucugcaucggcuaccacgccaacaacuccaccgacaccgucgacaccguccucgagaagaacgucaccgucacccacuccgucaaccuccucgaggacucccacaacggcaagcucugccuccucaagggcaucgccccccuccagcucggcaacugcuccgucgccggcuggauccucggcaaccccgagugcgagcuccucaucuccaaggaguccugguccuacaucgucgagacccccaaccccgagaacggcaccugcuaccccggcuacuucgccgacuacgaggagcuccgcgagcagcucuccuccgucuccuccuucgagcgcuucgagaucuuccccaagggcuccuccuggcccaaccacaccgucaccggcgucuccgccuccugcucccacaacggcaaguccuccuucuaccgcaaccuccucuggcucaccggcaagaacggccucuaccccaaccucuccauguccuacgucaacaacaaggagaaggagguccucguccucuggggcguccaccacccccccaacaucggcgaccagcgcgcccucuaccacaccgagaacgccuacgucuccgucgucuccucccacuacucccgccgcuucacccccgagaucgccaagcgccccaagguccgcgaccaggagggccgcaucaacuacuacuggacccuccucgagcccggcgacaccaucaucuucgaggccaacggcaaccucaucgcccccugguacgccuucgcccucuccaagggcuucggcuccggcaucaucaccuccaacgcccccaugggcgagugcgacgccaagugccagaccccccagggcgccaucaacuccucccuccccuuccagaacguccaccccgucaccaucggcgagugccccaaguacguccgcuccgccaagcuccgcauggucaccggccuccgcaacauccccuccauccagucccgcggccucuucggcgccaucgccggcuucaucgagggcggcuggaccggcauggucgacggcugguacggcuaccaccaccagaacgagcagggcuccggcuacgccgccgaccagaaguccacccagaacgccaucaacggcaucaccaacaaggucaacuccgucaucgagaagaugaacacccaguucaccgccgucggcaaggaguucaacaagcucgagcgccgcauggagaaccucaacaagaaggucgacgacggcuuccucgacaucuggaccuacaacgccgagcuccucguccuccucgagaacgagcgcacccucgacuuccacgacuccaacgucaagaaccucuacgagaaggucaagucccagcucaagaacaacgccaaggagaucggcaacggcugcuucgaguucuaccacaagugcaacaacgagugcauggaguccgucaagaacggcaccuacgacuaccccaaguacuccgaggaguccaagcucaaccgcgagaagaucgacggcgucaagcucgaguccaugggcgucuaccagauccucgccaucuacuccaccgucgccuccucccucguccuccucgucucccucggcgccaucuccuucuggaugugcuccaacggcucccuccagugccgcaucugcaucuga

SEQ ID NO: 96881 - RNA, 1698 nt, Artificial Sequence; identical to SEQ ID NO: 96877
  derived and/or modified CDS sequence (opt2) from hemagglutinin__InfluenzaA__ABD95086

SEQ ID NO: 96882 - RNA, 1698 nt, Artificial Sequence; identical to SEQ ID NO: 96836
  derived and/or modified CDS sequence (opt2) from hemagglutinin__InfluenzaA__ABD95097

SEQ ID NO: 96883 - RNA, 1698 nt, Artificial Sequence
  derived and/or modified CDS sequence (opt2) from hemagglutinin__InfluenzaA__ABD95119
augaaggccaagcuccucauccuccucugcaccuucaccgccaccuacgccgacaccaucugcaucggcuaccacgccaacaacuccaccgacaccgucgacaccguccucgagaagaacgucaccgucacccacuccgucaaccuccucgaggacucccacaacggcaagcucugccuccucaagggcaucgccccccuccagcucggcaacugcuccgucgccggcuggauccucggcaaccccgagugcgagcuccucaucuccaaggaguccugguccuacaucgucgagacccccaaccccgagaacggcaccugcuaccccggcuacuucgccgacuacgaggagcuccgcgagcagcucuccuccgucuccuccuucgagcgcuucgagaucuuccccaagggcuccuccuggcccaaccacaccgucaccggcgucuccgccuccugcucccacaacggcaaguccuccuucuaccgcaaccuccucuggcucaccggcaagaacggccucuaccccaaccucuccauguccuacgucaacaacaaggagaaggagguccucguccucuggggcguccaccacccccccaacaucggcgaccagcgcgcccucuaccacaccgagaacgccuacgucuccgucgucuccucccacuacucccgccgcuucacccccgagaucgccaagcgccccaagguccgcgaccaggagggccgcaucaacuacuacuggacccuccucgagcccggcgacaccaucaucuucgaggccaacggcaaccucaucgcccccugguacgccuucgcccucucccgcggcuucggcuccggcaucaucaccuccaacgcccccaugggcgagugcgacgccaagugccagaccccccagggcgccaucaacuccucccuccccuuccagaacguccaccccgucaccaucggcgagugccccaaguacguccgcuccgccaagcuccgcauggucaccggccuccgcaacauccccuccauccagucccgcggccucuucggcgccaucgccggcuucaucgagggcggcuggaccggcauggucgacggcugguacggcuaccaccaccagaacgagcagggcuccggcuacgccgccgaccagaaguccacccagaacgccaucaacggcaucaccaacaaggucaacuccgucaucgagaagaugaacacccaguucaccgccgucggcaaggaguucaacaagcucgagcgccgcauggagaaccucaacaagaaggucgacgacggcuuccucgacaucuggaccuacaacgccgagcuccucguccuccucgagaacgagcgcacccucgacuuccacgacuccaacgucaagaaccucuacgagaaggucaagucccagcucaagaacaacgccaaggagaucggcaacggcugcuucgaguucuaccacaagugcaacaacgagugcauggaguccgucaagaacggcaccuacgacuaccccaaguacuccgaggaguccaagcucaaccgcgagaagaucgacggcgucaagcucgaguccaugggcgucuaccagauccucgccaucuacuccaccgucgccuccucccucguccuccucgucucccucggcgccaucuccuucuggaugugcuccaacggcucccuccagugccgcaucugcaucuga

SEQ ID NO: 96884 - RNA, 1698 nt, Artificial Sequence
  derived and/or modified CDS sequence (opt2) from hemagglutinin__InfluenzaA__ABD95130
augaaggccaagcuccucguccuccucugcaccuucaccgccaccuacgccgacaccaucugcaucggcuaccacgccaacaacuccaccgacaccgucgacaccguccucgagaagaacgucaccgucacccacuccgucaaccuccucgaggacucccacaacggcaagcucugccuccucaagggcaucgccccccuccagcucggcaacugcuccgucgccggcuggauccucggcaaccccgagugcgagcuccucaucuccaaggaguccugguccuacaucgucgagacccccaaccccgagaacggcaccugcuaccccggcuacuucgccgacuacgaggagcuccgcgagcagcucuccuccgucuccuccuucgagcgcuucgagaucuuccccaagggcuccuccuggcccaaccacaccgucaccggcgucuccgccuccugcucccacaacggcaaguccuccuucuaccgcaaccuccucuggcucaccggcaagaacggcuccuaccccaaccucuccauguccuacgucaacaacaaggagaaggagguccucguccucuggggcguccaccacccccccaacaucggcgaccagcgcgcccucuaccacaccgagaacgccuacgucuccgucgucuccucccacuacucccgccgcuucacccccgagaucgccaagcgccccaagguccgcgaccaggagggccgcaucaacuacuacuggacccuccucgagcccggcgacaccaucaucuucgaggccaacggcaaccucaucgcccccugguacgccuucgcccucucccgcggcuucggcuccggcaucaucaccuccaacgcccccaugggcgagugcgacgccaagugccagaccccccagggcgccaucaacuccucccuccccuuccagaacguccaccccgucaccaucggcgagugccccaaguacguccgcuccgccaagcuccgcauggucaccggccuccgcaacauccccuccauccagucccgcggccucuucggcgccaucgccggcuucaucgagggcggcuggaccggcauggucgacggcugguacggcuaccaccaccagaacgagcagggcuccggcuacgccgccgaccagaaguccacccagaacgccaucaacggcaucaccaacaaggucaacuccgucaucgagaagaugaacacccaguucaccgccgucggcaaggaguucaacaagcucgagcgccgcauggagaaccucaacaagaaggucgacgacggcuuccucgacaucuggaccuacaacgccgagcuccucguccuccucgagaacgagcgcacccucgacuuccacgacuccaacgucaagaaccucuacgagaaggucaagucccagcucaagaacaacgccaaggagaucggcaacggcugcuucgaguucuaccacaagugcaacaacgagugcauggaguccgucaagaacggcaccuacgacuaccccaaguacuccgaggaguccaagcucaaccgcgagaagaucgacggcgucaagcucgaguccaugggcgucuaccagauccucgccaucuacuccaccgucgccuccucccucguccuccucgucucccucggcgccaucuccuucuggaugugcuccaacggcucccuccagugccgcaucugcaucuga

SEQ ID NO: 96885 - RNA, 1698 nt, Artificial Sequence; identical to SEQ ID NO: 96836
  derived and/or modified CDS sequence (opt2) from hemagglutinin__InfluenzaA__ABD95141

SEQ ID NO: 96886 - RNA, 1698 nt, Artificial Sequence; identical to SEQ ID NO: 96836
  derived and/or modified CDS sequence (opt2) from hemagglutinin__InfluenzaA__ABD95152

SEQ ID NO: 96887 - RNA, 1698 nt, Artificial Sequence; identical to SEQ ID NO: 96883
  derived and/or modified CDS sequence (opt2) from hemagglutinin__InfluenzaA__ABD95163

SEQ ID NO: 96888 - RNA, 1698 nt, Artificial Sequence; identical to SEQ ID NO: 96877
  derived and/or modified CDS sequence (opt2) from hemagglutinin__InfluenzaA__ABD95174

SEQ ID NO: 96889 - RNA, 1698 nt, Artificial Sequence
  derived and/or modified CDS sequence (opt2) from hemagglutinin__InfluenzaA__ABD95185
augaaggccaagcuccucguccuccucugcaccuucaccgccaccuacgccgacaccaucugcaucggcuaccacgccaacaacuccaccgacaccgucgacaccguccucgagaagaacgucaccgucacccacuccgucaaccuccucgaggacucccacaacggcaagcucugccuccucaagggcaucgccccccuccagcucggcaacugcuccgucgccggcuggauccucggcaaccccgagugcgagcuccucaucuccaaggaguccugguccuacaucgucgagacccccaaccccgagaacggcaccugcuaccccggcuacuucgccgacuacgaggagcuccgcgagcagcucuccuccgucuccuccuucgagcgcuucgagaucuuccccaagggcuccuccuggcccaaccacaccgucaccggcgucuccgccuccugcucccacaacggcgaguccuccuucuaccgcaaccuccucuggcucaccggcaagaacggccucuaccccaaccucuccauguccuacgucaacaacaaggagaaggagguccucguccucuggggcguccaccacccccccaacaucggcgaccagcgcgcccucuaccacaccgagaacgccuacgucuccgucgucuccucccacuacucccgccgcuucacccccgagaucgccaagcgccccaagguccgcgaccaggagggccgcaucaacuacuacuggacccuccucgagcccggcgacaccaucaucuucgaggccaacggcaaccucaucgcccccugguacgccuucgcccucucccgcggcuucggcuccggcaucaucaccuccaacgcccccaugggcgagugcgacgccaagugccagaccccccagggcgccaucaacuccucccuccccuuccagaacguccaccccgucaccaucggcgagugccccaaguacguccgcuccgccaagcuccgcauggucaccggccuccgcaacauccccuccauccagucccgcggccucuucggcgccaucgccggcuucaucgagggcggcuggaccggcauggucgacggcugguacggcuaccaccaccagaacgagcagggcuccggcuacgccgccgaccagaaguccacccagaacgccaucaacggcaucaccaacaaggucaacuccgucaucgagaagaugaacacccaguucaccgccgucggcaaggaguucaacaagcucgagcgccgcauggagaaccucaacaagaaggucgacgacggcuuccucgacaucuggaccuacaacgccgagcuccucguccuccucgagaacgagcgcacccucgacuuccacgacuccaacgucaagaaccucuacgagaaggucaagucccagcucaagaacaacgccaaggagaucggcaacggcugcuucgaguucuaccacaagugcaacaacgagugcauggaguccgucaagaacggcaccuacgacuaccccaaguacuccgaggaguccaagcucaaccgcgagaagaucgacggcgucaagcucgaguccaugggcgucuaccagauccucgccaucuacuccaccgucgccuccucccucguccuccucgucucccucggcgccaucuccuucuggaugugcuccaacggcucccuccagugccgcaucugcaucuga

SEQ ID NO: 96890 - RNA, 1698 nt, Artificial Sequence; identical to SEQ ID NO: 96877
  derived and/or modified CDS sequence (opt2) from hemagglutinin__InfluenzaA__ABD95196

SEQ ID NO: 96891 - RNA, 1698 nt, Artificial Sequence; identical to SEQ ID NO: 96335
  derived and/or modified CDS sequence (opt2) from hemagglutinin__InfluenzaA__ABD95207

SEQ ID NO: 96892 - RNA, 1698 nt, Artificial Sequence; identical to SEQ ID NO: 96836
  derived and/or modified CDS sequence (opt2) from hemagglutinin__InfluenzaA__ABD95218

SEQ ID NO: 96893 - RNA, 1698 nt, Artificial Sequence; identical to SEQ ID NO: 96883
  derived and/or modified CDS sequence (opt2) from hemagglutinin__InfluenzaA__ABD95229

SEQ ID NO: 96894 - RNA, 1698 nt, Artificial Sequence; identical to SEQ ID NO: 96836
  derived and/or modified CDS sequence (opt2) from hemagglutinin__InfluenzaA__ABD95240

SEQ ID NO: 96895 - RNA, 1698 nt, Artificial Sequence; identical to SEQ ID NO: 96877
  derived and/or modified CDS sequence (opt2) from hemagglutinin__InfluenzaA__ABD95251

SEQ ID NO: 96896 - RNA, 1698 nt, Artificial Sequence; identical to SEQ ID NO: 96335
  derived and/or modified CDS sequence (opt2) from hemagglutinin__InfluenzaA__ABD95262

SEQ ID NO: 96897 - RNA, 1698 nt, Artificial Sequence; identical to SEQ ID NO: 96836
  derived and/or modified CDS sequence (opt2) from hemagglutinin__InfluenzaA__ABD95273

SEQ ID NO: 96898 - RNA, 1698 nt, Artificial Sequence; identical to SEQ ID NO: 96332
  derived and/or modified CDS sequence (opt2) from hemagglutinin__InfluenzaA__ABD95284

SEQ ID NO: 96899 - RNA, 1698 nt, Artificial Sequence; identical to SEQ ID NO: 96836
  derived and/or modified CDS sequence (opt2) from hemagglutinin__InfluenzaA__ABD95295

SEQ ID NO: 96900 - RNA, 1698 nt, Artificial Sequence
  derived and/or modified CDS sequence (opt2) from hemagglutinin__InfluenzaA__ABD95306
augaaggccaagcuccucguccuccucugcaccuucaccgccaccuacgccgacaccaucugcaucggcuaccacgccaacaacuccaccgacaccgucgacaccguccucgagaagaacgucaccgucacccacuccgucaaccuccucgaggacucccacaacggcaagcucugccuccucaagggcaucgccccccuccagcucggcaacugcuccgucgccggcuggauccucggcaaccccgagugcgagcuccucaucuccaaggaguccugguccuacaucgucgagacccccaaccccgagaacggcaccugcuaccccggcuacuucgccgacuacgaggagcuccgcgagcagcucuccuccgucuccuccuucgagcgcuucgagaucuuccccaagggcuccuccuggcccaaccacaccgucaccggcgucuccgccuccugcucccacaacggcaaguccuccuucuaccgcaaccuccucuggcucaccggcaagaacggccucuaccccaaccucuccauguccuacgucaacaacaaggagaaggagauccucguccucuggggcguccaccacccccccaacaucggcgaccagcgcgcccucuaccacaccgagaacgccuacgucuccgucgucuccucccacuacucccgccgcuucacccccgagaucgccaagcgccccaagguccgcgaccaggagggccgcaucaacuacuacuggacccuccucgagcccggcgacaccaucaucuucgaggccaacggcaaccucaucgcccccugguacgccuucgcccucucccgcggcuucggcuccggcaucaucaccuccaacgcccccaugggcgagugcgacgccaagugccagaccccccagggcgccaucaacuccucccuccccuuccagaacguccaccccgucaccaucggcgagugccccaaguacguccgcuccgccaagcuccgcauggucaccggccuccgcaacauccccuccauccagucccgcggccucuucggcgccaucgccggcuucaucgagggcggcuggaccggcauggucgacggcugguacggcuaccaccaccagaacgagcagggcuccggcuacgccgccgaccagaaguccacccagaacgccaucaacggcaucaccaacaaggucaacuccgucaucgagaagaugaacacccaguucaccgccgucggcaaggaguucaacaagcucgagcgccgcauggagaaccucaacaagaaggucgacgacggcuuccucgacaucuggaccuacaacgccgagcuccucguccuccucgagaacgagcgcacccucgacuuccacgacuccaacgucaagaaccucuacgagaaggucaagucccagcucaagaacaacgccaaggagaucggcaacggcugcuucgaguucuaccacaagugcaacaacgagugcauggaguccgucaagaacggcaccuacgacuaccccaaguacuccgaggaguccaagcucaaccgcgagaagaucgacggcgucaagcucgaguccaugggcgucuaccagauccucgccaucuacuccaccgucgccuccucccucguccuccucgucucccucggcgccaucuccuucuggaugugcuccaacggcucccuccagugccgcaucugcaucuga

SEQ ID NO: 96901 - RNA, 1698 nt, Artificial Sequence; identical to SEQ ID NO: 96877
  derived and/or modified CDS sequence (opt2) from hemagglutinin__InfluenzaA__ABD95328

SEQ ID NO: 96902 - RNA, 1701 nt, Artificial Sequence
  derived and/or modified CDS sequence (opt2) from hemagglutinin__InfluenzaA__ABD95339
augaaggccaagcuccucguccuccucugcgcccucuccgccaccgacgccgacaccaucugcaucggcuaccacgccaacaacuccaccgacaccgucgacaccguccucgagaagaacgucaccgucacccacuccgucaaccuccucgaggacucccacaacggcaagcucugccgccucaagggcaucgccccccuccagcucggcaagugcuccaucgccggcuggauccucggcaaccccgagugcgagucccucuucuccaagaaguccugguccuacaucgccgagacccccaacuccgagaacggcaccugcuaccccggcuacuucgccgacuacgaggagcuccgcgagcagcucuccuccgucuccuccuucgagcgcuucgagaucuuccccaaggaguccuccuggcccaagcacuccgucacccgcggcgucaccgccuccugcucccacaagggcaaguccuccuucuaccgcaaccuccucuggcucaccgagaagaacggcuccuaccccaaccucuccaaguccuacgucaacgacaaggagaaggagguccucguccucuggggcguccaccaccccuccaacaucgaggaccagaagaccaucuaccgcaaggagaacgccuacgucuccgucgucuccucccacuacaaccgccgcuucacccccgagaucgccaagcgccccaagguccgcgaccaggagggccgcaucaacuacuacuggacccuccucgagcccggcgacaccaucaucuucgaggccaacggcaaccucaucgcccccugguacgccuucgcccucucccgcggcuucggcuccggcaucaucaccuccaacgucuccauggacgagugcgacgccaagugccagaccccccagggcgccaucaacuccucccuccccuuccagaacguccaccccgucaccaucggcgagugccccaaguacguccgcuccaccaagcuccgcauggucaccggccuccgcaacauccccuccauccagucccgcggccucuucggcgccaucgccggcuucaucgagggcggcuggaccggcaugaucgacggcugguacggcuaccaccaccagaacgagcagggcuccggcuacgccgccgaccagaaguccacccagaacgccaucaacggcaucaccaacaaggucaacuccgucaucgagaagaugaacacccaguucaccgccgucggcaaggaguucaacaagcucgagaagcgcauggagaaccucaacaagaaggucgacgacggcuuccucgacaucuggaccuacaacgccgagcuccucguccuccucgagaacgagcgcacccucgacuuccacgacuccaacgucaagaaccucuacgagaaggucaagucccagcucaagaacaacgccaaggagaucggcaacggcugcuucgaguucuaccacaagugcaacaacgagugcauggaguccgucaagaacggcaccuacgacuaccccaaguacuccgaggaguccaagcucaaccgcgagaagaucgacggcgucaagcucgaguccaugggcgucuaccagauccucgccaucuacuccaccgucgccuccucccucguccuccucgucucccucggcgccaucuccuucuggaugugcuccaacggcucccuccagugccgcaucugcaucuga

SEQ ID NO: 96903 - RNA, 1698 nt, Artificial Sequence; identical to SEQ ID NO: 96778
  derived and/or modified CDS sequence (opt2) from hemagglutinin__InfluenzaA__ABE11657

SEQ ID NO: 96904 - RNA, 1698 nt, Artificial Sequence
  derived and/or modified CDS sequence (opt2) from hemagglutinin__InfluenzaA__ABE11668
augaaggccaagcuccucguccuccucugcaccuucaccgccaccuacgccgacaccaucugcaucggcuaccacgccaacaacuccaccgacaccgucgacaccguccucgagaagaacgucaccgucacccacuccgucaaccuccucgaggacucccacaacggcaagcucugccuccucaagggcaucgccccccuccagcucggcaacugcuccgucgccggcuggauccucggcaaccccgagugcgagcuccucaucuccaaggaguccugguccuacaucgucgagacccccaaccccgagaacggcaccugcuaccccggcuacuucgccgacuacgaggagcuccgcgagcagcucuccuccgucuccuccuucgagcgcuucgagaucuuccccaaggaguccuccuggcccaaccacaccgucaccggcgucuccgccuccugcucccacaacggcaaguccuccuucuaccgcaaccuccucuggcucaccggcaagaacggccucuaccccaaccucuccauguccuacgucaacaacaaggagaaggagguccucguccucuggggcguccaccacccccccaacaucggcgaccagcgcgcccucuaccacaccgagaacgccuacgucuccgucgucuccucccacuacucccgccgcuucacccccgagaucgccaagcgccccaagguccgcgaccaggagggccgcaucaacuacuacuggacccuccucgagcccggcgacaccaucaucuucgaggccaacggcaaccucaucgcccccugguacgccuucgcccucucccgcggcuucggcuccggcaucaucaccuccaacgcccccauggacgagugcgacgccaagugccagaccccccagggcgccaucaacuccucccuccccuuccagaacguccaccccgucaccaucggcgagugccccaaguacguccgcuccgccaagcuccgcauggucaccggccuccgcaacauccccuccauccagucccgcggccucuucggcgccaucgccggcuucaucgagggcggcuggaccggcauggucgacggcugguacggcuaccaccaccagaacgagcagggcuccggcuacgccgccgaccagaaguccacccagaacgccaucaacggcaucaccaacaaggucaacuccgucaucgagaagaugaacacccaguucaccgccgucggcaaggaguucaacaagcucgagcgccgcauggagaaccucaacaagaaggucgacgacggcuuccucgacaucuggaccuacaacgccgagcuccucguccuccucgagaacgagcgcacccucgacuuccacgacuccaacgucaagaaccucuacgagaaggucaagucccagcucaagaacaacgccaaggagaucggcaacggcugcuucgaguucuaccacaagugcaacaacgagugcauggaguccgucaagaacggcaccuacgacuaccccaaguacuccgaggaguccaagcucaaccgcgagaagaucgacggcgucaagcucgaguccaugggcgucuaccagauccucgccaucuacuccaccgucgccuccucccucguccuccucgucucccucggcgccaucuccuucuggaugugcuccaacggcucccuccagugccgcaucugcaucuga

SEQ ID NO: 96905 - RNA, 1698 nt, Artificial Sequence
  derived and/or modified CDS sequence (opt2) from hemagglutinin__InfluenzaA__ABE11679
augaaggucaagcuccucguccuccucugcaccuucaccgccaccuacgccgacaccaucugcaucggcuaccacgccaacaacuccaccgacaccgucgacaccguccucgagaagaacgucaccgucacccacuccgucaaccuccucgaggacucccacaacggcaagcucugccuccucaagggcaucgccccccuccagcucggcaacugcuccgucgccggcuggauccucggcaaccccgagugcgagcuccucaucuccaaggaguccugguccuacaucgucgagacccccaaccccgagaacggcaccugcuaccccggcuacuucgccgacuacgaggagcuccgcgagcagcucuccuccgucuccuccuucgagcgcuucgagaucuuccccaaggaguccuccuggcccaaccacaccgucaccggcgucuccgccuccugcucccacaacggcaaguccuccuucuaccgcaaccuccucuggcucaccggccgcaacggccucuaccccaaccucuccaaguccuacgccaacaacaaggagaaggagguccucguccucuggggcguccaccacccccccaacaucggcgaccagcgcgcccucuaccacaccgagaacgccuacgucuccgucgucuccucccacuacucccgccgcuucacccccgagaucgccaagcgccccaagguccgcgaccaggagggccgcaucaacuacuacuggacccuccucgagcccggcgacaccaucaucuucgaggccaacggcaaccucaucgccccccgcuacgccuucgcccucucccgcggcuucggcuccggcaucaucaccuccaacgcccccauggacgagugcgacgccaagugccagaccccccagggcgccaucaacuccucccuccccuuccagaacguccaccccgucaccaucggcgagugccccaaguacguccgcuccgccaagcuccgcauggucaccggccuccgcaacauccccuccauccagucccgcggccucuucggcgccaucgccggcuucaucgagggcggcuggaccggcauggucgacggcugguacggcuaccaccaccagaacgagcagggcuccggcuacgccgccgaccagaaguccacccagaacgccaucaacggcaucaccaacaaggucaacuccgucaucgagaagaugaacacccaguucaccgccgucggcaaggaguucaacaagcucgagcgccgcauggagaaccucaacaagaaggucgacgacggcuuccucgacaucuggaccuacaacgccgagcuccucguccuccucgagaacgagcgcacccucgacuuccacgacuccaacgucaagaaccucuacgagaaggucaagucccagcucaagaacaacgccaaggagaucggcaacggcugcuucgaguucuaccacaagugcaacgacgagugcauggaguccgucaagaacggcaccuacgacuaccccaaguacuccgaggaguccaagcucaaccgcgagaagaucgacggcgucaagcucgaguccaugggcgucuaccagauccucgccaucuacuccaccgucgccuccucccucguccuccucgucucccucggcgccaucuccuucuggaugugcuccaacggcucccuccagugccgcaucugcaucuga

SEQ ID NO: 96906 - RNA, 1698 nt, Artificial Sequence
  derived and/or modified CDS sequence (opt2) from hemagglutinin__InfluenzaA__ABE11690
augaaggccaagcuccucguccuccucugcaccuucaccgccaccuacgccgacaccaucugcaucggcuaccacgccaacaacuccaccgacaccgucgacaccguccucgagaagaacgucaccgucacccacuccgucaaccuccucgaggacucccacaacggcaagcucugccuccucaagggcaucgccccccuccagcucggcaacugcuccgucgccggcuggauccucggcaaccccgagugcgagcuccucaucuccaaggaguccugguccuacaucgucgagacccccaaccccgagaacggcaccugcuaccccggcuacuucgccgacuacgaggagcuccgcgagcagcucuccuccgucuccuccuucgagcgcuucgagaucuuccccaagggcuccuccuggcccaaccacaccgucaccggcgucuccgccuccugcucccacaacggcaaguccuccuucuaccgcaaccuccucuggcucaccggcaagaacggccucuaccccaaccucuccauguccuacgucaacaacaaggagaaggagguccucguccucuggggcguccaccacccccccaacaucggcaaccagcgcgcccucuaccacaccgagaacgccuacgucuccgucgucuccucccacuacucccgccgcuucacccccgagaucgccaagcgccccaagguccgcgaccaggagggccgcaucaacuacuacuggacccuccucgagcccggcgacaccaucaucuucgaggccaacggcaaccucaucgcccccugguacgccuucgcccucucccgcggcuucggcuccggcaucaucaccuccaacgcccccaugggcgagugcgacgccaagugccagaccccccagggcgccaucaacuccucccuccccuuccagaacguccaccccgucaccaucggcgagugccccaaguacguccgcuccgccaagcuccgcauggucaccggccuccgcaacauccccuccauccagucccgcggccucuucggcgccaucgccggcuucaucgagggcggcuggaccggcauggucgacggcugguacggcuaccaccaccagaacgagcagggcuccggcuacgccgccgaccagaaguccacccagaacgccaucaacggcaucaccaacaaggucaacuccgucaucgagaagaugaacacccaguucaccgccgucggcaaggaguucaacaagcucgagcgccgcauggagaaccucaacaagaaggucgacgacggcuuccucgacaucuggaccuacaacgccgagcuccucguccuccucgagaacgagcgcacccucgacuuccacgacuccaacgucaagaaccucuacgagaaggucaagucccagcucaagaacaacgccaaggagaucggcaacggcugcuucgaguucuaccacaagugcaacaacgagugcauggaguccgucaagaacggcaccuacgacuaccccaaguacuccgaggaguccaagcucaaccgcgagaagaucgacggcgucaagcucgaguccaugggcgucuaccagauccucgccaucuacuccaccgucgccuccucccucguccuccucgucucccucggcgccaucuccuucuggaugugcuccaacggcucccuccagugccgcaucugcaucuga

SEQ ID NO: 96907 - RNA, 1698 nt, Artificial Sequence
  derived and/or modified CDS sequence (opt2) from hemagglutinin__InfluenzaA__ABE11701
augaaggccaagcuccucguccuccucugcaccuucaccgccaccuacgccgacaccaucugcaucggcuaccacgccaacaacuccaccgacaccgucgacaccguccucgagaagaacgucaccgucacccacuccgucaaccuccucgaggacucccacaacggcaagcucugccuccucaagggcaucgccccccuccagcucggcaacugcuccgucgccggcuggauccucggcaaccccgagugcgagcuccucaucuccaaggaguccugguccuacaucgucgagacccccaaccccgagaacggcaccugcuaccccggcuacuucgccgacuacgaggagcuccgcgagcagcucuccuccgucuccuccuucgagcgcuucgagaucuuccccaagggcuccuccuggcccaaccacaccgucaccggcgucuccgccuccugcucccacaacggcaaguccuccuucuaccgcaaccuccucuggcucaccggcaagaacggccucuaccccaaccucuccauguccuacgucaacaacaaggagaaggagguccucguccucuggggcguccaccacccccccaacaucggcgaccagaaggcccucuaccacaccgagaacgccuacgucuccgucgucuccucccacuacucccgccgcuucacccccgagaucgccaagcgccccaagguccgcgaccaggagggccgcaucaacuacuacuggacccuccucgagcccggcgacaccaucaucuucgaggccaacggcaaccucaucgcccccugguacgccuucgcccucucccgcggcuucggcuccggcaucaucaccuccaacgcccccaugggcgagugcgacgccaagugccagaccccccagggcgccaucaacuccucccuccccuuccagaacguccaccccgucaccaucggcgagugccccaaguacguccgcuccgccaagcuccgcauggucaccggccuccgcaacauccccuccauccagucccgcggccucuucggcgccaucgccggcuucaucgagggcggcuggaccggcauggucgacggcugguacggcuaccaccaccagaacgagcagggcuccggcuacgccgccgaccagaaguccacccagaacgccaucaacggcaucaccaacaaggucaacuccaucaucgagaagaugaacacccaguucaccgccgucggcaaggaguucaacaagcucgagcgccgcauggagaaccucaacaagaaggucgacgacggcuuccucgacaucuggaccuacaacgccgagcuccucguccuccucgagaacgagcgcacccucgacuuccacgacuccaacgucaagaaccucuacgagaaggucaagucccagcucaagaacaacgccaaggagaucggcaacggcugcuucgaguucuaccacaagugcaacaacgagugcauggaguccgucaagaacggcaccuacgacuaccccaaguacuccgaggaguccaagcucaaccgcgagaagaucgacggcgucaagcucgaguccaugggcgucuaccagauccucgccaucuacuccaccgucgccuccucccucguccuccucgucucccucggcgccaucuccuucuggaugugcuccaacggcucccuccagugccgcaucugcaucuga

SEQ ID NO: 96908 - RNA, 1698 nt, Artificial Sequence; identical to SEQ ID NO: 96836
  derived and/or modified CDS sequence (opt2) from hemagglutinin__InfluenzaA__ABE11712

SEQ ID NO: 96909 - RNA, 1698 nt, Artificial Sequence; identical to SEQ ID NO: 96877
  derived and/or modified CDS sequence (opt2) from hemagglutinin__InfluenzaA__ABE11723

SEQ ID NO: 96910 - RNA, 1698 nt, Artificial Sequence; identical to SEQ ID NO: 96883
  derived and/or modified CDS sequence (opt2) from hemagglutinin__InfluenzaA__ABE11734

SEQ ID NO: 96911 - RNA, 1698 nt, Artificial Sequence; identical to SEQ ID NO: 96836
  derived and/or modified CDS sequence (opt2) from hemagglutinin__InfluenzaA__ABE11812

SEQ ID NO: 96912 - RNA, 1698 nt, Artificial Sequence; identical to SEQ ID NO: 96877
  derived and/or modified CDS sequence (opt2) from hemagglutinin__InfluenzaA__ABE11823

SEQ ID NO: 96913 - RNA, 1698 nt, Artificial Sequence; identical to SEQ ID NO: 96877
  derived and/or modified CDS sequence (opt2) from hemagglutinin__InfluenzaA__ABE11834

SEQ ID NO: 96914 - RNA, 1698 nt, Artificial Sequence; identical to SEQ ID NO: 96877
  derived and/or modified CDS sequence (opt2) from hemagglutinin__InfluenzaA__ABE11845

SEQ ID NO: 96915 - RNA, 1698 nt, Artificial Sequence; identical to SEQ ID NO: 96883
  derived and/or modified CDS sequence (opt2) from hemagglutinin__InfluenzaA__ABE11856

SEQ ID NO: 96916 - RNA, 1701 nt, Artificial Sequence
  derived and/or modified CDS sequence (opt2) from hemagglutinin__InfluenzaA__ABE11900
augaaggccaagcuccucguccuccucugcgccuucaccgccaccuacgccgacaccaucugcaucggcuaccacgccaacaacuccaccgacaccgucgacaccguccucgagaagaacgucaccgucacccacuccgucaaccuccucgaggacucccacaacggcaagcucugccgccucaagggcaccgccccccuccagcucggcaacugcuccgucgccggcuggauccucggcaaccccgagugcgagucccucuucuccaaggaguccugguccuacaucgccgagacccccaaccccgagaacggcaccugcuaccccggcuacuucgccgacuacgaggagcuccgcgagcagcucuccuccgucuccuccuucgagcgcuucgagaucuuccccaaggaguccuccuggcccaaccacaccgucaccaagggcgucaccgccuccugcucccacaacggcaaguccuccuucuacaagaaccuccucuggcucaccgagaagaacggccucuaccccaaccucuccaaguccuacgucaacaacaaggagaaggagguccucguccucuggggcguccaccaccccuccaacaucggcgaccagcgcgccaucuaccacaccgagaacgccuacgucuccgucgucuccucccacuacucccgccgcuucacccccgagaucgccaagcgccccaagguccgcgaccaggagggccgcaucaacuacuacuggacccuccucgagcccggcgacaccaucaucuucgaggccaacggcaaccucaucgcccccugguacgccuucgcccucucccgcggcuucggcuccggcaucaucaccuccaacgccuccaugggcgagugcgacgccaagugccagaccccccagggcgccaucaacuccucccuccccuuccagaacguccaccccgucaccaucggcgagugccccaaguacguccgcuccaccaagcuccgcauggucaccggccuccgcaacauccccuccauccagucccgcggccucuucggcgccaucgccggcuucaucgagggcggcuggaccggcaugaucgacggcugguacggcuaccaccaccagaacgagcagggcuccggcuacgccgccgaccagaaguccacccagaacgccaucaacggcaucaccaacaaggucaacuccgucaucgagaagaugaacacccaguucaccgccgucggcaaggaguucaacaagcucgagcgccgcauggagaaccucaacaagaaggucgacgacggcuuccucgacaucuggaccuacaacgccgagcuccucguccuccucgagaacgagcgcacccucgacuuccacgacuccaacgucaagaaccucuacgagaaggucaagacccagcucaagaacaacgccaaggagaucggcaacggcugcuucgaguucuaccacaagugcaacaacgagugcauggaguccgucaagaacggcaccuacgacuaccccaaguacuccgaggaguccaagcucaaccgcgagaagaucgacggcgucaagcucgaguccaugggcgucuaccagauccucgccaucuacuccaccgucgccuccucccucguccuccucaucucccucggcgccaucuccuucuggaugugcuccaacggcucccuccagugccgcaucugcaucuga

SEQ ID NO: 96917 - RNA, 1701 nt, Artificial Sequence
  derived and/or modified CDS sequence (opt2) from hemagglutinin__InfluenzaA__ABE11942
augaaggccaagcuccucguccuccucugcgccuucaccgccaccuacgccgacaccaucugcaucggcuaccacgccaacaacuccaccgacaccgucgacaccguccucgagaagaacgucaccgucacccacuccgucaaccuccucgaggacucccacaacggcaagcucugccgccucaagggcaccgccccccuccagcucggcaacugcuccgucgccggcuggauccucggcaaccccgagugcgagucccucuucuccaaggaguccugguccuacaucgccgagacccccaaccccgagaacggcaccugcuaccccggcuacuucgccgacuacgaggagcuccgcgagcagcucuccuccgucuccuccuucgagcgcuucgagaucuuccccaaggaguccuccuggcccaaccacaccgucaccaagggcgucaccgccuccugcucccacaacggcaaguccuccuucuacaagaaccuccucuggcucaccgagaagaacggccucuaccccucccucuccaaguccuacgucaacaacaaggagaaggagguccucguccucuggggcguccaccaccccuccaacaucggcgaccagcgcgccaucuaccacaccgagaacgccuacgucuccgucgucuccucccacuacucccgccgcuucacccccgagaucgccaagcgccccaagguccgcgaccaggagggccgcaucaacuacuacuggacccuccucgagcccggcgacaccaucaucuucgaggccaacggcaaccucaucgcccccugguacgccuucgcccucucccgcggcuucggcuccggcaucaucaccuccaacgccuccaugggcgagugcgacgccaagugccagaccccccagggcgccaucaacuccucccuccccuuccagaacguccaccccgucaccaucggcgagugccccaaguacguccgcuccaccaagcuccgcauggucaccggccuccgcaacauccccuccauccagucccgcggccucuucggcgccaucgccggcuucaucgagggcggcuggaccggcaugaucgacggcugguacggcuaccaccaccagaacgagcagggcuccggcuacgccgccgaccagaaguccacccagaacgccaucaacggcaucaccaacaaggucaacuccgucaucgagaagaugaacacccaguucaccgccgucggcaaggaguucaacaagcucgagcgccgcauggagaaccucaacaagaaggucgacgacggcuuccucgacaucuggaccuacaacgccgagcuccucguccuccucgagaacgagcgcacccucgacuuccacgacuccaacgucaagaaccucuacgagaaggucaagacccagcucaagaacaacgccaaggagaucggcaacggcugcuucgaguucuaccacaagugcaacaacgagugcauggaguccgucaagaacggcaccuacgacuaccccaaguacuccgaggaguccaagcucaaccgcgagaagaucgacggcgucaagcucgaguccaugggcgucuaccagauccucgccaucuacuccaccgucgccuccucccucguccuccucgucucccucggcgccaucuccuucuggaugugcuccaacggcucccuccagugccgcaucugcaucuga

SEQ ID NO: 96918 - RNA, 1701 nt, Artificial Sequence
  derived and/or modified CDS sequence (opt2) from hemagglutinin__InfluenzaA__ABE12078
augaagaccaucaucgcccucuccuacauccucugccucgucuucgcccagaagcuccccggcaacgacaacuccaccgccacccucugccucggccaccacgccguccccaacggcacccucgucaagaccaucaccaacgaccagaucgaggucaccaacgccaccgagcucguccaguccuccuccaccggcggcaucugcgacuccccccaccagauccucgacggcgagaacugcacccucaucgacgcccuccucggcgacccccacugcgacggcuuccagaacaaggagugggaccucuucgucgagcgcuccaaggccuacuccaacugcuaccccuacgacguccccgacuacgccucccuccgcucccucgucgccuccuccggcacccucgaguucaacaacgaguccuucaacuggaccggcgucgcccagaacggcaccuccuccgccugcaagcgccgcuccaacaaguccuucuucucccgccucaacuggcuccaccagcucaaguacaaguaccccgcccucaacgucaccaugcccaacaacgagaaguucgacaagcucuacaucuggggcguccaccaccccuccaccgacuccgaccagaucucccucuacgcccaggcccccggccgcgucaccgucuccaccaagcgcucccagcagaccgucauccccaacaucggcucccgccccuggguccgcggcgucuccucccgcaucuccaucuacuggaccaucgucaagcccggcgacauccuccucaucaacugcaccggcaaccucaucgccccccgcggcuacuucaagauccgcuccggcaaguccuccaucaugcgcuccgacgccuccaucggcaagugcaacuccgagugcaucacccccaacggcuccauccccaacgacaagcccuuccagaacgucaaccgcaucaccuacggcgccugcccccgcuacgucaagcagaacacccucaagcucgccaccggcaugcgcaacguccccgagaagcagacccgcggcaucuucggcgccaucgccggcuucaucgagaacggcugggagggcauggucgacggcugguacggcuuccgccaccagaacuccgagggcaccggccaggccgccgaccucaaguccacccaggccgccaucaaccagaucaacggcaagcucaaccgccucaucgagaagaccaacgagaaguuccaccagaucgagaaggaguucuccgaggucgagggccgcauccaggaccucgagaaguacgucgaggacaccaagaucgaccucugguccuacaacgccgagcuccucgucgcccucgagaaccagcacaccaucgaccucaccgacuccgagaugaacaagcucuucgagaagaccaagaagcagcuccgcgagaacgccgaggacaugggcaacggcugcuucaagaucuaccacaagugcgacaacgccugcaucggcuccauccgcaacggcaccuacgaccacgacgucuaccgcgacgaggcccucaacaaccgcuuccagaucaagggcgucgagcucaaguccggcuacaaggacuggauccucuggaucuccuucgccaucuccugcuuccuccucugcgucguccuccucggcuucaucaugugggccugccagaagggcaacauccgcugcuccaucugcaucuga

SEQ ID NO: 96919 - RNA, 1701 nt, Artificial Sequence; identical to SEQ ID NO: 96813
  derived and/or modified CDS sequence (opt2) from hemagglutinin__InfluenzaA__ABE12123

SEQ ID NO: 96920 - RNA, 1698 nt, Artificial Sequence; identical to SEQ ID NO: 96836
  derived and/or modified CDS sequence (opt2) from hemagglutinin__InfluenzaA__ABE12248

SEQ ID NO: 96921 - RNA, 1701 nt, Artificial Sequence
  derived and/or modified CDS sequence (opt2) from hemagglutinin__InfluenzaA__ABE12623
augaagaccaucaucgcccucuccuacaucuucugccucguccucggccaggaccuccccggcaacgacaacuccaccgccacccucugccucggccaccacgccguccccaacggcacccucgucaagaccaucaccaacgaccagaucgaggucaccaacgccaccgagcucguccaguccuccuccaccggcaagaucugcaacaacccccaccgcauccucgacggcaucgacugcacccucaucgacgcccuccucggcgacccccacugcgacggcuuccagaacgagaccugggaccucuucgucgagcgcuccaaggccuucuccaacugcuaccccuacgacguccccgacuacgccucccuccgcucccucgucgccuccuccggcacccucgaguucaucaacgagggcuucaccuggaccggcgucacccagaacggcggcuccaacgccugcaagcgcggccccgacuccggcuucuucucccgccucaacuggcucuacaaguccggcuccaccuaccccguccucaacgucaccaugcccaacaacgacaacuucgacaagcucuacaucuggggcguccaccaccccuccaccaaccaggagcagaccucccucuacguccaggccuccggccgcgucaccgucuccaccaagcgcucccagcagaccaucauccccaacaucggcucccgccccuggguccgcggccucuccucccgcaucuccaucuacuggaccaucgucaagcccggcgacauccucgucaucaacuccaacggcaaccucaucgccccccgcggcuacuucaagaugcgcaccggcaaguccuccaucaugcgcuccgacgcccccaucggcaccugcaucuccgagugcaucacccccaacggcuccauccccaacgacaagcccuuccagaacgucaacaagaucaccuacggcgccugccccaaguacgucaagcagaacacccucaagcucgccaccggcaugcgcaacguccccgagaagcagacccgcggccucuucggcgccaucgccggcuucaucgagaacggcugggagggcaugaucgacggcugguacggcuuccgccaccagaacuccgagggcaccggccaggccgccgaccucaaguccacccaggccgccaucgaccagaucaacggcaagcucaaccgcgucaucgagaagaccaacgagaaguuccaccagaucgagaaggaguucuccgaggucgagggccgcauccaggaccucgagaaguacgucgaggacaccaagaucgaccucugguccuacaacgccgagcuccucgucgcccucgagaaccagcacaccaucgaccucaccgacuccgagaugaacaagcucuucgagaagacccgccgccagcuccgcgagaacgccgaggacaugggcaacggcugcuuccgcaucuaccacaagugcgacaacgccugcaucggcuccauccgcaacggcaccuacgaccacgacgucuaccgcgacgaggcccucaacaaccgcuuccagaucaagggcgucgagcucaaguccggcuacaaggacuggauccucuggaucuccuucgccaucuccugcuuccuccucugcgucguccuccucggcuucaucaugugggccugccagaagggcaacauccgcugcaacaucugcaucuga

SEQ ID NO: 96922 - RNA, 1701 nt, Artificial Sequence; identical to SEQ ID NO: 96866
  derived and/or modified CDS sequence (opt2) from hemagglutinin__InfluenzaA__ABE12645

SEQ ID NO: 96923 - RNA, 1701 nt, Artificial Sequence; identical to SEQ ID NO: 96843
  derived and/or modified CDS sequence (opt2) from hemagglutinin__InfluenzaA__ABE13076

SEQ ID NO: 96924 - RNA, 1701 nt, Artificial Sequence; identical to SEQ ID NO: 96819
  derived and/or modified CDS sequence (opt2) from hemagglutinin__InfluenzaA__ABE13323

SEQ ID NO: 96925 - RNA, 1701 nt, Artificial Sequence
  derived and/or modified CDS sequence (opt2) from hemagglutinin__InfluenzaA__ABE13471
augaagaccaucaucgcccucuccuacauccucugccucgucuucgcccagaagcuccccggcaacgacaacuccaccgccacccucugccucggccaccacgccguccccaacggcacccucgucaagaccaucaccaacgaccagaucgaggucaccaacgccaccgagcucguccagaacuccuccaccggccgcaucugcgacuccccccaccgcauccucgacggcaagaacugcacccucaucgacgcccuccucggcgacccccacugcgacggcuuccagaacaaggagugggaccucuucgucgagcgcuccaaggccuacuccaacugcuaccccuacgacguccccgacuacgccucccuccgcucccucgucgccuccuccggcacccucgaguucuacaacgaguccuucaacuggaccggcgucgcccagaacggcaccuccuacgccugcaagcgccgcuccgucaaguccuucuucucccgccucaacuggcuccacaagcucgaguacaaguaccccgcccucaacgucaccaugcccaacaacgacaaguucgacaagcucuacaucuggggcguccaccaccccuccaccgacuccgaccagaccucccucuacguccaggccuccggccgcgucaccgucuccaccaagcgcucccagcagaccgucauccccaacaucggcucccgccccuggguccgcggcgucuccucccgcaucuccaucuacuggaccaucgucaagcccggcgacauccuccucaucaacuccaccggcaaccucaucgccccccgcggcuacuucaagauccgcuccggcaaguccuccaucaugcgcuccgacgcccccaucggcaacugcaacuccgagugcaucacccccaacggcuccauccccaacgacaagcccuuccagaacgucaaccgcaucaccuacggcgccugcccccgcuacgucaagcagaacacccucaagcucgccaccggcaugcgcaacguccccgagaagcagacccgcggcaucuucggcgccaucgccggcuucaucgagaacggcugggagggcauggucgacggcugguacggcuuccgccaccagaacuccgagggcaccggccaggccgccgaccucaaguccacccaggccgccaucaaccagaucaacggcaagcucaaccgccucaucgagaagaccaacgagaaguuccaccagaucgagaaggaguucuccgaggucgagggccgcauccaggaccucgagaaguacgucgaggacaccaagaucgaccucugguccuacaacgccgagcuccucgucgcccucgagaaccagcacaccaucgaccucaccgacuccgagaugaacaagcucuucgagcgcacccgcaagcagcuccgcgagaacgccgaggacaugggcaacggcugcuuccgcaucuaccacaagugcgacaacgccugcaucggcuccauccgcaacggcaccuacgaccacgacgucuaccgcgacgaggcccucaacaaccgcuuccagaucaagggcgucgagcucaaguccggcuacaaggacuggauccucuggaucuccuucgccaucuccugcuuccuccucugcgucguccuccucggcuucaucaugugggccugccagaagggcaacauccgcugcaacaucugcaucuga

SEQ ID NO: 96926 - RNA, 1701 nt, Artificial Sequence
  derived and/or modified CDS sequence (opt2) from hemagglutinin__InfluenzaA__ABE13555
augaagaccaucaucgcccucuccuacauccucugccucgucuucgcccagaagcuccccggcaacgacaacuccaccgccacccucugccucggccaccacgccguccccaacggcacccucgucaagaccaucaccaacgaccagaucgaggucaccaacgccaccgagcucguccagggcuccuccaccggccgcaucugcgacuccccccaccgcauccucgacggcaagaacugcacccucaucgacgcccuccucggcgacccccacugcgacggcuuccagaacaaggagugggaccucuucgucgagcgcuccaaggccuacuccaacugcuaccccuacgacguccccgacuacgccucccuccgcucccucgucgccuccuccggcacccucgaguucaacaacgaguccuucaacuggaccggcgucgcccagaacggcaccuccuacgccugcaagcgccgcuccgucaaguccuucuucucccgccucaacuggcuccacaagcucgaguacaaguaccccgcccucaacgucaccaugcccaacaacgacaaguucgacaagcucuacaucuggggcguccaccaccccuccaccgacuccgaccagaccucccucuacguccaggccuccggccgcgucaccgucuccaccaagcgcucccagcagaccgucauccccaacaucggcucccgccccuggguccgcggcgucuccucccgcaucuccaucuacuggaccaucgucaagcccggcgacauccuccucaucuccuccaccggcaaccucaucgccccccgcggcuacuucaagauccgcuccggcaaguccuccaucaugcgcuccgacgcccccaucgacaacugcaacuccgagugcaucacccccaacggcuccauccccaacgacaagcccuuccagaacgucaaccgcaucaccuacggcgccugcccccgcuacgucaagcagaacacccucaagcucgccaccggcaugcgcaacguccccgagaagcagaccaagggcaucuucggcgccaucgccggcuucaucgagaacggcugggagggcauggucgacggcugguacggcuuccgccaccagaacuccgagggcaccggccaggccgccgaccucaaguccacccaggccgccaucaaccagaucaacggcaagcucaaccgccucaucgagaagaccaacgagaaguuccaccagaucgagaaggaguucuccgaggucgagggccgcauccaggaccucgagaaguacgucgaggacaccaagaucgaccucugguccuacaacgccgagcuccucgucgcccucgagaaccagcacaccaucgaccucaccgacuccgagaugaacaagcucuucgagcgcacccgcaagcagcuccgcgagaacgccgaggacaugggcaacggcugcuucaagaucuaccacaagugcgacaacgccugcaucggcuccauccgcaacggcaccuacgaccacgacgucuaccgcgacgaggcccucaacaaccgcuuccagaucaagggcgucgagcucaaguccggcuacaaggacuggauccucuggaucuccuucgccauguccugcuuccuccucugcgucguccuccucggcuucaucaugugggccugccagaagggcaacauccgcugcaacaucugcaucuga

SEQ ID NO: 96927 - RNA, 1701 nt, Artificial Sequence
  derived and/or modified CDS sequence (opt2) from hemagglutinin__InfluenzaA__ABE13606
augaagaccaucaucgcccucuccuacauccucugccucgucuucgcccagaagcuccccggcaacgacaacuccaccgccacccucugccucggccaccacgccguccccaacggcacccucgucaagaccaucaccaacgaccagaucgaggucaccaacgccaccgagaugguccaguccuccuccaccggccgcaucugcgacuccccccaccgcauccucgacggcaagaacugcacccucaucgacgcccuccucggcgacccccacugcgacggcuuccagaacaaggagugggaccucuucgucgagcgcuccaaggccuacuccaacugcuaccccuacgacguccccgacuacgccucccuccgcucccucgucgccuccuccggcacccucgaguucaccaacgagggcuucaacuggaccggcgucgcccaggacggcaccuccuacgccugcaagcgcggcuccgucaaguccuucuucucccgccucaacuggcuccacaagcucgaguacaaguaccccgcccucaacgucaccaugcccaacaacgacaaguucgacaagcucuacaucuggggcguccaccaccccuccaccgacuccgaccagaccucccucuacguccaggccuccggccgcgucaccgucuccaccaagcgcucccagcagaccgucauccccaacaucggcucccgccccuggguccgcggcgucuccucccgcaucuccaucuacuggaccaucgucaagcccggcgacauccuccucaucaacuccaccggcaaccucaucgccccccgcggcuacuucaagauccgcuccggcaaguccuccaucaugcgcuccgacgcccccaucggcaacugcaacuccgagugcaucacccccaacggcuccauccccaacgacaagcccuuccagaacgucaaccgcaucaccuacggcgccugcccccgcuacgucaagcagaacacccucaagcucgccaccggcaugcgcaacguccccgagaagcagacccgcggcaucuucggcgccaucgccggcuucaucgagaacggcugggagggcauggucgacggcugguacggcuuccgccaccagaacuccgagggcaccggccaggccgccgaccucaaguccacccaggccgccaucaaccagaucaacggcaagcucaaccgccucaucgagaagaccaacgagaaguuccaccagaucgagaaggaguucuccgaggucgagggccgcauccaggaccucgagaaguacgucgaggacaccaagaucgaccucugguccuacaacgccgagcuccucaucgcccucgagaaccagcacaccaucgaccucaccgacuccgagaugaacaagcucuucgagcgcacccgcaagcagcuccgcgagaacgccgaggacaugggcaacggcugcuucaagaucuaccacaagugcgacaacgccugcaucggcuccauccgcaacggcaccuacgaccacgacgucuaccgcgacgaggcccucaacaaccgcuuccagaucaagggcgucgagcucaaguccggcuacaaggacuggauccucuggaucuccuucgccaucuccugcuuccuccucugcgucguccuccucggcuucaucaugugggccugccagaagggcaacauccgcugcaacaucugcaucuga

SEQ ID NO: 96928 - RNA, 1701 nt, Artificial Sequence
  derived and/or modified CDS sequence (opt2) from hemagglutinin__InfluenzaA__ABE13628
augaagaccaucaucgcccucuccuacauccucugccucgucuucgcccagaagcuccccggcaacgacaacuccaccgccacccucugccucggccaccacgccguccccaacggcacccucgucaagaccaucaccaacgaccagaucgaggucaccaacgccaccgagcucguccaguccuccuccaccggccgcaucugcgacuccccccaccgcauccucgacggcaagaacugcacccucaucgacgcccuccucggcgacccccacugcgacggcuuccagaacaaggagugggaccucuucgucgagcgcuccaaggccuacuccaacugcuaccccuacgacguccccgacuacgccucccuccgcucccucgucgccuccuccggcacccucgaguucaccaacgagggcuucaacuggaccggcgucgcccaggacggcaaguccuacgccugcaagcgcggcuccgucaacuccuucuucucccgccucaacuggcuccacaagcucgaguacaaguaccccgcccucaacgucaccaugcccaacaacgacaaguucgacaagcucuacaucuggggcguccaccaccccuccaccgacuccgaccagaccucccucuacguccaggccuccggccgcgucaccgucuccaccaagcgcucccagcagaccgucauccccaacaucggcucccgccccuggguccgcggcaucuccucccgcaucuccaucuacuggaccaucgucaagcccggcgacauccuccucaucaacuccaccggcaaccucaucgccccccgcggcuacuucaagauccgcaacggcaaguccuccaucaugcgcuccgacgcccccaucgacaacugcaacuccgagugcaucacccccaacggcuccauccccaacgacaagcccuuccagaacgucaaccgcaucaccuacggcgccugcccccgcuacgucaagcagaacacccucaagcucgccaccggcaugcgcaacguccccgagaagcagacccgcggcaucuucggcgccaucgccggcuucaucgagaacggcugggagggcauggucgacggcugguacggcuuccgccaccagaacuccgagggcaccggccaggccgccgaccucaaguccacccaggccgccaucgaccagaucaacggcaagcucaaccgccucaucgagaagaccaacgagaaguuccaccagaucgagaaggaguucuccgaggucgagggccgcauccaggaccucgagaaguacgucgaggacaccaagaucgaccucugguccuacaacgccgagcuccucgucgcccucgagaaccagcacaccaucgaccucaccgacuccgagaugaacaagcucuucgagcgcacccgcaagcagcuccgcgagaacgccgaggacaugggcaacggcugcuucaagaucuaccacaagugcgacaacgccugcaucggcuccauccgcaacggcaccuacgaccacgacgucuaccgcgacgaggcccucaacaaccgcuuccagaucaagggcgucgagcucaaguccggcuacaaggacuggauccucuggaucuccuucgccaucuccugcuuccuccucugcgucguccuccucggcuucaucaugugggccugccagaagggcaacauccgcugcaacaucugcaucuga

SEQ ID NO: 96929 - RNA, 1701 nt, Artificial Sequence
  derived and/or modified CDS sequence (opt2) from hemagglutinin__InfluenzaA__ABE13824
augaagaccaucaucgcccucuccuacauccucugccaggucuucgcccagaagcuccccggcaacgacaacuccaccgccacccucugccucggccaccacgccguccccaacggcacccucgucaagaccaucaccaacgaccagaucgaggucaccaacgccaccgagcucguccaguccuccuccaccggccgcaucugcgacuccccccaccgcauccucgacggcaagaacugcacccucaucgacgcccuccucggcgacccccacugcgacggcuuccagaacaaggagugggaccucuucgucgagcgcuccaaggccuacuccaacugcuaccccuacgacguccccgacuacgccucccuccgcucccucgucgccuccuccggcacccucgaguucaccaacgagggcuucaacuggaccggcgucgcccaggacggcaaguccuacgccugcaagcgcggcuccgucaacuccuucuucucccgccucaacuggcuccacaagcucgaguacaaguaccccgcccucaacgucaccaugcccaacaacgacaaguucgacaagcucuacaucuggggcguccaccaccccuccaccgacuccgaccagaccucccucuacguccaggccuccggccgcgucaccgucuccaccaagcgcucccagcagaccgucauccccaacaucggcucccgccccuggguccgcggcaucuccucccgcaucuccaucuacuggaccaucgucaagcccggcgacauccuccucaucaacuccaccggcaaccucaucgccccccgcggcuacuucaagauccgcaacggcaaguccuccaucaugcgcuccgacgcccccaucgacaacugcaacuccgagugcaucacccccaacggcuccauccccaacgacaagcccuuccagaacgucaaccgcaucaccuacggcgccugcccccgcuacgucaagcagaacacccucaagcucgccaccggcaugcgcaacguccccgagaagcagacccgcggcaucuucggcgccaucgccggcuucaucgagaacggcugggagggcauggucgacggcugguacggcuuccgccaccagaacuccgagggcaccggccaggccgccgaccucaaguccacccaggccgccaucgaccagaucaacggcaagcucaaccgccucaucgagaagaccaacgagaaguuccaccagaucgagaaggaguucuccgaggucgagggccgcauccaggaccucgagaaguacgucgaggacaccaagaucgaccucugguccuacaacgccgagcuccucgucgcccucgagaaccagcacaccaucgaccucaccgacuccgagaugaacaagcucuucgagcgcacccgcaagcagcuccgcgagaacgccgaggacaugggcaacggcugcuucaagaucuaccacaagugcgacaacgccugcaucggcuccauccgcaacggcaccuacgaccacgacgucuaccgcgacgaggcccucaacaaccgcuuccagaucaagggcgucgagcucaaguccggcuacaaggacuggauccucuggaucuccuucgccaucuccugcuuccuccucugcgucguccuccucggcuucaucaugugggccugccagaagggcaacauccgcugcaacaucugcaucuga

SEQ ID NO: 96930 - RNA, 1701 nt, Artificial Sequence; identical to SEQ ID NO: 96929
  derived and/or modified CDS sequence (opt2) from hemagglutinin__InfluenzaA__ABE14019

SEQ ID NO: 96931 - RNA, 1701 nt, Artificial Sequence
  derived and/or modified CDS sequence (opt2) from hemagglutinin__InfluenzaA__ABE14030
augaagaccaucaucgcccucuccuacauccucugccucgucuucgcccagaagcuccccggcaacgacaacuccaccgccacccucugccucggccaccacgccguccccaacggcacccucgucaagaccaucaccaacgaccagaucgaggucaccaacgccaccgagcucguccaguccuccuccaucggccgcaucugcgacuccccccaccgcauccucgacggcaagaacugcacccucaucgacgcccuccucggcgacccccacugcgacggcuuccagaacaaggagugggaccucuucgucgagcgcuccaaggccuacuccaacugcuaccccuacgacguccccgacuacgccucccuccgcucccucgucgccuccuccggcacccucgaguucaccaacgagggcuucaacuggaccggcgucgcccaggacggcaaguccuacgccugcaagcgcggcuccgucaacuccuucuucucccgccucaacuggcuccacaagcucgaguacaaguaccccgcccucaacgucaccaugcccaacaacgacaaguucgacaagcucuacaucuggggcguccaccaccccuccaccgacuccgaccagaccucccucuacguccaggccuccggccgcgucaccgucuccaccaagcgcucccagcagaccgucauccccaacaucggcucccgccccuggguccgcggcaucuccucccgcaucuccaucuacuggaccaucgucaagcccggcgacauccuccucaucaacuccaccggcaaccucaucgccccccgcggcuacuucaagauccgcaacggcaaguccuccaucaugcgcuccgacgcccccaucgacaacugcaacuccgagugcaucacccccaacggcuccauccccaacgacaagcccuuccagaacgucaaccgcaucaccuacggcgccugcccccgcuacgucaagcagaacacccucaagcucgccaccggcaugcgcaacguccccgagaagcagacccgcggcaucuucggcgccaucgccggcuucaucgagaacggcugggagggcauggucgacggcugguacggcuuccgccaccagaacuccgagggcaccggccaggccgccgaccucaaguccacccaggccgccaucgaccagaucaacggcaagcucaaccgccucaucgagaagaccaacgagaaguuccaccagaucgagaaggaguucuccgaggucgagggccgcauccaggaccucgagaaguacgucgaggacaccaagaucgaccucugguccuacaacgccgagcuccucgucgcccucgagaaccagcacaccaucgaccucaccgacuccgagaugaacaagcucuucgagcgcacccgcaagcagcuccgcgagaacgccgaggacaugggcaacggcugcuucaagaucuaccacaagugcgacaacgccugcaucggcuccauccgcaacggcaccuacgaccacgacgucuaccgcgacgaggcccucaacaaccgcuuccagaucaagggcgucgagcucaaguccggcuacaaggacuggauccucuggaucuccuucgccaucuccugcuuccuccucugcgucguccuccucggcuucaucaugugggccugccagaagggcaacauccgcugcaacaucugcaucuga

SEQ ID NO: 96932 - RNA, 1701 nt, Artificial Sequence; identical to SEQ ID NO: 96928
  derived and/or modified CDS sequence (opt2) from hemagglutinin__InfluenzaA__ABE14041

SEQ ID NO: 96933 - RNA, 1701 nt, Artificial Sequence; identical to SEQ ID NO: 96929
  derived and/or modified CDS sequence (opt2) from hemagglutinin__InfluenzaA__ABE14063

SEQ ID NO: 96934 - RNA, 1701 nt, Artificial Sequence
  derived and/or modified CDS sequence (opt2) from hemagglutinin__InfluenzaA__ABE14124
augaagaccaucaucgcccucuccuacauccucugccucgucuucgcccagaagcuccccggcaacgacaacuccaccgccacccucugccucggccaccacgccguccccaacggcacccucgucaagaccaucaccaacgaccagaucgaggucaccaacgccaccgagcucguccaguccuccuccaccggccgcaucugcgacuccccccaccgcauccucgacggcaagaacugcacccucaucgacgcccuccucggcgacccccacugcgacggcuuccagaacaaggagugggaccucuucgucgagcgcuccaaggccuacuccaacugcuaccccuacgacguccccgacuacgccucccuccgcucccucgucgccuccuccggcacccucgaguucaccaacgagggcuucaacuggaccggcgucgcccaggacggcaccuccuacgccugcaagcgcggcuccgucaaguccuucuucucccgccucaacuggcuccacaagcucgaguacaaguaccccgcccucaacgucaccaugcccaacaacgacaaguucgacaagcucuacaucuggggcguccaccaccccuccaccgacuccgaccagaccucccucuacguccaggccuccggccgcgucaccgucuccaccaagcgcucccagcagaccgucauccccaacaucggcucccgccccuggguccgcggcgucuccucccgcaucuccaucuacuggaccaucgucaagcccggcgacauccuccucaucaacuccaccggcaaccucaucgccccccgcggcuacuucaagauccgcuccggcaaguccuccaucaugcgcuccgacgcccccaucggcaacugcaacuccgagugcaucacccccaacggcuccauccccaacgacaagcccuuccagaacgucaaccgcaucaccuacggcgccugcccccgcuacgucaagcagaacacccucaagcucgccaccggcaugcgcaacguccccgagaagcagacccgcggcaucuucggcgccaucgccggcuucaucgagaacggcugggagggcauggucgacggcugguacggcuuccgccaccagaacuccgagggcaccggccaggccgccgaccucaaguccacccaggccgccaucaaccagaucaacggcaagcucaaccgccucaucgagaagaccaacgagaaguuccaccagaucgagaaggaguucuccgaggucgagggccgcauccaggaccucgagaaguacgucgaggacaccaagaucgaccucugguccuacaacgccgagcuccucaucgcccucgagaaccagcacaccaucgaccucaccgacuccgagaugaacaagcucuucgagcgcacccgcaagcagcuccgcgagaacgccgaggacaugggcaacggcugcuucaagaucuaccacaagugcgacaacgccugcaucggcuccauccgcaacggcaccuacgaccacgacgucuaccgcgacgaggcccucaacaaccgcuuccagaucaagggcgucgagcucaaguccggcuacaaggacuggauccucuggaucuccuucgccaucuccugcuuccuccucugcgucguccuccucggcuucaucaugugggccugccagaagggcaacauccgcugcaacaucugcaucuga

SEQ ID NO: 96935 - RNA, 1701 nt, Artificial Sequence
  derived and/or modified CDS sequence (opt2) from hemagglutinin__InfluenzaA__ABE14464
augaagaccaucaucgcccucuccuacauccucugccaggucuucgcccagaagcuccccggcaacgacaacuccaccgccacccucugccucggccaccacgccguccccaacggcacccucgucaagaccaucaccaacgaccagaucgaggucaccaacgccaccgagcucguccaguccuccuccaccggccgcaucugcgacuccccccaccgcauccucgacggcaagaacugcacccucaucgacgcccuccucggcgacccccacugcgacggcuuccagaacaaggagugggaccucuucgucgagcgcuccaaggccuacuccaacugcuaccccuacgacguccccgacuacgccucccuccgcucccucgucgccuccuccggcacccucgaguucaccaacgagggcuucaacuggaccggcgucgcccaggacggcaaguccuacgccugcaagcgcggcuccgucaacuccuucuucucccgccucaacuggcuccacaagcucgaguacaaguaccccgcccucaacgucaccaugcccaacaacgacaaguucgacaagcucuacaucuggggcguccaccaccccuccaccgacuccgaccagaccucccucuacguccaggccuccggccgcgucaccgucuccaccaagcgcucccagcagaccgucauccccaacaucggcucccgccccuggguccgcggcaucuccucccgcaucuccaucuacuggaccaucgucaagcccggcgacauccuccucaucaacuccaccggcaaccucaucgccccccgcggcuacuucaagauccgcaacggcaaguccuccaucaugcgcuccgacgcccccaucgacaacugcaacuccgagugcaucacccccaacggcuccauccccaacgacaagcccuuccagaacgucaaccgcaucaccuacggcgccugcccccgcuacgucaagcagaacacccucaagcucgccaccggcaugcgcaacguccccgagaagcagacccgcggcaucuucggcgccaucgccggcuucaucgagaacggcugggagggcaugaucgacggcugguacggcuuccgccaccagaacuccgagggcaccggccaggccgccgaccucaaguccacccaggccgccaucgaccagaucaacggcaagcucaaccgccucaucgagaagaccaacgagaaguuccaccagaucgagaaggaguucuccgaggucgagggccgcauccaggaccucgagaaguacgucgaggacaccaagaucgaccucugguccuacaacgccgagcuccucgucgcccucgagaaccagcacaccaucgaccucaccgacuccgagaugaacaagcucuucgagcgcacccgcaagcagcuccgcgagaacgccgaggacaugggcaacggcugcuucaagaucuaccacaagugcgacaacgccugcaucggcuccauccgcaacggcaccuacgaccacgacgucuaccgcgacgaggcccucaacaaccgcuuccagaucaagggcgucgagcucaaguccggcuacaaggacuggauccucuggaucuccuucgccaucuccugcuuccuccucugcgucguccuccucggcuucaucaugugggccugccagaagggcaacauccgcugcaacaucugcaucuga

SEQ ID NO: 96936 - RNA, 1701 nt, Artificial Sequence
  derived and/or modified CDS sequence (opt2) from hemagglutinin__InfluenzaA__ABE14840
augaagaccaucaucgcccucuccuacauccucugccucgucuucgcccagaagcucccccgcaacgacaacuccaccgccacccucugccucggccaccacgccguccccaacggcacccucgucaagaccaucaccaacgaccagaucgaggucaccaacgccaccgagcucguccaguccuccuccaccggccgcaucugcgacuccccccaccgcauccucgacggcaagaacugcacccucaucgacgcccuccucggcgacccccacugcgacggcuuccagaacaaggagugggaccucuucgucgagcgcuccaaggccuacuccaacugcuaccccuacgacguccccgacuacgccucccuccgcucccucgucgccuccuccggcacccucgaguucaccaacgagggcuucaacuggaccggcgucgcccaggacggcaaguccuacgccugcaagcgcggcuccgucaacuccuucuucucccgccucaacuggcuccacaagcucgaguacaaguaccccgcccucaacgucaccaugcccaacaacgacaaguucgacaagcucuacaucuggggcguccaccaccccuccaccgacuccgaccagaccucccucuacguccaggccuccggccgcgucaccgucuccaccaagcgcucccagcagaccgucauccccaacaucggcucccgccccuggguccgcggcaucuccucccgcaucuccaucuacuggaccaucgucaagcccggcgacauccuccucaucuccuccaccggcaaccucaucgccccccgcggcuacuucaagauccgcaacggcaaguccuccaucaugcgcuccgacgcccccaucgacaacugcaacuccgagugcaucacccccaacggcuccauccccaacgacaagcccuuccagaacgucaaccgcaucaccuacggcgccugcccccgcuacgucaagcagaacacccucaagcucgccaccggcaugcgcaacguccccgagaagcagacccgcggcaucuucggcgccaucgccggcuucaucgagaacggcugggagggcauggucgacggcugguacggcuuccgccaccagaacuccgagggcaccggccaggccgccgaccucaaguccacccaggccgccaucgaccagaucaacggcaagcucaaccgccucaucgagaagaccaacgagaaguuccaccagaucgagaaggaguucuccgaggucgagggccgcauccaggaccucgagaaguacgucgaggacaccaagaucgaccucugguccuacaacgccgagcuccucgucgcccucgagaaccagcacaccaucgaccucaccgacuccgagaugaacaagcucuucgagcgcacccgcaagcagcuccgcgagaacgccgaggacaugggcaacggcugcuucaagaucuaccacaagugcgacaacgccugcaucggcuccauccgcaacggcaccuacgaccacgacgucuaccgcgacgaggcccucaacaaccgcuuccagaucaagggcgucgagcucaaguccggcuacaaggacuggauccucuggaucuccuucgccaucuccugcuuccuccucugcgucguccuccucggcuucaucaugugggccugccagaagggcaacauccgcugcuccaucugcaucuga

SEQ ID NO: 96937 - RNA, 1701 nt, Artificial Sequence
  derived and/or modified CDS sequence (opt2) from hemagglutinin__InfluenzaA__ABE15578
augaagaccaucaucgcccucuccuacauccucugccucgucuucgcccagaagcuccccggcaacgacaacuccaccgccacccucugccucggccaccacgccguccccaacggcacccucgucaagaccaucaccaacgaccagaucgaggucaccaacgccaccgagcucguccaguccuccuccaccggccgcaucugcgacuccccccaccgcauccucgacggcaagaacugcacccucaucgacgcccuccucggcgacccccacugcgacggcuuccagaacaaggagugggaccucuucgucgagcgcuccaaggccuacuccaacugcuaccccuacgacguccccgacuacgccucccuccgcucccucgucgccuccuccggcacccucgaguucaccaacgagggcuucaacuggaccggcgucgcccaggacggcaaguccuacgccugcaagcgcggcuccgucaacuccuucuucucccgccucaacuggcuccacaagcucgaguacaaguaccccgcccucaacgucaccaugcccaacaacgacaaguucgacaagcucuacaucuggggcguccaccaccccuccaccgacuccgaccagaccucccucuacguccaggccuccggccgcgucaccgucuccaccaagcgcucccagcagaccgucauccccaacaucggcucccgccccuggguccgcggcaucuccucccgcaucuccaucuacuggaccaucgucaagcccggcgacauccuccucaucaacuccaccggcaaccucaucgccccccgcggcuacuucaagauccgcaacggcaaguccuccaucaugcgcuccgacgcccccaucgacaacugcaacuccgagugcaucacccccaacggcuccauccccaacgacaagcccuuccagaacgucaaccgcaucaccuacggcgccugcccccgcuacgucaagcagaacacccucaagcucgccaccggcaugcgcaacguccccgagaagcagacccgcggcaucuucggcgccaucgccggcuucaucgagaacggcugggagggcauggucgacggcugguacggcuuccgccaccagaacuccgagggcaccggccaggccgccgaccucaaguccacccaggccgccaucgaccagaucaacggcaagcucaaccgccucaucgagaagaccaacgagaaguuccaccagaucgagaaggaguucuccgaggucgagggccgcauccaggaccucgagaaguacgucgaggacaccaagaucgaccucugguccuacaacgccgagcuccucgucgcccucgagaaccagcacaccaucgaccucaccgacuccgagaugaacaagcucuucgagcgcacccgcaagcagcuccgcgagaacgccgaggacaugggcaacggcugcuucaagaucuaccacaagugcgacaacgccugcaucggcuccauccgcaacggcaccuacgaccacgacgucuaccgcgacgaggcccucaacaaccgcuuccagaucaagggcgucgagcucaaguccggcuacaaggacuggauccucuggaucuccuucgccaucuccugcuuccuccucugcgucguccuccucggcuucaucaugugggccugccagaagggcaacauccgcugcuccaucugcaucuga

SEQ ID NO: 96938 - RNA, 1701 nt, Artificial Sequence
  derived and/or modified CDS sequence (opt2) from hemagglutinin__InfluenzaA__ABE26991
augaaggccaagcuccucguccuccucugcgccuucaccgccaccuacgccgacaccaucugcaucggcuaccacgccaacaacuccaccgacaccgucgacaccguccucgagaagaacgucaccgucacccacuccgucaaccuccucgaggacucccacaacggcaagcucugccgccucaagggcaccgccccccuccagcucggcaacugcuccgucgccggcuggauccucggcaaccccgagugcgagucccucuucuccaaggaguccugguccuacaucgccgagacccccaaccccgagaacggcaccugcuaccccggcuacuucgccgacuacgaggagcuccgcgagcagcucuccuccgucuccuccuucgagcgcuucgagaucuuccccaaggaguccuccuggcccaaccacaccgucaccaagggcgucaccgccuccugcucccacaacggcaaguccuccuucuacaagaaccuccucuggcucaccgagaagaacggccucuaccccaaccucuccaaguccuacgucaacaacaaggagaaggagguccucguccucuggggcguccaccaccccuccaacaucggcgaccagcgcgccaucuaccacaccgagaacgccuacgucuccgucgucuccucccacuacucccgccgcuucacccccgagaucgccaagcgccccaagguccgcgaccaggagggccgcaucaacuacuacuggacccuccucgagcccggcgacaccaucaucuucgaggccaacggcaaccucaucgcccccugguacgccuucgcccucucccgcggcuucggcuccggcaucaucaccuccaacgccuccaugggcgacugcgacgccaagugccagaccccccagggcgccaucaacuccucccuccccuuccagaacguccaccccgucaccaucggcgagugccccaaguacguccgcuccaccaagcuccgcauggucaccggccuccgcaacauccccuccauccagucccgcggccucuucggcgccaucgccggcuucaucgagggcggcuggaccggcaugaucgacggcugguacggcuaccaccaccagaacgagcagggcuccggcuacgccgccgacaagaaguccacccagaacgccaucgacggcaucaccaacaaggucaacuccgucaucgagaagaugaacacccaguucaccgccgucggcaaggaguucaacaagcucgagcgccgcauggagaaccucaacaagaaggucgacgacggcuuccucgacaucuggaccuacaacgccgagcuccucguccuccucgagaacgagcgcacccucgacuuccacgacuccaacgucaagaaccucuacgagaaggucaagaaccagcucaagaacaacgccaaggagaucggcaacggcugcuucgaguucuaccacaagugcaacaacgagugcauggaguccgucaagaacggcaccuacgacuaccccaaguacuccgaggaguccacccucaagcgcgagaagaucgacggcgucaagcucgaguccaugggcgucuaccagauccucgccaucuacuccaccgucgccuccucccucguccuccucgucucccucggcgccaucuccuucuggaugugcuccaacggcucccuccagugccgcaucugcaucuga

SEQ ID NO: 96939 - RNA, 1701 nt, Artificial Sequence
  derived and/or modified CDS sequence (opt2) from hemagglutinin__InfluenzaA__ABF47550
augaagaccaucaucgcccucuccuacaucuucugccucgucuucgcccagaagcuccccggcaacgacaacuccaccgccacccucugccucggccaccacgccguccccaacggcacccucgucaagaccaucaccaacgaccagaucgaggucaccaacgccaccgagcucguccaguccuccuccaccggccgcaucugcgacuccccccaccgcauccucgacggcaagaacugcacccucaucgacgcccuccucggcgacccccacugcgacggcuuccagaacgagaagugggaccucuucgucgagcgcuccaaggccuacuccaacugcuaccccuacgacguccccgacuacgccucccuccgcucccucgucgccuccuccggcacccucgaguucaucaacgaggacuucaacuggaccggcgucacccaguccggcggcuccuacgccugcaagcgcggcuccgucaacuccuucuucucccgccucaacuggcuccacgaguccgaguacaaguaccccgcccucaacgucaccaugcccaacaacggcaaguucgacaagcucuacaucuggggcguccaccaccccuccaccgaccgcgagcagaccaaccucuacguccgcgccuccggccgcgucaccgucuccaccaagcgcucccagcagaccgucauccccaacaucggcucccgccccuggguccgcggccucuccucccgcaucuccaucuacuggaccaucgucaagcccggcgacauccuccucaucaacuccaccggcaaccucaucgccccccgcggcuacuucaagauccgcaccggcaaguccuccaucaugcgcuccgacgcccccaucggcaccugcuccuccgagugcaucacccccaacggcuccauccccaacgacaagcccuuccagaacgucaacaagaucaccuacggcgccugcccccgcuacgucaagcagaacacccucaagcucgccaccggcaugcgcaacguccccgagaagcagacccgcggcaucuucggcgccaucgccggcuucaucgagaacggcugggagggcauggucgacggcugguacggcuuccgccaccagaacuccgagggcaccggccaggccgccgaccucaaguccacccaggccgccaucgaccagaucaacggcaagcucaaccgccucaucgagaagaccaacgagaaguuccaccagaucgagaaggaguucuccgaggucgagggccgcauccaggaccucgagaaguacgucgaggacaccaagaucgaccucugguccuacaacgccgagcuccucgucgcccucgagaaccagcacaccaucgaccucaccgacuccgagaugaacaagcucuucgagaagacccgcaagcagcuccgcgagaacgccgaggacaugggcaacggcugcuucaagaucuaccacaagugcgacaacgccugcaucggcuccauccgcaacggcaccuacgaccacgacgucuaccgcgacgaggcccucaacaaccgcuuccagaucaagggcgucgagcucaaguccggcuacaaggacuggauccucuggaucuccuucgccaucuccugcuuccuccucugcgucguccuccucggcuucaucaugugggccugccagaagggcaacauccgcugcaacaucugcaucuga

SEQ ID NO: 96940 - RNA, 1698 nt, Artificial Sequence
  derived and/or modified CDS sequence (opt2) from hemagglutinin__InfluenzaA__ABF47561
augaaggccaagcuccucguccuccucugcaccuucaccgccaccuacgccgacaccaucugcaucggcuaccacgccaacaacuccaccgacaccgucgacaccguccucgagaagaacgucaccgucacccacuccgucaaccuccucgaggacucccacaacggcaagcucugccuccucaagggcaucgccccccuccagcucggcaacugcuccgucgccggcuggauccucggcaaccccgagugcgagcuccucaucuccaaggaguccugguccuacaucgucgagacccccaaccccgagaacggcaccugcuaccccggcuacuucgccgacuacgaggagcuccgcgagcagcucuccuccgucuccuccuucgagcgcuucgagaucuuccccaagggcuccuccuggcccaaccacaccgucaccggcgucuccgccuccugcucccacaacggcaaguccuccuucuaccgcaaccuccucuggcucaccggcaagaacggccucuaccccaagcucuccauguccuacgucaacaacaaggagaaggagguccucguccucuggggcguccaccacccccccaacaucggcgaccagcgcgcccucuaccacaccgagaacgccuacgucuccgucgucuccucccacuacucccgccgcuucacccccgagaucgccaagcgccccaagguccgcgaccaggagggccgcaucaacuacuacuggacccuccucgagcccggcgacaccaucaucuucgaggccaacggcaaccucaucgcccccugguacgccuucgcccucucccgcggcuucggcuccggcaucaucaccuccaacgcccccaugggcgagugcgacgccaagugccagaccccccagggcgccaucaacuccucccuccccuuccagaacguccaccccgucaccaucggcgagugccccaaguacguccgcuccgccaagcuccgcauggucaccggccuccgcaacauccccuccauccagucccgcggccucuucggcgccaucgccggcuucaucgagggcggcuggaccggcauggucgacggcugguacggcuaccaccaccagaacgagcagggcuccggcuacgccgccgaccagaaguccacccagaacgccaucaacggcaucaccaacaaggucaacuccgucaucgagaagaugaacacccaguucaccgccgucggcaaggaguucaacaagcucgagcgccgcauggagaaccucaacaagaaggucgacgacggcuuccucgacaucuggaccuacaacgccgagcuccucguccuccucgagaacgagcgcacccucgacuuccacgacuccaacgucaagaaccucuacgagaaggucaagucccagcucaagaacaacgccaaggagaucggcaacggcugcuucgaguucuaccacaagugcaacaacgagugcauggaguccgucaagaacggcaccuacgacuaccccaaguacuccgaggaguccaagcucaaccgcgagaagaucgacggcgucaagcucgaguccaugggcgucuaccagauccucgccaucuacuccaccgucgccuccucccucguccuccucgucucccucggcgccaucuccuucuggaugugcuccaacggcucccuccagugccgcaucugcaucuga

SEQ ID NO: 96941 - RNA, 1698 nt, Artificial Sequence
  derived and/or modified CDS sequence (opt2) from hemagglutinin__InfluenzaA__ABF47572
augaaggccaagcuccucguccuccucugcaccuucaccgccaccuacgccgacaccaucugcaucggcuaccacgccaacaacuccaccgacaccgucgacaccguccucgagaagaacgucaccgucacccacuccgucaaccuccucgaggacucccacaacggcaagcucugccuccucaagggcaucgccccccuccagcucggcaacugcuccgucgccggcuggauccucggcaaccccgagugcgagcuccucaucuccaaggaguccugguccuacaucgucgagacccccaaccccgagaacggcaccugcuaccccggcuacuucgccgacuacgaggagcuccgcgagcagcucuccuccgucuccuccuucgagcgcuucgagaucuuccccaagggcuccuccuggcccaaccacaccgucaccggcgucuccgccuccugcucccacaacggcaaguccuccuucuaccgcaaccuccucuggcucaccggcaagaacggccucuaccccaaccucuccauguccuacgucaacaacaaggacaaggagguccucguccucuggggcguccaccacccccccaacaucggcgaccagcgcgcccucuaccacaccgagaacgccuacgucuccgucgucuccucccacuacucccgccgcuucacccccgagaucgccaagcgccccaagguccgcgaccaggagggccgcaucaacuacuacuggacccuccucgagcccggcgacaccaucaucuucgaggccaacggcaaccucaucgcccccugguacgccuucgcccucucccgcggcuucggcuccggcaucaucaccuccaacgcccccaugggcgagugcgacgccaagugccagaccccccagggcgccaucaacuccucccuccccuuccagaacguccaccccgucaccaucggcgagugccccaaguacguccgcuccgccaagcuccgcauggucaccggccuccgcaacauccccuccauccagucccgcggccucuucggcgccaucgccggcuucaucgagggcggcuggaccggcauggucgacggcugguacggcuaccaccaccagaacgagcagggcuccggcuacgccgccgaccagaaguccacccagaacgccaucaacggcaucaccaacaaggucaacuccgucaucgagaagaugaacacccaguucaccgccgucggcaaggaguucaacaagcucgagcgccgcauggagaaccucaacaagaaggucgacgacggcuuccucgacaucuggaccuacaacgccgagcuccucguccuccucgagaacgagcgcacccucgacuuccacgacuccaacgucaagaaccucuacgagaaggucaagucccagcucaagaacaacgccaaggagaucggcaacggcugcuucgaguucuaccacaagugcaacaacgagugcauggaguccgucaagaacggcaccuacgacuaccccaaguacuccgaggaguccaagcucaaccgcgagaagaucgacggcgucaagcucgaguccaugggcgucuaccagauccucgccaucuacuccaccgucgccuccucccucguccuccucgucucccucggcgccaucuccuucuggaugugcuccaacggcucccuccagugccgcaucugcaucuga

SEQ ID NO: 96942 - RNA, 1698 nt, Artificial Sequence; identical to SEQ ID NO: 96836
  derived and/or modified CDS sequence (opt2) from hemagglutinin__InfluenzaA__ABF47583

SEQ ID NO: 96943 - RNA, 1701 nt, Artificial Sequence
  derived and/or modified CDS sequence (opt2) from hemagglutinin__InfluenzaA__ABF47594
augaagaccaucaucgcccucuccuacauccucugccucgucuucgcccagaagcuccccggcaacgacaacuccaccgccacccucugccucggccaccacgccguccccaacggcacccucgucaagaccaucaccaacgaccagaucgaggucaccaacgccaccgagcucguccaguccuccuccaccggccgcaucugcgacuccccccaccgcauccucgacggcaagaacugcacccucaucgacgcccuccucggcgacccccacugcgacggcuuccagaacaaggagugggaccucuucgucgagcgcuccaaggccuacuccaacugcuaccccuacgacguccccgacuacgccucccuccgcucccucgucgccuccuccggcacccucgaguucaacaacgaguccuucaacuggaccggcgucgcccagaacggcaccuccuacgccugcaagcgccgcuccgucaaguccuucuucucccgccucaacuggcuccacaagcucgaguacaaguaccccgcccagaacgucaccaugcccaacaacgacaaguucgacaagcucuacaucuggggcguccaccaccccuccaccgacuccgaccagaccucccucuacguccaggccuccggccgcgucaccgucuccaccaagcgcucccagcagaccgucauccccaacaucggcucccgccccuggguccgcggcgucuccucccgcaucuccaucuacuggaccaucgucaagcccggcgacauccuccucaucaacuccaccggcaaccucaucgccccccgcggcuacuucaagauccgcuccggcaaguccuccaucaugcgcuccgacgcccccaucggcaacugcaacuccgagugcaucacccccaacggcuccauccccaacgacaagcccuuccagaacgucaaccgcaucaccuacggcgccugcccccgcuacgucaagcagaacacccucaagcucgccaccggcaugcgcaacguccccgagaagcagacccgcggcaucuucggcgccaucgccggcuucaucgagaacggcugggagggcauggucgacggcugguacggcuuccgccaccagaacuccgagggcaccggccaggccgccgaccucaaguccacccaggccgccaucaaccagaucaacggcaagcucaaccgccucaucgagaagaccaacgagaaguuccaccagaucgagaaggaguucuccgaggucgagggccgcauccaggaccucgagaaguacgucgaggacaccaagaucgaccucugguccuacaacgccgagcuccucgucgcccucgagaaccagcacaccaucgaccucaccgacuccgagaugaacaagcucuucgagcgcacccgcaagcagcuccgcgagaacgccgaggacaugggcaacggcugcuucaagaucuaccacaagugcgacaacgccugcaucggcuccauccgcaacggcaccuacgaccacgacgucuaccgcgacgaggcccucaacaaccgcuuccagaucaagggcgucgagcucaaguccggcuacaaggacuggauccucuggaucuccuucgccaucuccugcuuccuccucugcgucguccuccucggcuucaucaugugggccugccagaagggcaacauccgcugcaacaucugcaucuga

SEQ ID NO: 96944 - RNA, 1701 nt, Artificial Sequence
  derived and/or modified CDS sequence (opt2) from hemagglutinin__InfluenzaA__ABF47605
augaaggccaagcuccucguccuccucugcgccuucaccgccaccuacgccgacaccaucugcaucggcuaccacgccaacaacuccaccgacaccgucgacaccguccucgagaagaacgucaccgucacccacuccgucaaccuccucgaggacucccacaacggcaagcucugccgccucaagggcaccgccccccuccagcucggcaacugcuccgucgccggcuggauccucggcaaccccgagugcgagucccucuucuccaaggaguccugguccuacaucgccgagacccccaaccccgagaacggcaccugcuaccccggcuacuucgccgacuacgaggagcuccgcgagcagcucuccuccgucuccuccuucgagcgcuucgagaucuuccccaaggaguccuccuggcccaaccacaccgucaccaagggcgucaccgccuccugcucccacaacggcaaguccuccuucuacaagaaccuccucuggcucaccgagaagaacggccucuaccccaaccucuccaaguccuacgucaacaacaaggagaaggagguccucguccucuggggcguccaccaccccuccaacaucggcgaccagcgcgccaucuaccacaccgagaacgccuacgucuccgucgucuccucccacuacucccgccgcuucacccccgagaucgccaagcgccccaagguccgcgaccaggagggccgcaucaacuacuacuggacccuccucgagcccggcgacaccaucaucuucgaggccuccggcaaccucaucgcccccugguacgccuucgcccucucccgcggcuucggcuccggcaucaucaccuccaacgccuccaugggcgagugcgacgccaagugccagaccccccagggcgccaucaacuccucccuccccuuccagaacguccaccccgucaccaucggcgagugccccaaguacguccgcuccaccaagcuccgcauggucaccggccuccgcaacauccccuccauccagucccgcggccucuucggcgccaucgccggcuucaucgagggcggcuggaccggcaugaucgacggcugguacggcuaccaccaccagaacgagcagggcuccggcuacgccgccgacaagaaguccacccagaacgccaucgacggcaucaccaacaaggucaacuccgucaucgagaagaugaacacccaguucaccgccgucggcaaggaguucaacaagcucgagcgccgcaucgagaaccucaacaagaaggucgacgacggcuuccucgacaucuggaccuacaacgccgagcuccucguccuccucgagaacgagcgcacccucgacuuccacgacuccaacgucaagaaccucuacgagaaggucaagaaccagcucaagaacaacgccaaggagaucggcaacggcugcuucgaguucuaccacaagugcaacaacgagugcauggaguccgucaagaacggcaccuacgacuaccccaaguacuccgaggaguccaagcucaagcgcgagaagaucgacggcgucaagcucgaguccaugggcgucuaccagauccucgccaucuacuccaccgucgccuccucccucguccuccucgucucccucggcgccaucuccuucuggaugugcuccaacggcucccuccagugccgcaucugcaucuga

SEQ ID NO: 96945 - RNA, 1701 nt, Artificial Sequence; identical to SEQ ID NO: 96929
  derived and/or modified CDS sequence (opt2) from hemagglutinin__InfluenzaA__ABF47616

SEQ ID NO: 96946 - RNA, 1701 nt, Artificial Sequence
  derived and/or modified CDS sequence (opt2) from hemagglutinin__InfluenzaA__ABF47627
augaaggccaagcuccucguccuccucugcgccuucaccgccaccuacgccgacaccaucugcaucggcuaccacgccaacaacuccaccgacaccgucgacaccguccucgagaagaacgucaccgucacccacuccgucaaccuccucgaggacucccacaacggcaagcucugccgccucaagggcaccgccccccuccagcucggcaacugcuccgucgccggcuggauccucggcaaccccgagugcgagucccucuucuccaaggaguccugguccuacaucgccgagacccccaaccccgagaacggcaccugcuaccccggcuacuucgccgacuacgaggagcuccgcgagcagcucuccuccgucuccuccuucgagcgcuucgagaucuuccccaaggaguccuccuggcccaaccacaccgucaccaagggcgucaccgccuccugcucccacaacggcaaguccuccuucuacaagaaccuccucuggcucaccgagaagaacggccucuaccccaaccucuccaaguccuacgucaacaacaaggagaaggagguccucguccucuggggcguccaccaccccuccaacaucggcgaccagcgcgccaucuaccacaccgagaacgccuacgucuccgucgucuccucccacuacucccgccgcuucacccccgagaucgccaagcgccccaagguccgcgaccaggagggccgcaucaacuacuacuggacccuccucgagcccggcgacaccaucaucuucgaggccaacggcaaccucaucgcccccugguacgccuucgcccucucccgcggcuucggcuccggcaucaucaccuccaacgccuccaugggcgacugcgacgccaagugccagaccccccagggcgccaucaacuccucccuccccuuccagaacguccaccccgucaccaucggcgagugccccaaguacguccgcuccaccaagcuccgcauggucaccggccuccgcaacauccccuccauccagucccgcggccucuucggcgccaucgccggcuucaucgagggcggcuggaccggcaugaucgacggcugguacggcuaccaccaccagaacgagcagggcuccggcuacgccgccgacaagaaguccacccagaacgccaucgacggcaucaccaacaaggucaacuccgucaucgagaagaugaacacccaguucaccgccgucggcaaggaguucaacaagcucgagcgccgcauggagaaccucaacaagaaggucgacgacggcuuccucgacaucuggaccuacaacgccgagcuccucguccuccucgagaacgagcgcacccucgacuuccacgacuccaacgucaagaaccucuacgagaaggucaagaaccagcucaagaacaacgccaaggagaucggcaacggcugcuucgaguucuaccacaagugcaacaacgagugcauggaguccgucaagaacggcaccuacgacuaccccaaguacuccgaggaguccaagcucaagcgcgagaagaucgacggcgucaagcucgaguccaugggcgucuaccagauccucgccaucuacuccaccgucgccuccucccucguccuccucgucucccucggcgccaucuccuucuggaugugcuccaacggcucccuccagugccgcaucugcaucuga

SEQ ID NO: 96947 - RNA, 1701 nt, Artificial Sequence
  derived and/or modified CDS sequence (opt2) from hemagglutinin__InfluenzaA__ABF47638
augaaggccaagcuccucguccuccucugcgccuucaccgccaccuacgccgacaccaucugcaucggcuaccacgccaacaacuccaccgacaccgucgacaccguccucgagaagaacgucaccgucacccacuccgucaaccuccucgaggacucccacaacggcaagcucugccgccucaagggcaccgccccccuccagcucggcaacugcuccgucgccggcuggauccucggcaaccccgagugcgagucccucuucuccaaggaguccugguccuacaucgccgagacccccaaccccgagaacggcaccugcuaccccggcuacuucgccgacuacgaggagcuccgcgagcagcucuccuccgucuccuccuucgagcgcuucgagaucuuccccaaggaguccuccuggcccaaccacaccgucaccaagggcgucaccgccuccugcucccacaacggcaaguccuccuucuacaagaaccuccucuggcucaccgagaagaacggccucuaccccaaccucuccaaguccuacgucaacaacaaggagaaggagguccucguccucuggggcguccaccaccccuccaacaucggcgaccagcgcgccaucuaccacaccgagaacgccuacgucuccgucgucuccucccacuacucccgccgcuucacccccgagaucaccaagcgccccaagguccgcgaccaggagggccgcaucaacuacuacuggacccuccucgagcccggcgacaccaucaucuucgaggccaacggcaaccucaucgcccccugguacgccuucgcccucucccgcggcuucggcuccggcaucaucaccuccaacgccuccaugggcgagugcgacgccaagugccagaccccccagggcgccaucaacuccucccuccccuuccagaacguccaccccgucaccaucggcgagugccccaaguacguccgcuccaccaagcuccgcauggucaccggccuccgcaacauccccuccauccagucccgcggccucuucggcgccaucgccggcuucaucgagggcggcuggaccggcaugaucgacggcugguacggcuaccaccaccagaacgagcagggcuccggcuacgccgccgaccagaaguccacccagaacgccaucgacggcaucaccaacaaggucaacuccgucaucgagaagaugaacacccaguucaccgccgucggcaaggaguucaacaagcucgagcgccgcauggagaaccucaacaagaaggucgacgacggcuuccucgacaucuggaccuacaacgccgagcuccucguccuccucgagaacgagcgcacccucgacuuccacgacuccaacgucaagaaccucuacgagaaggucaagacccagcucaagaacaacgccaaggagaucggcaacggcugcuucgaguucuaccacaagugcaacaacgagugcauggaguccgucaagaacggcaccuacgacuaccccaaguacuccgaggaguccaagcucaaccgcgagaagaucgacggcgucaagcucgaguccaugggcgucuaccagauccucgccaucuacuccaccgucgccuccucccucguccuccucgucucccucggcgccaucuccuucuggaugugcuccaacggcucccuccagugccgcaucugcaucuga

SEQ ID NO: 96948 - RNA, 1701 nt, Artificial Sequence; identical to SEQ ID NO: 96947
  derived and/or modified CDS sequence (opt2) from hemagglutinin__InfluenzaA__ABF47649

SEQ ID NO: 96949 - RNA, 1701 nt, Artificial Sequence
  derived and/or modified CDS sequence (opt2) from hemagglutinin__InfluenzaA__ABF47660
augaaggccaagcuccucguccuccucugcgccuucaccgccaccuacgccgacaccaucugcaucggcuaccacgccaacaacuccaccgacaccgucgacaccguccucgagaagaacgucaccgucacccacuccgucaaccuccucgaggacucccacaacggcaagcucugccgccucaagggcaccgccccccuccagcucggcaacugcuccgucgccggcuggauccucggcaaccccgagugcgagucccucuucuccaaggaguccugguccuacaucgccgagacccccaaccccgagaacggcaccugcuaccccggcuacuucgccgacuacgaggagcuccgcgagcagcucuccuccgucuccuccuucgagcgcuucgagaucuuccccaaggaguccuccuggcccaaccacaccgucaccaagggcgucaccgccuccugcucccacaacggcaaguccuccuucuacaagaaccuccucuggcucaccgagaagaacggccucuaccccaaccucuccaaguccuacgucaacaacaaggagaaggagguccucguccucuggggcauccaccaccccuccaacaucggcgaccagcgcgccaucuaccacaccgagaacgccuacgucuccgucgucuccucccacuacucccgccgcuucacccccgagaucgccaagcgccccaagguccgcgaccaggagggccgcaucaacuacuacuggacccuccucgagcccggcgacaccaucaucuucgaggccaacggcaaccucaucgcccccugguacgccuucgcccucucccgcggcuucggcuccggcaucaucaccuccaacgccuccaugggcgacugcgacgccaagugccagaccccccagggcgccaucaacuccucccuccccuuccagaacguccaccccgucaccaucggcgagugccccaaguacguccgcuccaccaagcuccgcauggucaccggccuccgcaacauccccuccauccagucccgcggccucuucggcgccaucgccggcuucaucgagggcggcuggaccggcaugaucgacggcugguacggcuaccaccaccagaacgagcagggcuccggcuacgccgccgacaagaaguccacccagaacgccaucgacggcaucaccaacaaggucaacuccgucaucgagaagaugaacacccaguucaccgccgucggcaaggaguucaacaagcucgagcgccgcauggagaaccucaacaagaaggucgacgacggcuuccucgacaucuggaccuacaacgccgagcuccucguccuccucgagaacgagcgcacccucgacuuccacgacuccaacgucaagaaccucuacgagaaggucaagacccagcucaagaacaacgccaaggagaucggcaacggcugcuucgaguucuaccacaagugcaacaacgagugcauggaguccgucaagaacggcaccuacgacuaccccaaguacuccgaggaguccaagcucaagcgcgagaagaucgacggcgucaagcucgaguccaugggcgucuaccagauccucgccaucuacuccaccgucgccuccucccucguccuccucgucucccucggcgccaucuccuucuggaugugcuccaacggcucccuccagugccgcaucugcaucuga

SEQ ID NO: 96950 - RNA, 1698 nt, Artificial Sequence
  derived and/or modified CDS sequence (opt2) from hemagglutinin__InfluenzaA__ABF47671
augaaggccaagcuccucguccuccucugcaccuucaccgccaccuacgccgacaccaucugcaucggcuaccacgccaacaacuccaccgacaccgucgacaccguccucgagaagaacgucaccgucacccacuccgucaaccuccucgaggacucccacaacggcaagcucugccuccucaagggcaucgccccccuccagcucggcaacugcuccgucgccggcuggauccucggcaaccccgagugcgagcuccucaucuccaaggaguccugguccuacaucgucgagacccccaaccccgagaacggcaccugcuaccccggcuacuucgccgacuacgaggagcuccgcgagcagcucuccuccgucuccuccuucgagcgcuucgagaucuuccccaagggcuccuccuggcccaaccacaccgucaccggcgucuccgccuccugcucccacaacggcaaguccuccuucuaccgcaaccuccucuggcucaccggcaagaacggccucuaccccaaccucuccauguccuacgucaacaacaaggagaaggagguccucguccucuggggcguccaccacccccccaacaucggcgaccagcgcgcccucuaccacaccgagaacgccuucgucuccgucgucuccucccacuacucccgccgcuucacccccgagaucgccaagcgccccaagguccgcgaccaggagggccgcaucaacuacuacuggacccuccucgagcccggcgacaccaucaucuucgaggccaacggcaaccucaucgcccccugguacgccuucgcccucucccgcggcuucggcuccggcaucaucaccuccaacgcccccauggacgagugcgacgccaagugccagaccccccagggcgccaucaacuccucccuccccuuccagaacguccaccccgucaccaucggcgagugccccaaguacguccgcuccgccaagcuccgcauggucaccggccuccgcaacauccccuccauccagucccgcggccucuucggcgccaucgccggcuucaucgagggcggcuggaccggcauggucgacggcugguacggcuaccaccaccagaacgagcagggcuccggcuacgccgccgaccagaaguccacccagaacgccaucaacggcaucaccaacaaggucaacuccgucaucgagaagaugaacacccaguucaccgccgucggcaaggaguucaacaagcucgagcgccgcauggagaaccucaacaagaaggucgacgacggcuuccucgacaucuggaccuacaacgccgagcuccucguccuccucgagaacgagcgcacccucgacuuccacgacuccaacgucaagaaccucuacgagaaggucaagucccagcucaagaacaacgccaaggagaucggcaacggcugcuucgaguucuaccacaagugcaacaacgagugcauggaguccgucaagaacggcaccuacgacuaccccaaguacuccgaggaguccaagcucaaccgcgagaagaucgacggcgucaagcucgaguccaugggcgucuaccagauccucgccaucuacuccaccgucgccuccucccucguccuccucgucucccucggcgccaucuccuucuggaugugcuccaacggcucccuccagugccgcaucugcaucuga

SEQ ID NO: 96951 - RNA, 1701 nt, Artificial Sequence
  derived and/or modified CDS sequence (opt2) from hemagglutinin__InfluenzaA__ABF47693
augaaggccaagcuccucguccuccucugcgcccucuccgccaccgacgccgacaccaucugcaucggcuaccacgccaacaacuccaccgacaccgucgacaccguccucgagaagaacgucaccgucacccacuccgucaaccuccucgaggacucccacaacggcaagcucugccgccucaagggcaucgccccccuccagcucggcaagugcaacaucgccggcuggauccucggcaaccccgagugcgagucccucuucuccaagaaguccugguccuacaucgccgagacccccaacuccgagaacggcaccugcuaccccggcuacuucgccgacuacgaggagcuccgcgagcagcucuccuccgucuccuccuucgagcgcuucgagaucuuccccaaggagcgcuccuggcccaagcacaacgucacccgcggcgucaccgccuccugcucccacaagggcaaguccuccuucuaccgcaaccuccucuggcucaccgagaagaacggcuccuaccccaaccucuccaaguccuacgucaacaacaaggagaaggagguccucguccucuggggcguccaccaccccuccaacaucgaggaccagaagaccaucuaccgcaaggagaacgccuacgucuccgucgucuccuccaacuacaaccgccgcuucacccccgagaucgccgagcgccccaagguccgcggccaggccggccgcaucaacuacuacuggacccuccucgagcccggcgacaccaucaucuucgaggccaacggcaaccucaucgcccccuggcacgccuucgcccucaaccgcggcuucggcuccggcaucaucaccuccaacgccuccauggacgagugcgacaccaagugccagaccccccagggcgccaucaacuccucccuccccuuccagaacauccaccccgucaccaucggcgagugccccaaguacguccgcuccaccaagcuccgcauggucaccggccuccgcaacauccccuccauccagucccgcggccucuucggcgccaucgccggcuucaucgagggcggcuggaccggcaugaucgacggcugguacggcuaccaccaccagaacgagcagggcuccggcuacgccgccgaccagaaguccacccagaacgccaucaacggcaucaccaacaaggucaacuccgucaucgagaagaugaacacccaguucaccgccgucggcaaggaguucaacaagcucgagaagcgcauggagaaccucaacaagaaggucgacgacggcuuccucgacaucuggaccuacaacgccgagcuccucguccuccucgagaacgagcgcacccucgacuuccacgacuccaacgucaagaaccucuacgagaaggucaagucccagcucaagaacaacgccaaggagaucggcaacggcugcuucgaguucuaccacaagugcaacaacgagugcauggaguccgucaagaacggcaccuacgacuaccccaaguacuccgaggaguccaagcucaaccgcgagaagaucgacggcgucaagcucgaguccaugggcgucuaccagauccucgccaucuacuccaccgucgccuccucccucguccuccucgucucccucggcgccaucuccuucuggaugugcuccaacggcucccuccagugccgcaucugcaucuga

SEQ ID NO: 96952 - RNA, 1701 nt, Artificial Sequence; identical to SEQ ID NO: 96951
  derived and/or modified CDS sequence (opt2) from hemagglutinin__InfluenzaA__ABF47704

SEQ ID NO: 96953 - RNA, 1701 nt, Artificial Sequence
  derived and/or modified CDS sequence (opt2) from hemagglutinin__InfluenzaA__ABF47715
augaaggccaagcuccucguccuccucugcgcccucuccgccaccgacgccgacaccaucugcaucggcuaccacgccaacaacuccaccgacaccgucgacaccguccucgagaagaacgucaccgucacccacuccgucaaccuccucgaggacucccacaacggcaagcucugccgccucaagggcaucgccccccuccagcucggcaagugcuccaucgccggcuggauccucggcaaccccgagugcgagucccucuucuccaagaaguccugguccuacaucgccgagacccccaacuccgagaacggcaccugcuaccccggcuacuucgccgacuacgaggagcuccgcgagcagcucuccuccgucuccuccuucgagcgcuucgagaucuuccccaaggagcgcuccuggcccaagcacaacgucacccgcggcgucaccgccuccugcucccacaagggcaaguccuccuucuaccgcaaccuccucuggcucaccgagaagaacggcuccuaccccaaccucuccaaguccuacgucaacaacaaggagaaggagguccucguccucuggggcguccaccaccccuccaacaucgaggaccagaagaccaucuaccgcaaggagaacgccuacgucuccgucgucuccuccaacuacaaccgccgcuucacccccgagaucgccgagcgccccaagguccgcggccaggccggccgcaucaacuacuacuggacccuccucgagcccggcgacaccaucaucuucgaggccaacggcaaccucaucgcccccuggcacgccuucgcccucaaccgcggcuucggcuccggcaucaucaccuccaacgccuccauggacgagugcgacaccaagugccagaccccccagggcgccaucaacuccucccuccccuuccagaacauccaccccgucaccaucggcgagugccccaaguacguccgcuccaccaagcuccgcauggucaccggccuccgcaacauccccuccauccagucccgcggccucuucggcgccaucgccggcuucaucgagggcggcuggaccggcaugaucgacggcugguacggcuaccaccaccagaacgagcagggcuccggcuacgccgccgaccagaaguccacccagaacgccaucaacggcaucaccaacaaggucaacuccgucaucgagaagaugaacacccaguucaccgccgucggcaaggaguucaacaagcucgagaagcgcauggagaaccucaacaagaaggucgacgacggcuuccucgacaucuggaccuacaacgccgagcuccucguccuccucgagaacgagcgcacccucgacuuccacgacuccaacgucaagaaccucuacgagaaggucaagucccagcucaagaacaacgccaaggagaucggcaacggcugcuucgaguucuaccacaagugcaacaacgagugcauggaguccgucaagaacggcaccuacgacuaccccaaguacuccgaggaguccaagcucaaccgcgagaagaucgacggcgucaagcucgaguccaugggcgucuaccagauccucgccaucuacuccaccgucgccuccucccucguccuccucgucucccucggcgccaucuccuucuggaugugcuccaacggcucccuccagugccgcaucugcaucuga

SEQ ID NO: 96954 - RNA, 1701 nt, Artificial Sequence; identical to SEQ ID NO: 96951
  derived and/or modified CDS sequence (opt2) from hemagglutinin__InfluenzaA__ABF47726

SEQ ID NO: 96955 - RNA, 1701 nt, Artificial Sequence; identical to SEQ ID NO: 96951
  derived and/or modified CDS sequence (opt2) from hemagglutinin__InfluenzaA__ABF47737

SEQ ID NO: 96956 - RNA, 1701 nt, Artificial Sequence
  derived and/or modified CDS sequence (opt2) from hemagglutinin__InfluenzaA__ABF47748
augaaggccaagcuccucguccuccucugcgcccucuccgccaccgacgccgacaccaucugcaucggcuaccacgccaacaacuccaccgacaccgucgacaccguccucgagaagaacgucaccgucacccacuccgucaaccuccucgaggacucccacaacggcaagcucugccgccucaagggcaucgccccccuccagcucggcaagugcuccaucgccggcuggauccucggcaaccccgagugcgagucccucuucuccaagaaguccugguccuacaucgccgagacccccaacuccgagaacggcaccugcuaccccggcuacuucgccgacuacgaggagcuccgcgagcagcucuccuccgucuccuccuucgagcgcuucgagaucuuccccaaggaguccuccuggcccaagcacaacgucacccgcggcgucaccgccuccugcucccacaagggcaaguccuccuucuaccgcaaccuccucuggcucaccgagaagaacggcuccuaccccaaccucuccaaguccuacgucaacaacaaggagaaggagguccucguccucuggggcguccaccaccccuccaacaucgaggaccagaagaccaucuaccgcaaggagaacgccuacgucuccgucgucuccucccacuacaaccgccgcuucacccccgagaucgccaagcgccccaagguccgcgaccaggagggccgcaucaacuacuacuggacccuccucgagcccggcgacaccaucaucuucgaggccaacggcaaccucaucgcccccugguacgccuucgcccucucccgcggcuucggcuccggcaucaucaccuccaacgccuccauggacgagugcgacgccaagugccagaccccccagggcgccaucaacuccucccuccccuuccagaacguccaccccgucaccaucggcgagugccccaaguacguccgcuccaccaagcuccgcauggucaccggccuccgcaacauccccuccauccagucccgcggccucuucggcgccaucgccggcuucaucgagggcggcuggaccggcaugaucgacggcugguacggcuaccaccaccagaacgagcagggcuccggcuacgccgccgaccagaaguccacccagaacgccaucaacggcaucaccaacaaggucaacuccgucaucgagaagaugaacacccaguucaccgccgucggcaaggaguucaacaagcucgagaagcgcauggagaaccucaacaagaaggucgacgacggcuuccucgacaucuggaccuacaacgccgagcuccucguccuccucgagaacgagcgcacccucgacuuccacgacuccaacgucaagaaccucuacgagaaggucaagucccagcucaagaacaacgccaaggagaucggcaacggcugcuucgaguucuaccacaagugcaacaacgagugcauggaguccgucaagaacggcaccuacgacuaccccaaguacuccgaggaguccaagcucaaccgcgagaagaucgacggcgucaagcucgaguccaugggcgucuaccagauccucgccaucuacuccaccgucgccuccucccucguccuccucgucucccucggcgccaucuccuucuggaugugcuccaacggcucccuccagugccgcaucugcaucuga

SEQ ID NO: 96957 - RNA, 1701 nt, Artificial Sequence
  derived and/or modified CDS sequence (opt2) from hemagglutinin__InfluenzaA__ABF47770
augaaggccaagcuccucguccuccucugcgcccucuccgccaccgacgccgacaccaucugcaucggcuaccacgccaacaacuccaccgacaccgucgacaccguccucgagaagaacgucaccgucacccacuccgucaaccuccucgaggacaaccacaacggcaagcucugcaagcucaagggcaucgccccccuccagcucggcaagugcuccaucgccggcuggauccucggcaaccccgagugcgagucccucuucuccaagaaguccugguccuacaucgccgagacccccaacuccgagaacggcaccugcuaccccggcuacuucgccgacuacgaggagcuccgcgagcagcucuccuccgucuccuccuucgagcgcuucgagaucuuccccaaggaguccuccuggcccaagcacaacgucaccaagggcgucaccgccuccugcucccacaagggcaaguccuccuucuaccgcaaccuccucuggcucaccgagaagaacggcuccuaccccaaccucuccaaguccuacgucaacaacaaggagaaggagguccucguccucuggggcguccaccaccccuccaacaucgaggaccagaagaccaucuaccgcaaggagaacgccuacgucuccgucgucuccucccacuacaaccgccgcuucacccccgagaucgccaagcgccccaagguccgcaaccaggagggccgcaucaacuacuacuggacccuccucgagcccggcgacaccaucaucuucgaggccaacggcaaccucaucgcccccugguacgccuucgcccucucccgcggcuucggcuccggcaucaucaccuccaacgccuccauggacgagugcgacgccaagugccagaccccccagggcgccaucaacuccucccuccccuuccagaacguccaccccgucaccaucggcgagugccccaaguacguccgcuccaccaagcuccgcauggucaccggccuccgcaacauccccuccauccagucccgcggccucuucggcgccaucgccggcuucaucgagggcggcuggaccggcaugaucgacggcugguacggcuaccaccaccagaacgagcagggcuccggcuacgccgccgaccagaaguccacccagaacgccaucaacggcaucaccaacaaggucaacuccaucaucgagaagaugaacacccaguucaccgccgucggcaaggaguucaacaagcucgagaagcgcauggagaaccucaacaagaaggucgacgacggcuuccucgacaucuggaccuacaacgccgagcuccucguccuccucgagaacgagcgcacccucgacuuccacgacuccaacgucaagaaccucuacgagaaggucaagucccagcucaagaacaacgccaaggagaucggcaacggcugcuucgaguucuaccacaagugcaacaacgagugcauggaguccgucaagaacggcaccuacgacuaccccaaguacuccgaggaguccaagcucaaccgcgagaagaucgacggcgucaagcucgaguccaugggcgucuaccagauccucgccaucuacuccaccgucgccuccucccucguccuccucgucucccucggcgccaucuccuucuggaugugcuccaacggcucccuccagugccgcaucugcaucuga

SEQ ID NO: 96958 - RNA, 1701 nt, Artificial Sequence; identical to SEQ ID NO: 96957
  derived and/or modified CDS sequence (opt2) from hemagglutinin__InfluenzaA__ABF47781

SEQ ID NO: 96959 - RNA, 1701 nt, Artificial Sequence; identical to SEQ ID NO: 96957
  derived and/or modified CDS sequence (opt2) from hemagglutinin__InfluenzaA__ABF47792

SEQ ID NO: 96960 - RNA, 1701 nt, Artificial Sequence; identical to SEQ ID NO: 96957
  derived and/or modified CDS sequence (opt2) from hemagglutinin__InfluenzaA__ABF47803

SEQ ID NO: 96961 - RNA, 1701 nt, Artificial Sequence; identical to SEQ ID NO: 96957
  derived and/or modified CDS sequence (opt2) from hemagglutinin__InfluenzaA__ABF47814

SEQ ID NO: 96962 - RNA, 1701 nt, Artificial Sequence; identical to SEQ ID NO: 96957
  derived and/or modified CDS sequence (opt2) from hemagglutinin__InfluenzaA__ABF47825

SEQ ID NO: 96963 - RNA, 1701 nt, Artificial Sequence; identical to SEQ ID NO: 96957
  derived and/or modified CDS sequence (opt2) from hemagglutinin__InfluenzaA__ABF47836

SEQ ID NO: 96964 - RNA, 1701 nt, Artificial Sequence; identical to SEQ ID NO: 96957
  derived and/or modified CDS sequence (opt2) from hemagglutinin__InfluenzaA__ABF47847

SEQ ID NO: 96965 - RNA, 1701 nt, Artificial Sequence
  derived and/or modified CDS sequence (opt2) from hemagglutinin__InfluenzaA__ABF47858
augaagaccaucaucgcccucuccuacauccucugccucgucuucgcccagaagcuccccggcaacgacaacggcaccgccacccucugccucggccaccacgccguccccaacggcacccucgucaagaccaucaccaacgaccagaucgaggucaccaacgccaccgagcucguccaguccuccuccaccggccgcaucugcgacuccccccaccgcauccucgacggcaagaacugcacccucaucgacgcccuccucggcgacccccacugcgacggcuuccagaacaaggagugggaccucuucgucgagcgcuccaaggccuacuccaacugcuaccccuacgacguccccgacuacgccucccuccgcucccucgucgccuccuccggcacccucgaguucaucaacgaggacuucaacuggaccggcgucgcccaggacggcaaguccuacgccugcaagcgcggcuccgucaacuccuucuucucccgccucaacuggcuccacaagcucgaguacaaguaccccgcccucaacgucaccaugcccaacaacggcaaguucgacaagcucuacaucuggggcguccaccaccccuccaccgacuccgaccagaccucccucuacguccgcgccuccggccgcgucaccgucuccaccaagcgcucccagcagaccgucauccccaacaucggcuuccgccccuggguccgcggccucuccucccgcaucuccaucuacuggaccaucgucaagcccggcgacauccuccucaucaacuccaccggcaaccucaucgccccccgcggcuacuucaagauccgcaacggcaaguccuccaucaugcgcuccgacgcccccaucggcaacugcuccuccgagugcaucacccccaacggcuccauccccaacgacaagcccuuccagaacgucaaccgcaucaccuacggcgccugcccccgcuacgucaagcagaacacccucaagcucgccaccggcaugcgcaacguccccgagaagcagacccgcggcaucuucggcgccaucgccggcuucaucgagaacggcugggagggcauggucgacggcugguacggcuuccgccaccagaacuccgagggcaccggccaggccgccgaccucaaguccacccaggccgccaucgaccagaucaacggcaagcucaaccgccucaucgagaagaccaacgagaaguuccaccagaucgagaaggaguucuccgaggucgagggccgcauccaggaccucgagaaguacgucgaggacaccaagaucgaccucugguccuacaacgccggccuccucgucgcccucgagaaccagcacaccaucgaccucaccgacuccgagaugaacaagcucuucgagcgcacccgcaagcagcuccgcgagaacgccgaggacaugggcaacggcugcuucaagaucuaccacaagugcgacaacgccugcaucggcuccauccgcaacggcaccuacgaccacgacgucuaccgcgacgaggcccucaacaaccgcuuccagaucaagggcgucgagcucaaguccggcuacaaggacuggauccucuggaucuccuucgccaucuccugcuuccuccucugcgucguccuccucggcuucaucaugugggccugccagaagggcaacauccgcugcaacaucugcaucuga

SEQ ID NO: 96966 - RNA, 1698 nt, Artificial Sequence; identical to SEQ ID NO: 96778
  derived and/or modified CDS sequence (opt2) from hemagglutinin__InfluenzaA__ABF47869

SEQ ID NO: 96967 - RNA, 1698 nt, Artificial Sequence; identical to SEQ ID NO: 96778
  derived and/or modified CDS sequence (opt2) from hemagglutinin__InfluenzaA__ABF47880

SEQ ID NO: 96968 - RNA, 1698 nt, Artificial Sequence
  derived and/or modified CDS sequence (opt2) from hemagglutinin__InfluenzaA__ABF47891
augaaggucaagcuccucguccuccucugcaccuucaccgccaccuacgccgacaccaucugcaucggcuaccacgccaacaacuccaccgacaccgucgacaccguccucgagaagaacgucaccgucacccacuccgucaaccuccucgaggacucccacaacggcaagcucugccuccucaagggcaucgccccccuccagcucggcaacugcuccgucgccggcuggauccucggcaaccccgagugcgagcuccucaucuccaaggaguccugguccuacaucgucgagacccccaaccccgagaacggcaccugcuaccccggcuacuucgccgacuacgaggagcuccgcgagcagcucuccuccgucuccuccuucgagcgcuucgagaucuuccccaaggaguccuccuggcccaaccacaccgucaccggcgucuccgccuccugcucccacaacggcaaguccuccuucuaccgcaaccuccucuggcucacccgcaagaacggccucuaccccaaccucuccaaguccuacgccaacaacaaggagaaggagguccucguccucuggggcguccaccacccccccaacaucggcgaccagcgcgcccucuaccacaccgagaacgccuacgucuccgucgucuccucccacuacucccgccgcuucacccccgagaucgccaagcgccccaagguccgcgaccaggagggccgcaucaacuacuacuggacccuccucgagcccggcgacaccaucaucuucgaggccaacggcaaccucaucgccccccgcuacgccuucgcccucucccgcggcuucggcuccggcaucaucaccuccaacgcccccauggacgagugcgacgccaagugccagaccccccagggcgccaucaacuccucccuccccuuccagaacguccaccccgucaccaucggcgagugccccaaguacguccgcuccgccaagcuccgcauggucaccggccuccgcaacauccccuccauccagucccgcggccucuucggcgccaucgccggcuucaucgagggcggcuggaccggcauggucgacggcugguacggcuaccaccaccagaacgagcagggcuccggcuacgccgccgaccagaaguccacccagaacgccaucaacggcaucaccaacaaggucaacuccgucaucgagaagaugaacacccaguucaccgccgucggcaaggaguucaacaagcucgagcgccgcauggagaaccucaacaagaaggucgacgacggcuuccucgacaucuggaccuacaacgccgagcuccucguccuccucgagaacgagcgcacccucgacuuccacgacuccaacgucaagaaccucuacgagaaggucaagucccagcucaagaacaacgccaaggagaucggcaacggcugcuucgaguucuaccacaagugcaacaacgagugcauggaguccgucaagaacggcaccuacgacuaccccaaguacuccgaggaguccaagcucaaccgcgagaagaucgacggcgucaagcucgaguccaugggcgucuaccagauccucgccaucuacuccaccgucgccuccucccucguccuccucgucucccucggcgccaucuccuucuggaugugcuccaacggcucccuccagugccgcaucugcaucuga

SEQ ID NO: 96969 - RNA, 1701 nt, Artificial Sequence
  derived and/or modified CDS sequence (opt2) from hemagglutinin__InfluenzaA__ABF47902
augaagaccaucaucgcccucuccuacauccucugccucgucuucgcccagaagcuccccggcaacgacaacuccaccgccacccucugccucggccaccacgccguccccaacggcacccucgucaagaccaucaccaacgaccagaucgaggucaccaacgccaccgagcucguccaguccuccuccaccggcggcaucugcgacuccccccaccagauccucgacggcgagaacugcacccucaucgacgcccuccucggcgacccccacugcgacggcuuccagaacaaggagugggaccucuucgucgagcgcuccaaggccuacuccaacugcuaccccuacgacguccccgacuacgccucccuccgcucccucgucgccuccuccggcacccucgaguucaacaacgaguccuucaacuggaccggcgucgcccagaacggcaccuccuccgccugcaagcgccgcuccaacaaguccuucuucucccgccucaacuggcuccaccagcucaaguacaaguaccccgcccucaacgucaccaugcccaacaacgagaaguucgacaagcucuacaucuggggcguccaccaccccuccaccgacuccgaccagaucucccucuacgcccaggcccccggccgcgucaccgucuccaccaagcgcucccagcagaccgucauccccaacaucggcucccgccccuggguccgcggcgucuccucccgcaucuccaucuacuggaccaucgucaaguccggcgacauccuccucaucaacugcaccggcaaccucaucgccccccgcggcuacuucaagauccgcuccggcaaguccuccaucaugcgcuccgacgccuccaucggcaagugcaacuccgagugcaucacccccaacggcuccauccccaacgacaagcccuuccagaacgucaaccgcaucaccuacggcgccugcccccgcuacgucaagcagaacacccucaagcucgccaccggcaugcgcaacguccccgagaagcagacccgcggcaucuucggcgccaucgccggcuucaucgagaacggcugggagggcauggucgacggcugguacggcuuccgccaccagaacuccgagggcaccggccaggccgccgaccucaaguccacccaggccgccaucaaccagaucaacggcaagcucaaccgccucaucgagaagaccaacgagaaguuccaccagaucgagaaggaguucuccgaggucgagggccgcauccaggaccucgagaaguacgucgaggacaccaagaucgaccucugguccuacaacgccgagcuccucgucgcccucgagaaccagcacaccaucgaccucaccgacuccgagaugaacaagcucuucgagcgcaccaagaagcagcuccgcgagaacgccgaggacaugggcaacggcugcuucaagaucuaccacaagugcgacaacgccugcaucggcuccauccgcaacggcaccuacgaccacgacgucuaccgcgacgaggcccucaacaaccgcuuccagaucaagggcgucgagcucaaguccggcuacaaggacuggauccucuggaucuccuucgccaucuccugcuuccuccucugcgucguccuccucggcuucaucaugugggccugccagaagggcaacauccgcugcaacaucugcaucuga

SEQ ID NO: 96970 - RNA, 1698 nt, Artificial Sequence
  derived and/or modified CDS sequence (opt2) from hemagglutinin__InfluenzaA__ABF47955
augaaggccaagcuccucguccuccucuacgccuucgucgccaccgacgccgacaccaucugcaucggcuaccacgccaacaacuccaccgacaccgucgacaccaucuucgagaagaacgucgccgucacccacuccgucaaccuccucgaggaccgccacaacggcaagcucugcaagcucaagggcaucgccccccuccagcucggcaagugcaacaucaccggcuggcuccucggcaaccccgagugcgacucccuccuccccgcccgcuccugguccuacaucgucgagacccccaacuccgagaacggcgccugcuaccccggcgacuucaucgacuacgaggagcuccgcgagcagcucuccuccgucuccucccucgagcgcuucgagaucuuccccaaggaguccuccuggcccaaccacaccuucaacggcgucaccgucuccugcucccaccgcggcaaguccuccuucuaccgcaaccuccucuggcucaccaagaagggcgacuccuaccccaagcucaccaacuccuacgucaacaacaagggcaaggagguccucguccucuggggcguccaccaccccuccuccuccgacgagcagcagucccucuacuccaacggcaacgccuacgucuccgucgccuccuccaacuacaaccgccgcuucacccccgagaucgccgcccgccccaaggucaaggaccagcacggccgcaugaacuacuacuggacccuccucgagcccggcgacaccaucaucuucgaggccaccggcaaccucaucgcccccugguacgccuucgcccucucccgcggcuucgaguccggcaucaucaccuccaacgccuccaugcacgagugcaacaccaagugccagaccccccagggcuccaucaacuccaaccuccccuuccagaacauccaccccgucaccaucggcgagugccccaaguacguccgcuccaccaagcuccgcauggucaccggccuccgcaacauccccuccauccaguaccgcggccucuucggcgccaucgccggcuucaucgagggcggcuggaccggcaugaucgacggcugguacggcuaccaccaccagaacgagcagggcuccggcuacgccgccgaccagaaguccacccagaacgccaucaaccgcaucaccaacaaggucaacuccgucaucgagaagaugaacacccaguucaccgccgucggcaaggaguucaacaaccucgagaagcgcauggagaaccucaacaagaaggucgacgacggcuuccucgacaucuggaccuacaacgccgagcuccucguccuccucgagaacgagcgcacccucgacuuccacgaccucaacgucaagaaccucuacgagaaggucaagucccagcucaagaacaacgccaaggagaucggcaacggcugcuucgaguucuaccacaagugcgacaacgagugcauggaguccguccgcaacggcaccuacgacuaccccaaguacuccgaggaguccaagcucaaccgcgagaagaucgacggcgucaagcucgaguccaugggcgucuaccagauccucgccaucuacuccaccgucgccuccucccucguccuccucgucucccucggcgccaucuccuucuggaugugcuccaacggcucccuccagugccgcaucugcaucuga

SEQ ID NO: 96971 - RNA, 1698 nt, Artificial Sequence
  derived and/or modified CDS sequence (opt2) from hemagglutinin__InfluenzaA__ABF60576
augaagaccaccaucauccucauccuccucacccacgccgucgacucccagaaccccaucuccggcaacaacaccgccacccucugccucggccaccacgccgucgccaacggcacccucgucaagaccaucaccgacgaccagaucgaggucaccaacgccaccgagcucguccaguccaccuccaucggcaagaucugcaacaaccccuaccgcguccucgacggccgcaacugcacccucaucgacgccaugcucggcgacccccacugcgacgucuuccaguacgagaacugggaccucuucaucgagcgcuccuccgccuucuccaacugcuaccccuacgacauccccgacuacgccucccuccgcuccaucgucgccuccuccggcacccucgaguucaccgccgagggcuucaccuggaccggcgucacccagaacggcggcuccggcgccugccgccgcggcuccgccgacuccuucuucucccgccucaacuggcucaccaaguccggcaacuccuaccccacccucaacgucaccaugcccaacaacgacaacuucgacaagcucuacaucuggggcauccaccaccccuccaccaacaacgagcagaccaagcucuacguccaggagcucggccgcgucaccgucuccaccaagcgcucccagcagaccaucauccccaacaucggcucccgccccggcguccgcggccaggccggccgcaucuccaucuacuggaccaucgucaagcccggcgacauccucaugaucaacuccaacggcaaccucgucgccccccgcggcuacuucaagaugcgcaccggcaaguccuccaucaugcgcuccgacgcccccaucgacaccugcugguccgagugcaucacccccaacggcuccauccccaacgacaagcccuuccagaacgucaacaaggucaccuacggcaagugccccaaguacaucaagcagaacacccucaagcucgccaccggcaugcgcaacguccccgagaagcagauccgcggcaucuucggcgccaucgccggcuucaucgagaacggcugggagggcauggucgacggcugguacggcuuccgcuaccagaacuccgagggcaccggccaggccgccgaccucaaguccacccaggccgccaucgaccagaucaacggcaagcucaaccgcgucaucgagcgcaccaacgagaaguuccaccagaucgagaaggaguucuccgaggucgagggccgcauccaggaccucgagaaguacgucgaggacaccaagaucgaccucugguccuacaacgccgagcuccucgucgcccucgagaaccagcacaccaucgaccucaccgacgccgagaugaacaagcucuucgagaagacccgccgccagcuccgcgagaacgccgaggacaugggcggcggcugcuucaagaucuaccacaagugcgacaacgccugcaucggcuccauccgcaacggcaccuacgaccacuacaucuaccgcgacgaggcccucaacaaccgcuuccagaucaagggcgucgagcucaaguccggcuacaaggacuggauccucuggaucuccuucgccaucuccugcuuccucaucugcgucguccuccucggcuucaucaugugggccugcgagaagggcaacauccgcugcaacaucugcaucuga

SEQ ID NO: 96972 - RNA, 1701 nt, Artificial Sequence
  derived and/or modified CDS sequence (opt2) from hemagglutinin__InfluenzaA__ABF60577
augaagaccaucaucguccucuccuacuucuucugccucgcccucucccaggacuacuccgaguccaacaacuccaccgccacccucugccucggccaccacgccguccccaacggcaccaucgucaagaccaucaccgacgaccagaucgaggucaccaacgccaccgagcucguccaguccuccuccaccggcaagaucugcaacaacccccaccgcauccucgacggccgcgacugcacccucaucgacgcccuccucggcgacccccacugcgacgucuuccaggacgagaccugggaccucuacgucgagcgcuccuccgccuucuccaacugcuaccccuacgacguccccgacuacgccucccuccgcucccucgucgccuccuccggcacccucgaguucaucaccgagggcuucaccuggaccggcgucacccagaacggcggcuccaacgccugcaagcgcggccccgccuccggcuucuucucccgccucaacuggcucaccaaguccggcuccaccuaccccguccucaacgucaccaugcccaacgacgacaacuucgacaagcucuacgucuggggcguccaccaccccuccaccaaccaggagcagaccgaccucuacguccaggccuccggccgcgucaccgucuccacccgccgcucccagcagaccaucauccccaacaucggcucccgccccuggguccgcggccaguccggccgcaucuccaucuacuggaccaucgucaagcccggcgacguccucgucaucaacuccaacggcaaccucaucgccccccgcggcuacuucaagauccgcaccggcaaguccuccaucaugcgcuccgacgcccccaucgacaccugcaucuccgagugcaucacccccaacggcuccauccccaacgacaagcccuuccagaacgucaacaagaucaccuacggcgccugccccaaguacgucaagcaguccacccucaagcucgccaccggcaugcgcaacguccccgagaagaagacccgcggccucuucgucgccaucgccggcuucaucgagaacggcugggagggcaugaucgacugcugguacggcuuccgccaccagaacuccgagggcaccggccaggccgccgaccucaaguccacccaggccgccaucgaccagaucaacggcaagcucaaccgcgucaucgagaagaccaacgagaaguuccaccagaucgagaaggaguucuccgaggucgagggccgcauccaggaccucgagaacuacgucgaggacaccaagaucgaccucugguccuacaacgccgagcuccucgucgcccucgagaaccagcacaccaucgaccucaccgacuccgagaugaacaagcucuucgagcgcacccgccgccagcuccgcgagaacgccgaggacaugggcuccggcugcuucaagaucuaccacaagugcgacaacgccugcaucgaguccauccgcaacggcaccuacgaccacgacaucuaccgcgacgaggcccucaacaaccgcuuccagaucaagggcgucgagcucaaguccggcuacaaggacuggauccucuggaucuccuucgccaccuccugcuuccuccucugcgucguccucggcggcuucaucaugugggccugccagcgcggcaacauccgcugcaacaucugcaucuga

SEQ ID NO: 96973 - RNA, 1701 nt, Artificial Sequence
  derived and/or modified CDS sequence (opt2) from hemagglutinin__InfluenzaA__ABF60578
augaagaccaucaucguccucuccugcuucuucugccucgccuucucccaggaccucuccgagaacaacaacaacaccgccacccucugccucggccaccacgccguccccaacggcaccaucgucaagaccaucaccgacgaccagaucgaggucaccaacgccaccgagcucguccaguccuccuccaccggcaagaucugcaacaacccccaccgcauccucgacggccgcgacugcacccucaucgacgcccuccucggcgacccccacugcgacgucuuccaggacgagaccugggaccucuacgucgagcgcuccaaguccuucuccaacugcuaccccuacgacguccccgacuacgccucccuccgcucccucgucgccuccuccggcacccucgaguucaucaccgaggccuucaccuggaccggcgucacccagaacggcggcuccggcgccugcaagcgcggccccggcaacggcuucuucucccgccucaacuggcucaccaaguccggcuccgccuaccccguccucaacgucaccaugcccaacaacgacaacuucgacaagcucuacgucuggggcguccaccaccccuccaccaaccaggagcagaccaaccucuacguccaggccuccggccgcgucaccgucuccacccgccgcucccagcagaccaucauccccaacaucggcucccgccccuggguccgcggccagucccgccgcaucuccaucuacuggaccaucgucaagcccggcgacauccucgucaucaacuccaacggcaaccucaucgccccccgcggcuacuucaagaugcgcaccggcaaguccuccaucaugcgcuccgacgcccccaucgacaccugcaucuccgagugcaucacccccaacggcuccauccccaacgacaagcccuuccagaacgucaacaagaucaccuacggcgccugccccaaguacaucaagcaguccacccucaagcucgccaccggcaugcgcaacguccccgagaagcagacccgcggccucuucggcgccaucgccggcuucaucgagaacggcugggagggcaugaucgacggcugguacggcuuccgccaccagaacuccgagggcaccggccaggccgccgaccucaaguccacccaggccgccaucgaccagaucaacggcaagcucaaccgcgucaucgagaagaccaacgagaaguuccaccagaucgagaaggaguucuccgaggucgagggccgcauccaggaccucgagaaguacgucgaggacaccaagaucgaccucugguccuacaacgccgacguccucgucgcccucgagaaccagcacaccaucgaccucaccgacuccgagaugaacaagcucuucgagaagacccgccgccagcuccgcgagaacgccgaggacaugggcaacggcugcuucaagaucuaccacaagugcgacaacgccugcaucgaguccauccgcaacggcaccuacgaccacgacaucuaccgcgacgaggcccucaacaaccgcuuccagaucaagggcugcggcgucaaguccggcuacaaggacuggauccucuggaucuccuucgccaucuccugcuuccuccucugcgucguccuccucggcuucaucaugugggccugccagcgcggcaacauccgcugcaacaucugcaucuga

SEQ ID NO: 96974 - RNA, 1701 nt, Artificial Sequence
  derived and/or modified CDS sequence (opt2) from hemagglutinin__InfluenzaA__ABF60579
augaagacccucaucgcccucuccuacaucuucugccucguccucggccaggaccuccccggcaacggcaacuccaccgccacccucugccucggccaccacgccguccccaacggcacccucgucaagaccaucaccgacgaccagaucgaggucaccaacgccaccgagcucguccagaacuucuccauggacaagaucugcaacaacccccaccgcauccucgacggcgccaacugcacccucaucgacgcccuccucggcgacccccacugcgacgacuuccagaacgagaagugggaccucuucgucgagcgcuccaaggccuucuccaacugcuaccccuacgacguccccgacuacaccucccuccgcucccucaucgccuccuccggcacccucgaguucaucaacgaggacuucaacuggaccggcgucacccagaacggcggcuccaacgccugcaagcgcggccccgacuccuccuucuucucccgccucaacuggcucuacaaguccggcaacaccuaccccaugcucaacgucaccaugcccaacuccgacaacuucgacaagcucuacaucuggggcguccaccaccccuccaccgcccgcgagcagaccaaccucuacguccaggccuccggcaaggucaccgucuccaccaagcgcucccagcagaccaucauccccaacaucggcucccgccccuggguccgcggccucuccucccgcaucuccaucuacuggaccaucgucaagcccggcgacauccucgucaucaacuccaacggcaaccucaucgccccccgcggcuacuucaagaugcacaccggccgcuccuccaucaugcgcuccgacgcccccaucgacaccugcuccuccgagugcaucacccccaacggcuccauccccaacgacaagcccuuccagaacgucaacaagaucaccuacggcgccugccccaaguacgucaagcagaacacccucaagcucgccaccggcaugcgcaacauccccgagaagcagacccgcggcaucuucggcgccaucgccggcuucaucgagaacggcugggagggcauggucgacggcugguacggcuuccgccaccagaacuccgagggcaccggccaggccgccgaccucaaguccacccaggccgccaucgaccagaucaacggcaagcucaaccgcgucaucgagaagaccaacgagaaguuccaccagaucgagaaggaguucuccggcgucgagggccgcauccaggaccucgagaaguacgucgaggacaccaagaucgaccucugguccuacaacgccgagcuccucgucgcccucgagaaccagcacaccaucgaccucaccgacuccgagaugaacaagcucuucgagaagacccgccgccagcuccgcgagaacgccgaggacaugggcaacggcugcuucaagaucuaccacaagugcgacaacgccugcaucgaguccauccgcaacggcaccuacgaccacaacgaguaccgcgacgaggcccucaacaaccgcuuccagaucaagggcgucgagcucaaguccggcuacaaggacuggauccucuggaucuccuucgccaucuccugcuuccuccucugcgucguccuccucggcuucaucaugugggccugccagaagggcaacauccgcugcaacaucugcaucuga

SEQ ID NO: 96975 - RNA, 1701 nt, Artificial Sequence
  derived and/or modified CDS sequence (opt2) from hemagglutinin__InfluenzaA__ABF60580
augaagaccaucaucgcccucuccuacaucuucugccucgccuucgcccaggaccuccccggcaacgacaacuccaccgccacccucugccucggccaccacgccguccccaacggcacccucgucaagaccaucaccaacgaccagaucgaggucaccaacgccaccgagcucguccaguccuccuccaccggcaagaucugcgacaacccccaccgcauccucgacggcaucaacugcacccucaucgacgcccuccucggcgacccccacugcgacggcuuccagaacgagaagugggaccucuucgucgagcgcuccaaggccuucuccaacugcuaccccuacgacguccccgacuacgccucccuccgcucccucgucgccuccuccggcacccucgaguucaucaacgagggcuucaacuggaccggcgucacccagaacggcggcuccuccgccugcaagcgcggccccgacaacggcuucuucucccgccucaacuggcucuacaaguccggcuccaccuaccccguccagaacgucaccaugcccaacaacgacaacuccgacaagcucuacaucuggggcguccaccaccccuccaccgacaaggagcagaccgaccucuacguccaggccuccggcaaggucaccgucuccaccaagcgcauccagcagaccgucauccccaacgucggcucccgccccuggguccgcggccucuccucccgcgucuccaucuacuggaccaucgucaagcccggcgacguccucgucaucaacuccaacggcaaccucaucgccccccgcggcuacuacaagaugcgcaccggcaaguccuccaucaugcgcuccgacgcccccaucggcaccugcuccuccgagugcaucacccccaacggcuccauccccaacgacaagcccuuccagaacgucaacaagaucaccuacggcgccugccccaaguacgucaagcagaacacccucaagcucgccaccggcaugcgcaacguccccgagaagcagacccgcggcaucuucggcgccaucgccggcuucaucgagaacggcugggagggcaugaucgacggcugguacggcuuccgccaccagaacuccgagggcaccggccaggccgccgaccucaaguccacccaggccgccaucgaccagaucaacggcaagcucaaccgcgucaucgagaagaccaacgagaaguuccaccagaucgagaaggaguucuccgaggucgagggccgcauccaggaccucgagaaguacgucgaggacaccaagaucgaccucugguccuacaacgccgagguccucgucgcccucgagaaccagcacaccaucgaccucaccgacuccgagaugaacaagcucuucgagaagacccgccgccagcuccgcgagaacgccgaggacaugggcaacggcugcuucaagaucuaccacaagugcgacaacgccugcaucggcuccauccgcaacggcaccuacgaccacgacgucuaccgcgacgaggcccucaacaaccgcuuccagaucaagggcgucgagcucaaguccggcuacaaggacuggauccucuggaucuccuucgccaucuccugcuuccuccucugcgucguccuccucggcuucaucaugugggccugccagaagggcaacauccgcugcaacaucugcaucuga

SEQ ID NO: 96976 - RNA, 1701 nt, Artificial Sequence
  derived and/or modified CDS sequence (opt2) from hemagglutinin__InfluenzaA__ABF60581
augaagaccaucaucguccucuccuacuucuucugccucgcccucucccaggacuacuccgaguccaacaacuccaccgccacccucugccucggccaccacgccguccccaacggcaccaucgucaagaccaucaccgacgaccagaucgaggucaccaacgccaccgagcucguccaguccuccuccaccggcaagaucugcaacaacccccaccgcauccucgacggccgcgacugcacccucaucgacgcccuccucggcgacccccacugcgacgucuuccaggacgagaccugggaccucuacgucgagcgcuccuccgccuucuccaacugcuaccccuacgacguccccgacuacgacucccuccgcucccucgucgccuccuccggcacccucgaguucaucaccgagggcuucaccuggaccggcgucacccagaacggcggcuccaacgccugcaagcgcggccccgccuccggcuucuucucccgccucaacuggcucaccaaguccggcuccaccuaccccguccucaacgucaccaugcccaacaacgacaacuucgacaagcucuacgucuggggcguccaccaccccuccaccaaccaggagcagaccaaccucuacguccaggccuccggccgcgucaccgucuccacccgccgcucccagcagaccaucauccccaacaucggcucccgccccuggguccgcggccaguccggccgcaucuccaucuacuggaccaucgucaagcccggcgacguccucgucaucaacuccaacggcaaccucaucgccccccgcggcuacuucaagaugcgcaccggcaaguccuccaucaugcgcuccgacgcccccaucgacaccugcaucuccgagugcaucacccccaacggcuccauccccaacgacaugcccuuccagaacgucaacaagaucaccuacggcgccugccccaaguacgucaagcagggcacccucaagcucgccaccggcaugcgcaacguccccgagaagcagacccgcggccucuucggcgccaucgccggcuucaucgagaacggcugggagggcaugaucgacggcugguacggcuuccgccaccagaacuccgagggcaccggccaggccgccgaccucaaguccacccaggccgccaucgaccagaucaacggcaagcucaaccgcgucaucgagaagaccaacgagaaguuccaccagaucgagaaggaguucuccgaggucgagggccgcauccaggaccucgagaaguacgucgaggacaccaagaucgaccucugguccgacaacgccgagcuccucgucgcccucgagaaccagcacaccaucgaccucaccgacuccgagaugaacaagcucuucgagaagacccgccgccagcuccgcgagaacgccgaggucaugggcaacggcugcuucaagaucuaccacaagugcgacaacgccugcaucgaguccauccgcaacggcaccuacgaccacgacaucuaccgcgacgaggcccucaacaaccgcuuccagaucaagggcgucgagcucaaguccggcuacaaggacuggauccucuggaucuccuucgccaucuccugcuuccuccucugcgucguccuccucggcuucaucaugugggccugccagcgcggcaacauccgcugcaacaucugcaucuga

SEQ ID NO: 96977 - RNA, 1701 nt, Artificial Sequence; identical to SEQ ID NO: 96776
  derived and/or modified CDS sequence (opt2) from hemagglutinin__InfluenzaA__ABF82651

SEQ ID NO: 96978 - RNA, 1698 nt, Artificial Sequence; identical to SEQ ID NO: 96836
  derived and/or modified CDS sequence (opt2) from hemagglutinin__InfluenzaA__ABF82662

SEQ ID NO: 96979 - RNA, 1698 nt, Artificial Sequence
  derived and/or modified CDS sequence (opt2) from hemagglutinin__InfluenzaA__ABF82673
augaaggccaagcuccucguccuccucugcaccuucaccgccaccuacgccgacaccaucugcaucggcuaccacgccaacaacuccaccgacaccgucgacaccguccucgagaagaacgucaccgucacccacuccgucaaccuccucgaggacucccacaacggcaagcucugccuccucaagggcaucgccccccuccagcucggcaacugcuccgucgccggcuggauccucggcaaccccgagugcgagcuccucaucuccaagggcuccugguccuacaucgucgagacccccaaccccgagaacggcaccugcuaccccggcuacuucgccgacuacgaggagcuccgcgagcagcucuccuccgucuccuccuucgagcgcuucgagaucuuccccaagggcuccuccuggcccaaccacaccgucaccggcgucuccgccuccugcucccacaacggcaaguccuccuucuaccgcaaccuccucuggcucaccggcaagaacggccucuaccccaaccucuccauguccuacgucaacaacaaggagaaggagguccucguccucuggggcguccaccacccccccaacaucggcgaccagcgcgcccucuaccacaccgagaacgccuacgucuccgucgucuccucccacuacucccgccgcuucacccccgagaucgccaagcgccccaagguccgcgaccaggagggccgcaucaacuacuacuggacccuccucgagcccggcgacaccaucaucuucgaggccaacggcaaccucaucgcccccugguacgccuucgcccucucccgcggcuucggcuccggcaucaucaccuccaacgcccccaugggcgagugcgacgccaagugccagaccccccagggcgccaucaacuccucccuccccuuccagaacguccaccccgucaccaucggcgagugccccaaguacguccgcuccgccaagcuccgcauggucaccggccuccgcaacauccccuccauccagucccgcggccucuucggcgccaucgccggcuucaucgagggcggcuggaccggcauggucgacggcugguacggcuaccaccaccagaacgagcagggcuccggcuacgccgccgaccagaaguccacccagaacgccaucaacggcaucaccaacaaggucaacuccgucaucgagaagaugaacacccaguucaccgccgucggcaaggaguucaacaagcucgagcgccgcauggagaaccucaacaagaaggucgacgacggcuuccucgacaucuggaccuacaacgccgagcuccucguccuccucgagaacgagcgcacccucgacuuccacgacuccaacgucaagaaccucuacgagaaggucaagucccagcucaagaacaacgccaaggagaucggcaacggcugcuucgaguucuaccacaagugcaacaacgagugcauggaguccgucaagaacggcaccuacgacuaccccaaguacuccgaggaguccaagcucaaccgcgagaagaucgacggcgucaagcucgaguccaugggcgucuaccagauccucgccaucuacuccaccgucgccuccucccucguccuccucgucucccucggcgccaucuccuucuggaugugcuccaacggcucccuccagugccgcaucugcaucuga

SEQ ID NO: 96980 - RNA, 1698 nt, Artificial Sequence; identical to SEQ ID NO: 96877
  derived and/or modified CDS sequence (opt2) from hemagglutinin__InfluenzaA__ABF82684

SEQ ID NO: 96981 - RNA, 1701 nt, Artificial Sequence; identical to SEQ ID NO: 96843
  derived and/or modified CDS sequence (opt2) from hemagglutinin__InfluenzaA__ABF82695

SEQ ID NO: 96982 - RNA, 1701 nt, Artificial Sequence; identical to SEQ ID NO: 96819
  derived and/or modified CDS sequence (opt2) from hemagglutinin__InfluenzaA__ABF82706

SEQ ID NO: 96983 - RNA, 1698 nt, Artificial Sequence; identical to SEQ ID NO: 96335
  derived and/or modified CDS sequence (opt2) from hemagglutinin__InfluenzaA__ABF82819

SEQ ID NO: 96984 - RNA, 1698 nt, Artificial Sequence; identical to SEQ ID NO: 96836
  derived and/or modified CDS sequence (opt2) from hemagglutinin__InfluenzaA__ABF82830

SEQ ID NO: 96985 - RNA, 1698 nt, Artificial Sequence; identical to SEQ ID NO: 96836
  derived and/or modified CDS sequence (opt2) from hemagglutinin__InfluenzaA__ABF82841

SEQ ID NO: 96986 - RNA, 1698 nt, Artificial Sequence; identical to SEQ ID NO: 96836
  derived and/or modified CDS sequence (opt2) from hemagglutinin__InfluenzaA__ABF82852

SEQ ID NO: 96987 - RNA, 1698 nt, Artificial Sequence
  derived and/or modified CDS sequence (opt2) from hemagglutinin__InfluenzaA__ABF82863
augaaggccaagcuccucguccuccucugcaccuucaccgccaccuacgccgacaccaucugcaucggcuaccacgccaacaacuccaccgacaccgucgacaccguccucgagaagaacgucaccgucacccacuccgucaaccuccucgaggacucccacaacggcaagcucugccuccucaagggcaucgccccccuccagcucggcaacugcuccgucgccggcuggauccucggcaaccccgagugcgagcuccucaucuccaaggaguccugguccuacaucgucgagacccccaaccccgagaacggcaccugcuaccccggcuacuucgccgacuacgaggagcuccgcgagcagcucuccuccgucuccuccuucgagcgcuucgagaucuuccccaagggcuccuccuggcccaaccacaccgucaccggcgucuccgccuccugcucccacaacggcaaguccuccuucuaccgcaaccuccucuggcucaccggcaagaacggccucuaccccaaccucuccauguucuacgucaacaacaaggagaaggagguccucguccucuggggcguccaccacccccccaacaucggcgaccagcgcgcccucuaccacaccgagaacgccuacgucuccgucgucuccucccacuacucccgccgcuucacccccgagaucgccaagcgccccaagguccgcgaccaggagggccgcaucaacuacuacuggacccuccucgagcccggcgacaccaucaucuucgaggccaacggcaaccucaucgcccccugguacgccuucgcccucucccgcggcuucggcuccggcaucaucaccuccaacgcccccaugggcgagugcgacgccaagugccagaccccccagggcgccaucaacuccucccuccccuuccagaacguccaccccgucaccaucggcgagugccccaaguacguccgcuccgccaagcuccgcauggucaccggccuccgcaacauccccuccauccagucccgcggccucuucggcgccaucgccggcuucaucgagggcggcuggaccggcauggucgacggcugguacggcuaccaccaccagaacgagcagggcuccggcuacgccgccgaccagaaguccacccagaacgccaucaacggcaucaccaacaaggucaacuccgucaucgagaagaugaacacccaguucaccgccgucggcaaggaguucaacaagcucgagcgccgcauggagaaccucaacaagaaggucgacgacggcuuccucgacaucuggaccuacaacgccgagcuccucguccuccucgagaacgagcgcacccucgacuuccacgacuccaacgucaagaaccucuacgagaaggucaagucccagcucaagaacaacgccaaggagaucggcaacggcugcuucgaguucuaccacaagugcaacaacgagugcauggaguccgucaagaacggcaccuacgacuaccccaaguacuccgaggaguccaagcucaaccgcgagaagaucgacggcgucaagcucgaguccaugggcgucuaccagauccucgccaucuacuccaccgucgccuccucccucguccuccucgucucccucggcgccaucuccuucuggaugugcuccaacggcucccuccagugccgcaucugcaucuga

SEQ ID NO: 96988 - RNA, 1698 nt, Artificial Sequence
  derived and/or modified CDS sequence (opt2) from hemagglutinin__InfluenzaA__ABF82874
augaaggccaagcuccucguccuccucugcaccuucaccgccaccuacgccgacaccaucugcaucggcuaccacgccaacaacuccaccgacaccgucgacaccguccucgagaagaacgucaccgucacccacuccgucaaccuccucgaggacucccacaacggcaagcucugccuccucaagggcaucgccccccuccagcucggcaacugcuccgucgccggcuggauccucggcaaccccgagugcgagcuccucaucuccaaggaguccugguccuacaucgucgagacccccaaccccgagaacggcaccugcuaccccggcuacuucgccgacuacgaggagcuccgcgagcagcucuccuccgucuccuccuucgagcgcuucgagaucuuccccaagggcuccuccuggcccaaccacaccgucaccggcgucuccgccuccugcucccacaacggcaaguccuccuucuaccgcaaccuccucuggcucaccggcaagaacggccucuaccccaaccucuccauguccuacgucaacaacaaggagaaggagguccucguccucuggggcguccaccacccccccaacaucggcgaccagcgcgcccucuaccacaccgagaacgccuacgucuccgucgucuccucccacuacucccgccgcuucacccccgagaucgccaagcgccccaagguccgcgaccaggagggccgcaucaacuacuacuggacccuccucgagcccggcgacaccaucaucuucgaggccaacggcaaccucaucgcccccugguacgccuucgcccucucccgcggcuucggcuccggcaucaucaccuccaacgcccccaugggcgagugcgacgccaagugccagaccccccagggcgccaucaacuccucccuccccuuccagaacguccaccccgucaccaucggcgagugccccaaguacguccgcuccgccaagcuccgcauggucaccggccuccgcaacauccccuccauccagucccgcggccucuucggcgccaucgccggcuucaucgagggcggcuggaccggcauggucgacggcugguacggcuaccaccaccagaacgagcagggcuccggcuacgccgccgaccagaaguccacccagaacgccaucaacggcaucaccaacaaggucaacuccgucaucgagaagaugaacacccaguucaccgccgucggcaaggaguucaacaagcucgagcgccgcauggagaaccucaucaagaaggucgacgacggcuuccucgacaucuggaccuacaacgccgagcuccucguccuccucgagaacgagcgcacccucgacuuccacgacuccaacgucaagaaccucuacgagaaggucaagucccagcucaagaacaacgccaaggagaucggcaacggcugcuucgaguucuaccacaagugcaacaacgagugcauggaguccgucaagaacggcaccuacgacuaccccaaguacuccgaggaguccaagcucaaccgcgagaagaucgacggcgucaagcucgaguccaugggcgucuaccagauccucgccaucuacuccaccgucgccuccucccucguccuccucgucucccucggcgccaucuccuucuggaugugcuccaacggcucccuccagugccgcaucugcaucuga

SEQ ID NO: 96989 - RNA, 1698 nt, Artificial Sequence; identical to SEQ ID NO: 96836
  derived and/or modified CDS sequence (opt2) from hemagglutinin__InfluenzaA__ABF82885

SEQ ID NO: 96990 - RNA, 1698 nt, Artificial Sequence; identical to SEQ ID NO: 96836
  derived and/or modified CDS sequence (opt2) from hemagglutinin__InfluenzaA__ABF82896

SEQ ID NO: 96991 - RNA, 1698 nt, Artificial Sequence; identical to SEQ ID NO: 96836
  derived and/or modified CDS sequence (opt2) from hemagglutinin__InfluenzaA__ABF82907

SEQ ID NO: 96992 - RNA, 1698 nt, Artificial Sequence; identical to SEQ ID NO: 96880
  derived and/or modified CDS sequence (opt2) from hemagglutinin__InfluenzaA__ABF82929

SEQ ID NO: 96993 - RNA, 1698 nt, Artificial Sequence; identical to SEQ ID NO: 96836
  derived and/or modified CDS sequence (opt2) from hemagglutinin__InfluenzaA__ABF82940

SEQ ID NO: 96994 - RNA, 1701 nt, Artificial Sequence
  derived and/or modified CDS sequence (opt2) from hemagglutinin__InfluenzaA__ABF83447
augaagaccaucaucgcccucuccuacaucuucugccucgcccucggccaggaccuccccggcaacgacaacaacaccgccacccucugccucggccaccacgccguccccaacggcacccucgucaagaccaucaccgacgaccagaucgaggucaccaacgccaccgagcucguccaguccuccuccaccggcaagaucugcaacaacccccaccgcauccucgacggcaucgacugcacccucaucgacgcccuccucggcgacccccacugcgacgucuuccagaacgagaccugggaccucuucgucgagcgcuccaaggccuucuccaacugcuaccccuacgacguccccgacuacgccucccuccgcucccucgucgccuccuccggcacccucgaguucaucaccgagggcuucaccuggaccggcgucacccagaacggcggcuccaacgccugcaagcgcggccccggcuccggcuucuucucccgccucaacuggcucaccaaguccggcuccaccuaccccguccucaacgucaccaugcccaacaacgacaacuucgacaagcucuacaucuggggcguccaccaccccuccaccaaccaggagcagaccucccucuacguccaggccuccggcggcgucaccgucuccacccgccgcucccagcagaccaucauccccaacaucggcucccgccccuggguccgcggccucuccucccgcaucuccaucuacuggaccaucgucaagcccggcgacguccucgucaucaacuccaacggcaaccucaucgccccccgcggcuacuucaagaugcgcaccggcaaguccuccaucaugcgcuccgacgcccccaucgacaccugcaucuccgagugcaucacccccaacggcuccauccccaacgacaagcccuuccagaacgucaacaagaucaccuacggcgccugccccaaguacgucaagcagaacacccucaagcucgccaccggcaugcgcaacguccccgagaagcagacccgcggccucuucggcgccaucgccggcuucaucgagaacggcugggagggcaugaucgacggcugguacggcuuccgccaccagaacuccgagggcaccggccaggccgccgaccucaaguccacccaggccgccaucgaccagaucaacggcaagcucaaccgcgucaucgagaagaccaacgagaaguuccaccagaucgagaaggaguucuccgaggucgagggccgcauccaggaccucgagaaguacgucgaggacaccaagaucgaccucugguccuacaacgccgagcuccucgucgcccucgagaaccagcacaccaucgaccucaccgacuccgagaugaacaagcucuucgagaagacccgccgccagcuccgcgagaacgccgaggacaugggcaacggcugcuucaagaucuaccacaagugcgacaacgccugcaucgaguccauccgcaacggcaccuacgaccacgacgucuaccgcgacgaggcccucaacaaccgcuuccagaucaagggcgucgagcucaaguccggcuacaaggacuggauccucuggaucuccuucgccaucuccugcuuccuccucugcgucguccuccucggcuucaucaugugggccugccagcgcggcaacauccgcugcaacaucugcaucuga

SEQ ID NO: 96995 - RNA, 1644 nt, Artificial Sequence
  derived and/or modified CDS sequence (opt2) from hemagglutinin__InfluenzaA__ABG20468
auggagaagaucguccuccuccucgccaucgucucccucgucaaguccgaccagaucugcaucggcuaccacgccaacaacuccaccgagcaggucgacaccaucauggagaagaacgucaccgucacccacgcccaggacauccucgagaagacccacaacggcaagcucugcgaccucgacggcgucaagccccucauccuccgcgacugcuccgucgccggcgagaagaucaaccccgccaacgaccucugcuaccccggcaacuucaacgacuacgaggagcucaagcaccuccucucccgcaucaaccacuucgagaagauccagaucauccccaaguccuccugguccgaccacgaggccuccuccggcgucuccuccgccugccccuaccagggccgcuccuccuucuuccgcaacgucgucuggcucaucaagaagaacaacgccuaccccaccaucaagcgcuccuacaacaacaccaaccaggaggaccuccucguccucuggggcauccaccaccccaacgacgccgccgagcagacccgccucuaccagaaccccaccaccuacaucuccgucggcaccuccacccucaaccagcgccucguccccaagaucgccacccgcuccaaggucaacggccaguccggccgcauggaguucuucuggaccauccucaagcccaacgacgccaucaacuucgaguccaacggcaacuucaucgcccccgagaacgccuacaagaucgucaagaagggcgacuccaccaucaugaaguccgagcucgaguacggcaacugcaacaccaagugcgagacccccaucggcgccaucaacuccuccaugcccuuccacaacauccacccccucaccaucggcgagugccccaaguacgucaaguccaaccgccucguccucgccaccggccuccgcaacuccccccagggcgagcgccgccgcaagaagcgcggccucuucggcgccaucgccggcuucaucgagggcggcuggcagggcauggucgacggcugguacggcuaccaccacuccaacgagcagggcuccggcuacgccgccgacaaggaguccacccagaaggccaucgacggcgucaccaacaaggucaacuccaucaucgacaagaugaacacccaguucgaggccgucggccgcgaguucaacaaccucgagcgccgcaucgagaaccucaacaagaagauggaggacggcuuccucgacgucuggaccuacaacgccgagcuccucguccucauggagaacgagcgcacccucgacuuccacgacuccaacgucaagaaccucuacgacaagguccgccuccagcuccgcgacaacgccaaggagcucggcaacggcugcuucgaguucuaccaccgcugcgacaacgagugcauggaguccguccgcaacggcaccuacgacuacccccaguacuccgaggaggcccgccucaagcgcgaggagaucuccggcgucaagcucgaguccaucggcaccuaccagauccucuccaucuacuccaccgucgccuccucccucgcccucgccaucauggucgccggccucucccucuggaugugcuccaacggcucccuccagugccgcaucugcaucuga

SEQ ID NO: 96996 - RNA, 1707 nt, Artificial Sequence
  derived and/or modified CDS sequence (opt2) from hemagglutinin__InfluenzaA__ABG20472
auggagaagaucguccuccuccucgccaucgucucccucgucaaguccgaccagaucugcaucggcuaccacgccaacaacuccaccgagcaggucgacaccaucauggagaagaacgucaccgucacccacgcccaggacauccucgagaaggcccacaacggcaagcucugcgaccucgacggcgucaagccccucauccuccgcgacugcuccgucgccggcuggcuccucggcaaccccaugugcgacgaguuccucaacguccccgagugguccuacaucgucgagaagaucaaccccgccaacgaccucugcuaccccggcaacuucaacgacuacgaggagcucaagcaccuccucucccgcaucaaccacuucgagaagauccagaucauccccaaguccuccugguccgaccacgaggccuccuccggcgucuccuccgccugccccuaccagggccgcuccuccuucuuccgcaacgucgucuggcucaucaagaaggacaacgccuaccccaccaucaagcgcuccuacaacaacaccaaccaggaggaccuccucguccucuggggcauccaccaccccaacgacgccgccgagcagacccgccucuaccagaaccccaccaccuacaucuccgucggcaccuccacccucaaccagcgccucguccccaagaucgccacccgcuccaaggucaacggccaguccggccgcauggaguucuucuggaccauccucaagcccaacgacgccaucaacuucgaguccaacggcaacuucaucgcccccgagaacgccuacaagaucgucaagaagggcgacuccaccaucaugaaguccgagcucgaguacggcaacugcaacaccaagugccagacccccaucggcgccaucaacuccuccaugcccuuccacaacauccacccccucaccaucggcgagugccccaaguacgucaaguccaaccgccucguccucgccaccggccuccgcaacuccccccagggcgagcgccgccgcaagaagcgcggccucuucggcgccaucgccggcuucaucgagggcggcuggcagggcauggucgacggcugguacggcuaccaccacuccaacgagcagggcuccggcuacgccgccgacaaggaguccacccagaaggccaucgacggcgucaccaacaaggucaacuccaucaucgacaagaugaacacccaguucgaggccgucggccgcgaguucaacaaccucgagcgccgcaucgagaaccucaacaagaagauggaggacggcuuccucgacgucuggaccuacaacgccgagcuccucguccucauggagaacgagcgcacccucgacuuccacgacuccaacgucaagaaccucuacgacaagguccgccuccagcuccgcgacaacgccaaggagcucggcaacggcugcuucgaguucuaccaccgcugcgacaacgagugcauggaguccguccgcaacggcaccuacgacuacccccaguacuccgaggaggcccgccucaagcgcgaggagaucuccggcgucaagcucgaguccaucggcaccuaccagauccucuccaucuacuccaccgucgccuccucccucgcccucgccaucauggucgccggccucucccucuggaugugcuccaacggcucccuccagugccgcaucugcaucuga

SEQ ID NO: 96997 - RNA, 1707 nt, Artificial Sequence
  derived and/or modified CDS sequence (opt2) from hemagglutinin__InfluenzaA__ABG20478
auggagaagaucguccuccucuucgccaucgucucccucgucaaguccgaccagaucugcaucggcuaccacgccaacaacuccaccgagcaggucgacaccaucauggagaagaacgucaccgucacccacgcccaggacauccucgagaagacccacaacggcaagcucugcgaccucgacggcgucaagccccucauccuccgcgacugcuccgucgccggcuggcuccucggcaaccccaugugcgacgaguuccucaacguccccgagugguccuacaucgucgagaagaucaaccccgccaacgaccucugcuaccccggcaacuucaacgacuacgaggagcucaagcaccuccucucccgcaucaaccacuucgagaagauccagaucauccccaaguccuccugguccgaccacgaggccuccuccggcgucuccuccgccugccccuaccagggccgcuccuccuucuuccgcaacgucgucuggcucaucaagaaggacaacgccuaccccaccaucaagcgcuccuacaacaacaccaaccaggaggaccuccucguccucuggggcauccaccaccccaacgacgccgccgagcagacccgccucuaccagaaccccaccaccuacaucuccgucggcaccuccacccucaaccagcgccucguccccaagaucgccacccgcuccaaggucaacggccaguccggccgcauggaguucuucuggaccauccucaagcccaacgacgccaucaacuucgaguccaacggcaacuucaucgcccccgagaacgccuacaagaucgucaagaagggcgacuccaccaucaugaaguccgagcucgaguacggcaacugcaacaccaagugccagacccccaucggcgccaucaacuccuccaugcccuuccacaacauccacccccucaccaucggcgagugccccaaguacgucaaguccaaccgccucguccucgccaccggccuccgcaacuccccccagggcgagcgccgccgcaagaagcgcggccucuucggcgccaucgccggcuucaucgagggcggcuggcagggcauggucgacggcugguacggcuaccaccacuccaacgagcagggcuccggcuacgccgccgacaaggaguccacccagaaggccaucgacggcgucaccaacaaggucaacuccaucaucgacaagaugaacacccaguucgaggccgucggccgcgaguucaacaaccucgagcgccgcaucgagaaccucaacaagaagauggaggacggcuuccucgacgucuggaccuacaacgccgagcuccucguccucauggagaacgagcgcacccucgacuuccacgacuccaacgucaagaaccucuacgacaagguccgccuccagcuccgcgacaacgccaaggagcucggcaacggcugcuucgaguucuaccaccgcugcgacaacgagugcauggaguccguccgcaacggcaccuacgacuacccccaguacuccgaggaggcccgccucaagcgcgaggagaucuccggcgucaagcucgaguccaucggcaccuaccagauccucuccaucuacuccaccgucgccuccucccucgcccucgccaucauggucgccggccucucccucuggaugugcuccaacggcucccuccagugccgcaucugcaucuga

SEQ ID NO: 96998 - RNA, 1701 nt, Artificial Sequence; identical to SEQ ID NO: 96819
  derived and/or modified CDS sequence (opt2) from hemagglutinin__InfluenzaA__ABG26758

SEQ ID NO: 96999 - RNA, 1701 nt, Artificial Sequence
  derived and/or modified CDS sequence (opt2) from hemagglutinin__InfluenzaA__ABG26769
augaagaccaucaucgcccucuccuacauccucugccucgucuucgcccagaagcuccccggcaacgacaacuccaccgccacccucugccucggccaccacgccguccccaacggcacccucgucaagaccaucaccaacgaccagaucgaggucaccaacgccaccgagcucguccagaacuccuccaccggccgcaucugcgacuccccccaccgcauccucgacggcaagaacugcacccucaucgacgcccuccucggcgacccccacugcgacggcuuccagaacaaggagugggaccucuucgucgagcgcuccaaggccuacuccaacugcuaccccuacgacguccccgacuacgccucccuccgcucccucgucgccuccuccggcacccucgaguucaacaacgaguccuucaacuggaccggcgucgcccagaacggcaccuccuacgccugcaagcgccgcuccgucaaguccuucuucucccgccucaacuggcuccacaagcucgaguacaaguaccccgcccucaacgucaccaugcccaacaacgacaaguucgacaagcucuacaucuggggcguccaccaccccuccaccgacuccgaccagaccucccucuacguccaggccuccggccgcgucaccgucuccaccaagcgcucccagcagaccgucauccccaacaucggcuccggccccuggguccgcggcgucuccucccgcaucuccaucuacuggaccaucgucaagcccggcgacauccuccucaucaacuccaccggcaaccucaucgccccccgcggcuacuucaagauccgcuccggcaaguccuccaucaugcgcuccgacgcccccaucggcaacugcaacuccgagugcaucacccccaacggcuccauccccaacgacaagcccuuccagaacgucaaccgcaucaccuacggcgccugcccccgcuacgucaagcagaacacccucaagcucgccaccggcaugcgcaacguccccgagaagcagacccgcggcaucuucggcgccaucgccggcuucaucgagaacggcugggagggcauggucgacggcugguacggcuuccgccaccagaacuccgagggcaccggccaggccgccgaccucaaguccacccaggccgccaucaaccagaucaacggcaagcucaaccgccucaucgagaagaccaacgagaaguuccaccagaucgagaaggaguucuccgaggucgagggccgcauccaggaccucgagaaguacgucgaggacaccaagaucgaccucugguccuacaacgccgagcuccucgucgcccucgagaaccagcacaccaucgaccucaccgacuccgagaugaacaagcucuucgagcgcacccgcaagcagcuccgcgagaacgccgaggacaugggcaacggcugcuuccgcaucuaccacaagugcgacaacgccugcaucggcuccauccgcaacggcaccuacgaccacgacgucuaccgcgacgaggcccucaacaaccgcuuccagaucaagggcgucgagcucaaguccggcuacaaggacuggauccucuggaucuccuucgccaucuccugcuuccuccucugcgucguccuccucggcuucaucaugugggccugccagaagggcaacauccgcugcaacaucugcaucuga

SEQ ID NO: 97000 - RNA, 1701 nt, Artificial Sequence; identical to SEQ ID NO: 96947
  derived and/or modified CDS sequence (opt2) from hemagglutinin__InfluenzaA__ABG26780

SEQ ID NO: 97001 - RNA, 1701 nt, Artificial Sequence
  derived and/or modified CDS sequence (opt2) from hemagglutinin__InfluenzaA__ABG26791
augaaggccaagcuccucguccuccucugcgccuucaccgccaccuacgccgacaccaucugcaucggcuaccacgccaacaacuccaccgacaccgucgacaccguccucgagaagaacgucaccgucacccacuccgucaaccuccucgaggacucccacaacggcaagcucugccgccucaagggcaccgccccccuccagcucggcaacugcuccgucgccggcuggauccucggcaaccccgagugcgagucccucuucuccaaggaguccugguccuacaucgccgagacccccaaccccgagaacggcaccugcuaccccggcuacuucgccgacuacgaggagcucaaggagcagcucuccuccgucuccuccuucgagcgcuucgagaucuuccccaaggaguccuccuggcccaaccacaccgucaccaagggcgucaccgccuccugcucccacaacggcaaguccuccuucuacaagaaccuccucuggcucaccgagaagaacggccucuaccccaaccucuccaaguccuacgucaacaacaaggagaaggagguccucguccucuggggcguccaccaccccuccaacaucggcgaccagcgcgccaucuaccacaccgagaacgccuacgucuccgucgucuccucccacuacucccgccgcuucacccccgagaucgccaagcgccccaagguccgcgaccaggagggccgcaucaacuacuacuggacccuccucgagcccggcgacaccaucaucuucgaggccaacggcaaccucaucgcccccugguacgccuucgcccucucccgcggcuucggcuccggcaucaucaccuccaacgccuccaugggcgagugcgacgccaagugccagaccccccagggcgccaucaacuccucccuccccuuccagaacguccaccccgucaccaucggcgagugccccaaguacguccgcuccaccaagcuccgcauggucaccggccuccgcaacauccccuccauccagucccgcggccucuucggcgccaucgccggcuucaucgagggcggcuggaccggcaugaucgacggcugguacggcuaccaccaccagaacgagcagggcuccggcuacgccgccgacaagaaguccacccagaacgccaucgacggcaucaccaacaaggucaacuccgucaucgagaagaugaacacccaguucaccgccgucggcaaggaguucaacaagcucgagcgccgcauggagaaccucaacaagaaggucgacgacggcuuccucgacaucuggaccuacaacgccgagcuccucguccuccucgagaacgagcgcacccucgacuuccacgacuccaacgucaagaaccucuacgagaaggucaagaaccagcucaagaacaacgccaaggagaucggcaacggcugcuucgaguucuaccacaagugcaacaacgagugcauggaguccgucaagaacggcaccuacgacuaccccaaguacuccgaggaguccaagcucaagcgcgagaagaucgacggcgucaagcucgaguccaugggcgucuaccagauccucgccaucuacuccaccgucgccuccucccucguccuccucgucucccucggcgccaucuccuucuggaugugcuccaacggcucccuccagugccgcaucugcaucuga

SEQ ID NO: 97002 - RNA, 1701 nt, Artificial Sequence
  derived and/or modified CDS sequence (opt2) from hemagglutinin__InfluenzaA__ABG26802
augaagaccaucaucgcccucuccuacaucuccugccucgucuucgcccagaagcuccccggcaacgacaacuccaccgccacccucugccucggccaccacgccguccccaacggcacccucgucaagaccaucaccaacgaccagaucgaggucaccaacgccaccgagcucguccaguccuccuccaccggccgcaucugcgacuccccccaccgcauccucgacggcaagaacugcacccucaucgacgcccuccucggcgacccccacugcgacggcuuccagaacgagaagugggaccucuucgucgagcgcuccaaggccuucuccaacugcuaccccuacgacguccccgacuacgccucccuccgcucccucgucgccuccuccggcacccucgaguucaucaacgagggcuucaacuggaccggcgucacccaguccggcggcuccuacgccugcaagcgcggcuccgucaacuccuucuucucccgccucaacuggcucuacgaguccgaguccaaguaccccgcccucaacgucaccaugcccaacaacggcaaguucgacaagcucuacaucuggggcguccaccaccccuccaccgacaaggagcagaccaaccucuacguccgcgccuccggccgcgucaccgucuccaccaagcgcucccagcagaccgucauccccaacaucggcccccgccccuggguccgcggccucuccucccgcaucuccaucuacuggaccaucgucaagcccggcgacauccuccucaucaacuccaccggcaaccucaucgccccccgcggcuacuucaagauccgcaccggcaaguccuccaucaugcgcuccgacgcccccaucggcaccugcuccuccggcugcaucacccccaacggcuccauccccaacgacaagcccuuccagaacgucaacaagaucaccuacggcgccugcccccgcuacgucaagcagaacacccucaagcucgccaccggcaugcgcaacguccccgagaagcagacccgcggcaucuucggcgccaucgccggcuucaucgagaacggcugggagggcauggucgacggcugguacggcuuccgccaccagaacuccgagggcaccggccaggccgccgaccucaaguccacccaggccgccaucgaccagaucaacggcaagcucaaccgccucaucgagaagaccaacgagaaguuccaccagaucgagaaggaguucuccgaggucgagggccgcauccaggaccucgagaaguacgucgaggacaccaagaucgaccucugguccuacaacgccgagcuccucgucgcccucgagaaccagcacaccaucgacaugaccgacuccgagaugaacaagcucuucgagaagacccgcaagcagcuccgcgagaacgccgaggacaugggcaacggcugcuucaagaucuaccacaagugcgacaacgccugcaucggcuccauccgcaacggcaccuacgaccacgacgucuaccgcgacgaggcccucaacaaccgcuuccagaucaagggcgucgagcucaaguccggcuacaaggacuggauccucuggaucuccuucgccaucuccugcuuccuccucugcgucguccuccucggcuucaucaugugggccugccagaagggcaacauccgcugcaacaucugcaucuga

SEQ ID NO: 97003 - RNA, 1701 nt, Artificial Sequence; identical to SEQ ID NO: 96951
  derived and/or modified CDS sequence (opt2) from hemagglutinin__InfluenzaA__ABG26813

SEQ ID NO: 97004 - RNA, 1701 nt, Artificial Sequence
  derived and/or modified CDS sequence (opt2) from hemagglutinin__InfluenzaA__ABG26824
augaaggccaagcuccucguccuccucugcgcccucuccgccaccgacgccgacaccaucugcaucggcuaccacgccaacaacuccaccgacaccgucgacaccguccucgagaagaacgucaccgucacccacuccgucaaccuccucgaggacaaccacaacggcaagcucugcaagcucaagggcaucgccccccuccagcucggcaagugcuccaucgccggcuggauccucggcaaccccgagugcgagucccucuucuccaagaaguccugguccuacaucgccgagacccccaacuccgagaacggcaccugcuaccccggcuacuucgccgacuacgaggagcuccgcgagcagcucuccuccgucuccuccuucgagcgcuucgagaucuuccccaaggaguccuccuggcccaagcacaacgucaccaagggcgucaccgccuccugcucccacaagggcaaguccuccuucuaccgcaaccuccucuggcucaccgagaagaacggcuccuaccccaaccucuccaaguccuacgucaacaacaaggagaaggagguccucguccucuggggcguccaccaccccuccaacaucgaggaccagaagaccaucuaccgcaaggagaacgccuacgucuccgucgucuccucccacuacaaccgccgcuucacccccgagaucgccaagcgccccaagguccgcaaccaggagggccgcaucaacuacuacuggacccuccucgagcccggcgacaccaucaucuucgaggccaacggcaaccucaucgcccccugguacgccuucgcccucucccgcggcuucggcuccggcaucaucaccuccaacgccuccauggacgagugcgacgccaagugccagaccccccagggcgccaucaacuccucccuccccuuccagaacguccaccccgucaccaucggcgagugccccaaguacguccgcuccaccaagcuccgcauggucaccggccuccgcaacauccccuccauccagucccgcggccucuucggcgccaucgccggcuucaucgagggcggcuggaccggcaugaucgacggcugguacggcuaccaccaccagaacgagcagggcuccggcuacgccgccgaccagaaguccacccagaacgccaucaacggcaucaccaacaaggucaacuccaucaucgagaagaugaacacccaguucaccgccgucggcaaggaguucaacaagcucgagaagcgcauggagaaccucaacaagaaggucgacgacggcuuccucgacaucuggaccuacaacgccgagcuccucguccuccucgagaacgagcgcacccucgacuuccacgacuccaacgucaagaaccucuacgagaaggucaagucccagcucaagaacaacgccaaggagaucggcaacggcugcuucgaguucuaccacaagugcaacaacgagugcauggaguccgucaagaacggcaccuacgacuaccccaaguacuccgaggaguccaagcucaaccgcgagaagaucgacggcgucaagcucgaguccaugggcgucuaccagauccucgccaucuacuccaccgucgccuccucccucguccuccucgucucccucggcgccaucuccuucuggaugugcuccaacggcucccuccagugcaagaucugcaucuga

SEQ ID NO: 97005 - RNA, 1701 nt, Artificial Sequence; identical to SEQ ID NO: 96957
  derived and/or modified CDS sequence (opt2) from hemagglutinin__InfluenzaA__ABG26835

SEQ ID NO: 97006 - RNA, 1701 nt, Artificial Sequence
  derived and/or modified CDS sequence (opt2) from hemagglutinin__InfluenzaA__ABG26890
augaagaccaucaucgcccucuccuacauccucugccucgucuucgcccagaagcuccccggcaacgacaacuccaccgccacccucugccucggccaccacgccguccccaacggcacccucgucaagaccaucaccaacgaccagaucgaggucaccaacgccaccgagcucguccagaacucccccaccggccgcaucugcgacuccccccaccgcauccucgacggcaagaacugcacccucaucgacgcccuccucggcgacccccacugcgacggcuuccagaacaaggagugggaccucuucgucgagcgcuccaaggccuacuccaacugcuaccccuacgacguccccgacuacgccucccuccgcucccucgucgccuccuccggcacccucgaguucaccaacgagaacuucaacuggaccggcgucgcccaggacggcaaguccuacgccugcaagcgcggcuccgucaacuccuucuucucccgccucaacuggcuccacaagcucgaguacaaguaccccgcccucaacgucaccaugcccaacaacggcaaguucgacaagcucuacaucuggggcguccaccaccccuccaccgacuccgaccagaccucccucuacguccgcgccuccggcaaggucaccgucuccaccaagcgcucccagcagaccgucauccccgacaucggcuaccgccccuggguccgcggccucuccucccgcaucuccaucuacuggaccaucgucaagcccggcgacauccuccucaucaacuccaccggcaaccucaucgccccccgcggcuacuucaagauccgcaacggcaaguccuccaucaugcgcuccgacgcccccaucggcaacugcuccuccgagugcaucacccccaacggcuccauccccaacgacaagcccuuccagaacgucaaccgcaucaccuacggcgccugcccccgcuacgucaagcagaacacccucaagcucgccaccggcaugcgcaacguccccgagaagcagacccgcggcaucuucggcgccaucgccggcuucaucgagaacggcugggagggcauggucgacggcugguacggcuuccgccaccagaacuccgagggcaccggccaggccgccgaccucaaguccacccaggccgccaucgaccagaucaacggcaagcucaaccgccucgucgagaagaccaacgagaaguuccaccagaucgagaaggaguucuccgaggucgagggccgcauccaggaccucgagaaguacgucgaggacaccaagaucgaccucugguccuacaacgccgagcuccucgucgcccucgagaaccagcacaccaucgaccucaccgacuccgagaugaacaagcucuucgagcgcacccgcaagcagcuccgcgagaacgccgaggacaugggcaacggcugcuucaagaucuaccacaagugcgacaacgccugcaucggcuccauccgcaacggcaccuacgaccacgacgucuaccgcgacgaggcccucaacaaccgcuuccagaucaagggcgucgagcucaaguccggcuacaaggacuggauccucuggaucuccuucgccaucuccugcuuccuccucugcgucguccuccucggcuucaucaugugggccugccagaagggcaacauccgcugcaacaucugcaucuga

SEQ ID NO: 97007 - RNA, 1701 nt, Artificial Sequence
  derived and/or modified CDS sequence (opt2) from hemagglutinin__InfluenzaA__ABG26901
augaagaccaucaucgcccucuccuacauccucugccucgucuucgcccagaagcuccccggcaacgacaacuccaccgccacccucugccucggccaccacgccguccccaacggcacccucgucaagaccaucaccaacgaccagaucgaggucaccaacgccaccgagcucguccagaacucccccaccggccgcaucugcgacuccccccaccgcauccucgacggcaagaacugcacccucaucgacgcccuccucggcgacccccacugcgacggcuuccagaacaaggagugggaccucuucgucgagcgcuccaaggccuacuccaacugcuaccccuacgacguccccgacuacgccucccuccgcucccucgucgccuccuccggcacccucgaguucaccaacgagaacuucaacuggaccggcgucgcccaggacggcaaguccuacuccugcaagcgcggcuccgucaacuccuucuucucccgccucaacuggcuccacaaguccgaguacaaguaccccgcccucaacgucaccaugcccaacaacggcaaguucgacaagcucuacaucuggggcguccaccaccccuccaccgacuccgaccagaccucccucuacguccgcgccuccggcaaggucaccgucuccaccaagcgcucccagcagaccgucauccccgacaucggcuaccgccccuggguccgcggccucuccucccgcaucuccaucuacuggaccaucgucaagcccggcgacauccuccucaucaacuccaccggcaaccucaucgccccccgcggcuacuucaagauccgcaacggcaaguccuccaucaugcgcuccgacgcccccaucggcaacugcuccuccgagugcaucacccccaacggcuccauccccaacgacaagcccuuccagaacgucaaccgcaucaccuacggcgccugcccccgcuacgucaagcagaacacccucaagcucgccaccggcaugcgcaacguccccgagaagcagacccgcggcaucuucggcgccaucgccggcuucaucgagaacggcugggagggcauggucgacggcugguacggcuuccgccaccagaacuccgagggcaccggccaggccgccgaccucaaguccacccaggccgccaucgaccagaucaacggcaagcucaaccgccucgucgagaagaccaacgagaaguuccaccagaucgagaaggaguucuccgaggucgagggccgcauccaggaccucgagaaguacgucgaggacaccaagaucgaccucugguccuacaacgccgagcuccucgucgcccucgagaaccagcacaccaucgaccucaccgacuccgagaugaacaagcucuucgagcgcacccgcaagcagcuccgcgagaacgccgaggacaugggcaacggcugcuucaagaucuaccacaagugcgacaacgccugcaucggcuccauccgcaacggcaccuacgaccacgacgucuaccgcgacgaggcccucaacaaccgcuuccagaucaagggcgucgagcucaaguccggcuacaaggacuggauccucuggaucuccuucgccaucuccugcuuccuccucugcgucguccuccucggcuucaucaugugggccugccagaagggcaacauccgcugcaacaucugcaucuga

SEQ ID NO: 97008 - RNA, 1701 nt, Artificial Sequence
  derived and/or modified CDS sequence (opt2) from hemagglutinin__InfluenzaA__ABG26912
augaagaccaucaucgcccucuccuacauccucugccucgucuucgcccagaagcuccccggcaacgacaacuccaccgccacccucugccucggccaccacgccguccccaacggcacccucgucaagaccaucaccaacgaccagaucgaggucaccaacgccaccgagcucguccaguccuccuccaccggccgcaucugcgacuccccccaccgcauccucgacggcaagaacugcacccucaucgacgcccuccucggcgacccccacugcgacggcuuccagaacaaggagugggaccucuucgucgagcgcuccaaggccuacuccaacugcuaccccuacgacguccccgacuacgccucccuccgcucccucgucgccuccuccggcacccucgaguucaccaaggagggcuucaacuggaccggcgucgcccaggacggcaaguccuacgccugcaagcgcggcuccgucaacuccuucuucucccgccucaacuggcuccacaagcucgaguacaaguaccccgcccucaacgucaccaugcccaacaacgacaaguucgacaagcucuacaucuggggcguccaccaccccuccaccgacuccgaccagaccucccucuacguccaggccuccggccgcgucaccgucuccaccaagcgcucccagcagaccgucauccccaacaucggcucccgccccuggguccgcggcaucuccucccgcaucuccaucuacuggaccaucgucaagcccggcgacauccuccucaucaacuccaccggcaaccucaucgccccccgcggcuacuucaagauccgcaacggcaaguccuccaucaugcgcuccgacgcccccaucuccaacugcaacuccgagugcaucacccccaacggcuccauccccaacgacaagcccuuccagaacgucaaccgcaucaccuacggcgccugcccccgcuacgucaagcagaacacccucaagcucgccaccggcaugcgcaacguccccgagaagcagacccgcggcaucuucggcgccaucgccggcuucaucgagaacggcugggagggcauggucgacggcugguacggcuuccgccaccagaacuccgagggcaccggccaggccgccgaccucaaguccacccaggccgccaucgaccagaucaacggcaagcucaaccgccucaucgagaagaccaacgagaaguuccaccagaucgagaaggaguucuccgaggucgagggccgcauccaggaccucgagaaguacgucgaggacaccaagaucgaccucugguccuacaacgccgagcuccucgucgcccucgagaaccagcacaccaucgaccucaccgacuccgagaugaacaagcucuucgagcgcacccgcaagcagcuccgcgagaacgccgaggacaugggcaacggcugcuucaagaucuaccacaagugcgacaacgccugcaucggcuccauccgcaacggcaccuacgaccacgacgucuaccgcgacgaggcccucaacaaccgcuuccagaucaagggcgucgagcucaaguccggcuacaaggacuggauccucuggaucuccuucgccaucuccugcuuccuccucugcgucguccuccucggcuucaucaugugggccugccagaagggcaacauccgcugcaacaucugcaucuga

SEQ ID NO: 97009 - RNA, 1698 nt, Artificial Sequence
  derived and/or modified CDS sequence (opt2) from hemagglutinin__InfluenzaA__ABG26945
augaaggccaagcuccucguccuccucugcaccuucaccgccaccuacgccgacaccaucugcaucggcuaccacgccaacaacuccaccgacaccgucgacaccguccucgagaagaacgucaccgucacccacuccgucaaccuccucgaggacucccacaacggcaagcucugccuccucaagggcaucgccccccuccagcucggcaacugcuccgucgccggcuggauccucggcaaccccgagugcgagcuccucaucuccaaggaguccugguccuacaucgucgagacccccaaccccgagaacggcaccugcuaccccggcuacuucgccgacuacgaggagcuccgcgagcagcucuccuccgucuccuccuucgagcgcuucgagaucuuccccaagggcuccuccuggcccaaccacaccgucaccggcgucuccgccuccugcucccacaacggcaaguccuccuucuaccgcaaccuccucuggcucaccggcaagaacggccucuaccccaaccucuccauguccuacgucaacaacaaggagaaggagguccucguccucuggggcguccaccacccccccaacaucggcaaccagcgcgcccucuaccacaccgagaacgccuacgucuccgucgucuccucccacuacucccgccgcuucacccccgagaucgccaagcgccccaagguccgcgaccaggagggccgcaucaacuacuacuggacccuccucgagcccggcgacaccaucaucuucgaggccuccggcaaccucaucgcccccugguacgccuucgcccucucccgcggcuucggcuccggcaucaucaccuccaacgcccccaugggcgagugcgacgccaagugccagaccccccagggcgccaucaacuccucccuccccuuccagaacguccaccccgucaccaucggcgagugccccaaguacguccgcuccgccaagcuccgcauggucaccggccuccgcaacauccccuccauccagucccgcggccucuucggcgccaucgccggcuucaucgagggcggcuggaccggcauggucgacggcugguacggcuaccaccaccagaacgagcagggcuccggcuacgccgccgaccagaaguccacccagaacgccaucaacggcaucaccaacaaggucaacuccgucaucgagaagaugaacacccaguucaccgccgucggcaaggaguucaacaagcucgagcgccgcauggagaaccucaacaagaaggucgacgacggcuuccucgacaucuggaccuacaacgccgagcuccucguccuccucgagaacgagcgcacccucgacuuccacgacuccaacgucaagaaccucuacgagaaggucaagucccagcucaagaacaacgccaaggagaucggcaacggcugcuucgaguucuaccacaagugcaacaacgagugcauggaguccgucaagaacggcaccuacgacuaccccaaguacuccgaggaguccaagcucaaccgcgagaagaucgacggcgucaagcucgaguccaugggcgucuaccagauccucgccaucuacuccaccgucgccuccucccucguccuccucgucucccucggcgccaucuccuucuggaugugcuccaacggcucccuccagugccgcaucugcaucuga

SEQ ID NO: 97010 - RNA, 1701 nt, Artificial Sequence
  derived and/or modified CDS sequence (opt2) from hemagglutinin__InfluenzaA__ABG26956
augaagaccaucaucgcccucuccuacauccucugccucgucuucgcccagaagcuccccggcaacgacaaccgcaccgccacccucugccucggccaccacgccguccccaacggcacccucgucaagaccaucaccaacgaccagaucgaggucaccaacgccaccgagcucguccaguccuccuccaccggccgcaucugcgacuccccccaccagauccucgacggcgagaacugcacccucaucgacgcccuccucggcgacccccacugcgacggcuuccagaacaaggagugggaccucuucgucgagcgcuccaaggccuacuccaacugcuaccccuacgacguccccgacuacgucucccuccgcucccucgucgccuccuccggcacccucgaguucaacaacgaguccuucaacuggaccggcgucgcccagaacggcaccuccuccgccugcaagcgccgcuccgacaaguccuucuucuccaagcucaacuggcuccaccagcucaaguacaaguaccccgcccucaacgucaccaugcccaacaacgagaaguucgacaagcucuacaucuggggcguccaccaccccggcaccgacuccgaccagaucucccucuacgcccaggccuccggccgcgucaccgucuccaccaagcgcucccagcagaccgucauccccaacaucggcucccgccccuggguccgcggcgucuccucccgcaucuccaucuacuggaccaucgucaagcccggcgacauccuccucaucaacuccaccggcaaccucaucgccccccgcggcuacuucaagauccgcuccggcaaguccuccaucaugcgcuccgacgcccccaucggcaagugcaacuccgagugcaucacccccaacggcuccauccccaacgacaagcccuuccagaacgucaaccgcaucaccuacggcgccugcccccgcuacgucaagcagaacacccucaagcucgccaccggcaugcgcaacguccccgagaagcagacccgcggcaucuucggcgccaucgccggcuucaucgagaacggcugggagggcaugauggacggcugguacggcuuccgccaccagaacuccgagggcaccggccaggccgccgaccucaaguccacccaggccgccaucaaccagaucaacggcaagcucaaccgccucaucgagaagaccaacgagaaguuccaccagaucgagaaggaguucuccgaggucgagggccgcauccaggaccucgagaaguacgucgaggacaccaagaucgaccucugguccuacaacgccgagcuccucgucgcccucgagaaccagcacaccaucgaccucaccgacuccgagaugaacaagcucuucgagcgcaccaagaagcagcuccgcgagaacgccgaggacaugggcaacggcugcuucaagaucuaccacaagugcgacaacgccugcaucggcuccauccgcaacggcaccuacgaccacgacgucuaccgcgacgaggcccucaacaaccgcuuccagaucaagggcgucgagcucaaguccggcuacaaggacuggguccucuggaucuccuucgccaucuccugcuuccuccucugcaucguccuccucggcuucaucaugugggccugccagaagggcaacauccgcugcaacaucugcaucuga

SEQ ID NO: 97011 - RNA, 1698 nt, Artificial Sequence
  derived and/or modified CDS sequence (opt2) from hemagglutinin__InfluenzaA__ABG37120
augaaggccaagcuccucguccuccucugcaccuucaccgccaccuacgccgacaccaucugcaucggcuaccacgccaacaacuccaccgacaccgucgacaccguccucgagaagaacgucaccgucacccacuccgucaaccuccucgaggacucccacaacggcaagcucugccuccucaagggcaucgccccccuccagcucggcaacugcuccgucgccggcuggauccucggcaaccccgagugcgagcuccucaucuccaaggaguccugguccuacaucgucgagacccccaaccccgagaacggcaccugcuaccccggcuacuucgccgacuacgaggagcuccgcgagcagcucuccuccgucuccuccuucgagcgcuucgagaucuuccccaagggcuccuccuggcccaaccacaccgucaccggcgucuccgccuccugcucccacaacggcgaguccuccuucuaccgcaaccuccucuggcucaccggcaagaacggccucuaccccaaccucuccauguccuacgucaacaacaaggagaaggagguccucguccucuggggcguccaccacccccccaacaucggcaaccagcgcgcccucuaccacaccgagaacgccuacgucuccgucgucuccucccacuacucccgccgcuucacccccgagaucgccaagcgccccaagguccgcgaccaggagggccgcaucaacuacuacuggacccuccucgagcccggcgacaccaucaucuucgaggccaacggcaaccucaucgcccccugguacgccuucgcccucucccgcggcuucggcuccggcaucaucaccuccaacgcccccaugggcgagugcgacgccaagugccagaccccccagggcgccaucaacuccucccuccccuuccagaacguccaccccgucaccaucggcgagugccccaaguacguccgcuccgccaagcuccgcauggucaccggccuccgcaacauccccuccauccagucccgcggccucuucggcgccaucgccggcuucaucgagggcggcuggaccggcauggucgacggcugguacggcuaccaccaccagaacgagcagggcuccggcuacgccgccgaccagaaguccacccagaacgccaucaacggcaucaccaacaaggucaacuccgucaucgagaagaugaacacccaguucaccgccgucggcaaggaguucaacaagcucgagcgccgcauggagaaccucaacaagaaggucgacgacggcuuccucgacaucuggaccuacaacgccgagcuccucguccuccucgagaacgagcgcacccucgacuuccacgacuccaacgucaagaaccucuacgagaaggucaagucccagcucaagaacaacgccaaggagaucggcaacggcugcuucgaguucuaccacaagugcaacaacgagugcauggaguccgucaagaacggcaccuacgacuaccccaaguacuccgaggaguccaagcucaaccgcgagaagaucgacggcgucaagcucgaguccaugggcgucuaccagauccucgccaucuacuccaccgucgccuccucccucguccuccucgucucccucggcgccaucuccuucuggaugugcuccaacggcucccuccagugccgcaucugcaucuga

SEQ ID NO: 97012 - RNA, 1701 nt, Artificial Sequence
  derived and/or modified CDS sequence (opt2) from hemagglutinin__InfluenzaA__ABG37131
augaagaccaucaucgcccucuccuacaucuccugccucgucuucgcccagaagcuccccggcaacgacaacuccaccgccacccucugccucggccaccacgccguccccaacggcacccucgucaagaccaucaccaacgaccagaucgaggucaccaacgccaccgagcucguccaguccuccuccaccggccgcaucugcgacggcccccaccagauccucgacggcaagaacugcacccucaucgacgcccuccucggcgacccccacugcgacggcuuccagaacaaggagugggaccucuucgucgagcgcuccaaggccuacuccaacugcuaccccuacgacguccccgacuacgccucccuccgcucccucgucgccuccuccggcacccucgaguucaccaacgaguccuucaacuggaccggcgucgcccagaacggcaccuccuacgccugcaagcgcggcuccgucaaguccuucuucucccgccucaacuggcuccacaagcucgaguacaaguaccccgcccucaacgucaccaugcccaacaacgacaaguucgacaagcucuacaucuggggcguccaccaccccuccaccgacuccgaccagaccucccucuacguccaguccuccggccgcgucaccgucuccaccaagcgcucccagcagaccgucacccccaacaucggcucccgccccuggguccgcggcaucuccucccgcaucuccaucuacuggaccaucgucaagcccggcgacauccuccucaucaacuccaccggcaaccucaucgccccccgcggcuacuucaagauccgccgcggcaaguccuccaucaugcgcuccgacgcccccaucgacaacugcaacuccgagugcaucacccccaacggcuccauccccaacgacaagcccuuccagaacgucaaccgcaucaccuacggcgccugcccccgcuacgucaagcagaacacccucaagcucgccaccggcaugcgcaacguccccgagaagcagacccgcggcaucuucggcgccaucgccggcuucaucgagaacggcugggagggcauggucgacggcugguacggcuuccgccaccagaacuccgagggcaccggccaggccgccgaccucaaguccacccaggccgccaucaaccagaucaacggcaagcucaaccgccucaucgagaagaccaacgagaaguuccaccagaucgagaaggaguucuccgaggucgagggccgcauccaggaccucgagaaguacgucgaggacaccaagaucgaccucugguccuacaacgccgagcuccucgucgcccucgagaaccagcacaccaucgaccucaccgacuccgagaugaacaagcucuucgagcgcacccgcaagcagcuccgcgagaacgccgaggacaugggcaacggcugcuucaagaucuaccacaagugcgacaacgccugcaucggcuccauccgcaacggcaccuacgaccacgacgucuaccgcgacgaggcccucaacaaccgcuuccagaucaagggcgucgagcucaaguccggcuacaaggacuggauccucuggaucuccuucgccaucuccugcuuccuccucugcgucguccuccucggcuucaucaugugggccugccagaagggcaacauccgcugcaacaucugcaucuga

SEQ ID NO: 97013 - RNA, 1701 nt, Artificial Sequence; identical to SEQ ID NO: 96819
  derived and/or modified CDS sequence (opt2) from hemagglutinin__InfluenzaA__ABG37142

SEQ ID NO: 97014 - RNA, 1701 nt, Artificial Sequence
  derived and/or modified CDS sequence (opt2) from hemagglutinin__InfluenzaA__ABG37164
augaagaccaucaucgcccucuccuacauccucugccucgucuucgcccagaagcuccccggcaacgacaacuccaccgccacccucugccucggccaccacgccguccccaacggcacccucgucaagaccaucaccaacgaccagaucgaggucaccaacgccaccgagcucguccaguccuccuccaccggccgcaucugcgacuccccccaccgcauccucgacggcaagaacugcacccucaucgacgcccuccucggcgacccccacugcgacgacuuccagaacaaggagugggaccucuucgucgagcgcuccaaggccuacuccaacugcuaccccuacgacguccccgacuacgccucccuccgcucccucgucgccuccuccggcacccucgaguucaccaaggagggcuucaacuggaccggcgucgcccaggacggcaaguccuacgccugcaagcgcggcuccgucaacuccuucuucucccgccucaacuggcuccacaagcucgaguacaaguaccccgcccucaacgucaccaugcccaacaacgacaaguucgacaagcucuacaucuggggcguccaccaccccuccaccgacuccgaccagaccucccucuacguccaggccuccggccgcgucaccgucuccaccaagcgcucccagcagaccgucauccccaacaucggcucccgccccuggguccgcggcaucuccucccgcaucuccaucuacuggaccaucgucaagcccggcgacauccuccucaucaacuccaccggcaaccucaucgccccccgcggcuacuucaagauccgcaacggcaaguccuccaucaugcgcuccgacgcccccaucggcaacugcaacuccgagugcaucacccccaacggcuccauccccaacgacaagcccuuccagaacgucaaccgcaucaccuacggcgccugcccccgcuacgucaagcagaacacccucaagcucgccaccggcaugcgcaacguccccgagaagcagacccgcggcaucuucggcgccaucgccggcuucaucgagaacggcugggagggcauggucgacggcugguacggcuuccgccaccagaacuccgagggcaccggccaggccgccgaccucaaguccacccaggccgccaucgaccagaucaacggcaagcucaaccgccucaucgagaagaccaacgagaaguuccaccagaucgagaaggaguucuccgaggucgagggccgcauccaggaccucgagaaguacgucgaggacaccaagaucgaccucugguccuacaacgccgagcuccucgucgcccucgagaaccagcacaccaucgaccucaccgacuccgagaugaacaagcucuucgagcgcacccgcaagcagcuccgcgagaacgccgaggacaugggcaacggcugcuucaagaucuaccacaagugcgacaacgccugcaucggcuccauccgcaacggcaccuacgaccacgacgucuaccgcgacgaggcccucaacaaccgcuuccagaucaagggcgucgagcucaaguccggcuacaaggacuggauccucuggaucuccuucgccaucuccugcuuccuccucugcgucguccuccucggcuucaucaugugggccugccagaagggcaacauccgcugcaacaucugcaucuga

SEQ ID NO: 97015 - RNA, 1701 nt, Artificial Sequence
  derived and/or modified CDS sequence (opt2) from hemagglutinin__InfluenzaA__ABG37175
augaagaccaucaucgcccucuccuacauccucugccaggucuucgccaagaagcuccccggcaacgacaacuccaccgccacccucugccucggccaccacgccguccccaacggcacccucgucaagaccaucaccaacgaccagaucgaggucaccaacgccaccgagcucguccaguccuccuccaccggccgcaucugcgacuccccccaccgcauccucgacggcaagaacugcacccucaucgacgcccuccucggcgacccccacugcgacggcuuccagaacaaggagugggaccucuucgucgagcgcuccaaggccuacuccaacugcuaccccuacgacguccccgacuacgccucccuccgcucccucgucgccuccuccggcacccucgaguucaccaacgagggcuucaacuggaccggcgucgcccaggacggcaaguccuacuccugcaagcgcggcuccgucaacuccuucuucucccgccucaacuggcuccacaagcucgaguacaaguaccccgcccucaacgucaccaugcccaacaacgacaaguucgacaagcucuacaucuggggcguccaccaccccuccaccgacuccgaccagaccucccucuacguccaggccuccggccgcgucaccgucuccaccaagcgcucccagcagaccgucauccccaacaucggcucccgccccuggguccgcggcaucuccucccgcaucuccaucuacuggaccaucgucaagcccggcgacauccuccucaucaacuccaccggcaaccucaucgccccccgcggcuacuucaagauccgcaacggcaaguccuccaucaugcgcuccgacgcccccaucgacaacugcaacuccgagugcaucacccccaacggcuccauccccaacgacaagcccuuccagaacgucaaccgcaucaccuacggcgccugcccccgcuacgucaagcagaacacccucaagcucgccaccggcaugcgcaacguccccgagaagcagacccgcggcaucuucggcgccaucgccggcuucaucgagaacggcugggagggcauggucgacggcugguacggcuuccgccaccagaacuccgagggcaccggccaggccgccgaccucaaguccacccaggccgccaucgaccagaucaacggcaagcucaaccgccucaucgagaagaccaacgagaaguuccaccagaucgagaaggaguucuccgaggucgagggccgcauccaggaccucgagaaguacgucgaggacaccaagaucgaccucugguccuacaacgccgagcuccucgucgcccucgagaaccagcacaccaucgaccucaccgacuccgagaugaacaagcucuucgagcgcacccgcaagcagcuccgcgagaacgccgaggacaugggcaacggcugcuucaagaucuaccacaagugcgacaacgccugcaucggcuccauccgcaacggcaccuacgaccacgacgucuaccgcgacgaggcccucaacaaccgcuuccagaucaagggcgucgagcucaaguccggcuacaaggacuggauccucuggaucuccuucgccaucuccugcuuccuccucugcgucguccuccucggcuucaucaugugggccugccagaagggcaacauccgcugcaacaucugcaucuga

SEQ ID NO: 97016 - RNA, 1701 nt, Artificial Sequence
  derived and/or modified CDS sequence (opt2) from hemagglutinin__InfluenzaA__ABG37186
augaagaccaucaucgcccucuccuacauccucugccaggucuucgcccagaagcuccccggcaacgacaacuccaccgccacccucugccucggccaccacgccguccccaacggcacccucgucaagaccaucaccaacgaccagaucgaggucaccaacgccaccgagcucguccaguccuccuccaccggccgcaucugcgacuccccccaccgcauccucgacggcaagaacugcacccucaucgacgcccuccucggcgacccccacugcgacggcuuccagaacaaggagugggaccucuucgucgagcgcuccaaggccuacuccaacugcuaccccuacgacguccccgacuacgccucccuccgcucccucgucgccuccuccggcacccucgaguucaccaacgagggcuucaacuggaccggcgucgcccaggacggcaaguccuacgccugcaagcgcggcuccgucaacuccuucuucucccgccucaacuggcuccacaagcucgaguacaaguaccccgcccucaacgucaccaugcccaacaacgacaaguucgacaagcucuacaucuggggcguccaccaccccuccaccgacuccgaccagaccucccucuacguccaggccuccggccgcgucaccgucuccaccaagcgcucccagcagaccgucauccccaacaucggcucccgccccuggguccgcggcaucuccucccgcaucuccaucuacuggaccaucgucaagcccggcgacauccuccucaucuccuccaccggcaaccucaucgccccccgcggcuacuucaagauccgcaacggcaaguccuccaucaugcgcuccgacgcccccaucgacaacugcaacuccgagugcaucacccccaacggcuccauccccaacgacaagcccuuccagaacgucaaccgcgucaccuacggcgccugcccccgcuacgucaagcagaacacccucaagcucgccaccggcaugcgcaacguccccgagaagcagacccgcggcaucuucggcgccaucgccggcuucaucgagaacggcugggagggcauggucgacggcugguacggcuuccgccaccagaacuccgagggcaccggccaggccgccgaccucaaguccacccaggccgccaucgaccagaucaacggcaagcucaaccgccucaucgagaagaccaacgagaaguuccaccagaucgagaaggaguucuccgaggucgagggccgcauccaggaccucgagaaguacgucgaggacaccaagaucgaccucugguccuacaacgccgagcuccucgucgcccucgagaaccagcacaccaucgaccucaccgacuccgagaugaacaagcucuucgagcgcacccgcaagcagcuccgcgagaacgccgaggacaugggcaacggcugcuucaagaucuaccacaagugcgacaacgccugcaucggcuccauccgcaacggcaccuacgaccacgacgucuacaaggacgaggcccucaacaaccgcuuccagaucaagggcgucguccucaaguccggcuacaaggacuggauccucuggaucuccuucgccaucuccugcuuccuccucugcgucguccuccucggcuucaucaugugggccugccagaagggcaacauccgcugcaacaucugcaucuga

SEQ ID NO: 97017 - RNA, 1701 nt, Artificial Sequence
  derived and/or modified CDS sequence (opt2) from hemagglutinin__InfluenzaA__ABG37197
augaagaccaucaucgcccucuccuacauccucugccaggucuucgcccagaagcuccccggcaacgacaacuccaccgccacccucugccucggccaccacgccguccccaacggcacccucgucaagaccaucaccaacgaccagaucgaggucaccaacgccaccgagcucguccaguccuccuccaccggccgcaucugcgacuccccccaccgcauccucgacggcaagaacugcacccucaucgacgcccuccucggcgacccccacugcgacggcuuccagaacaaggagugggaccucuucgucgagcgcuccaaggccuacuccaacugcuaccccuacgacguccccgacuacgccucccuccgcucccucgucgccuccuccggcacccucgaguucaccaacgagggcuucaacuggaacggcgucgcccaggacggcaaguccuacgccugcaagcgcggcuccgucaaguccuucuucucccgccucaacuggcuccacaagcucgaguacaaguaccccgcccucaacgucaccaugcccaacaacgacaaguucgacaagcucuacaucuggggcguccaccaccccuccaccgacuccgaccagaccucccucuacguccaggccuccggccgcgucaccgucuccaccaagcgcucccagcagaccgucauccccaacaucggcucccgccccuggguccgcggcaucuccucccgcaucuccaucuacuggaccaucgucaagcccggcgacauccuccucaucaacuccaccggcaaccucaucgccccccgcggcuacuucaagauccgcaacggcaaguccuccaucaugcgcuccgacgcccccaucgacaacugcaacuccgagugcaucacccccaacggcuccauccccaacgacaagcccuuccagaacgucaaccgcaucaccuacggcgccugcccccgcuacgucaagcagaacacccucaagcucgccaccggcaugcgcaacguccccgagaagcagacccgcggcaucuucggcgccaucgccggcuucaucgagaacggcugggagggcauggucgacggcugguacggcuuccgccaccagaacuccgagggcaccggccaggccgccgaccucaaguccacccaggccgccaucgaccagaucaacggcaagcucaaccgccucaucgagaagaccaacgagaaguuccaccagaucgagaaggaguucuccgaggucgagggccgcauccaggaccucgagaaguacgucgaggacaccaagaucgaccucugguccuacaacgccgagcuccucgucgcccucgagaaccagcacaccaucgaccucaccgacuccgagaugaacaagcucuucgagcgcacccgcaagcagcuccgcgagaacgccgaggacaugggcaacggcugcuucaagaucuaccacaagugcgacaacgccugcaucggcuccauccgcaacggcaccuacgaccacgacgucuaccgcgacgaggcccucaacaaccgcuuccagaucaagggcgucgagcucaaguccggcuacaaggacuggauccucuggaucuccuucgccaucuccugcuuccuccucugcgucguccuccucggcuucaucaugugggccugccagaagggcaacauccgcugcaacaucugcaucuga

SEQ ID NO: 97018 - RNA, 1701 nt, Artificial Sequence
  derived and/or modified CDS sequence (opt2) from hemagglutinin__InfluenzaA__ABG37208
augaagaccaucaucgcccucuccuacaucuccugccucgucuucgcccagaagcuccccggcaacgacaacuccaccgccacccucugccucggccaccacgccguccccaacggcacccucgucaagaccaucaccaacgaccagaucgaggucaccaacgccaccgagcucguccaguccuccuccaccggccgcaucugcgacuccccccaccgcauccucgacggcaagaacugcacccucaucgacgcccuccucggcgacccccacugcgacggcuuccagaacgagaagugggaccucuucgucgagcgcuccaaggccuucuccaacugcuaccccuacgacguccccgacuacgccucccuccgcucccucgucgccuccuccggcacccucgaguucaucaacgagggcuucaacuggaccggcgucacccaguccggcggcuccuacgccugcaagcgcggcuccgucaacuccuucuucucccgccucaacuggcucuacaaguccgaguccaaguaccccgcccucaacgucaccaugcccaacaacggcaaguucgacaagcucuacaucuggggcguccaccaccccuccaccgacaaggagcagaccaaccucuacguccgcgccuccggccgcgucaccgucuccaccaagcgcucccagcagaccgucauccccaacaucggcccccgccccuggguccgcggccucuccucccgcaucuccaucuacuggaccaucgucaagcccggcgacauccuccucaucaacuccaccggcaaccucaucgccccccgcggcuacuucaagauccgcaccggcaaguccuccaucaugcgcuccgacgcccccaucggcaccugcuccuccggcugcaucacccccaacggcuccauccccaacgacaagcccuuccagaacgucaacaagaucaccuacggcgccugcccccgcuacgucaagcagaacacccucaagcucgccaccggcaugcgcaacguccccgagaagcagacccgcggcaucuucggcgccaucgccggcuucaucgagaacggcugggagggcauggucgacggcugguacggcuuccgccaccagaacuccgagggcaccggccaggccgccgaccucaaguccacccaggccgccaucgaccagaucaacggcaagcucaaccgccucaucgagaagaccaacgagaaguuccaccagaucgagaaggaguucuccgaggucgagggccgcauccaggaccucgagaaguacgucgaggacaccaagaucgaccucugguccuacaacgccgagcuccucgucgcccucgagaaccagcacaccaucgacaugaccgacuccgagaugaacaagcucuucgagaagacccgcaagcagcuccgcgagaacgccgaggacaugggcaacggcugcuucaagaucuaccacaagugcgacaacgccugcaucggcuccauccgcaacggcaccuacgaccacgacgucuaccgcgacgaggcccucaacaaccgcuuccagaucaagggcgucgagcucaaguccggcuacaaggacuggauccucuggaucuccuucgccaucuccugcuuccuccucugcgucguccuccucggcuucaucaugugggccugccagaagggcaacauccgcugcaacaucugcaucuga

SEQ ID NO: 97019 - RNA, 1701 nt, Artificial Sequence
  derived and/or modified CDS sequence (opt2) from hemagglutinin__InfluenzaA__ABG37230
augaagaccaucaucgcccucuccuacauccucugccucgucuucgcccagaagcuccccggcaacgacaacuccaccgccacccucugccucggccaccacgccguccccaacggcacccucgucaagaccaucaccaacgaccagaucgaggucaccaacgccaccgagcucguccaguccuccuccaccggccgcaucugcgacuccccccaccgcauccucgacggcaagaacugcacccucaucgacgcccuccucggcgacccccacugcgacggcuuccagaacaaggagugggaccucuucgucgagcgcuccaaggccuacuccaacugcuaccccuacgacguccccgacuacgccucccuccgcucccucgucgccuccuccggcacccucgaguucaucaacgaggacuucaacuggaccggcgucgcccaggacggcaaguccuacgccugcaagcgcggcuccgucaacuccuucuucucccgccucaacuggcuccaccaguccaaguacaaguaccccgagcucaacgucaccaugcccaacaacggcaaguucgacaagcucuacaucuggggcguccaccaccccuccaccgacuccgaccagaccucccucuacgcccgcgccuccggccgcgucaccgucuccaccaagcgcucccagcagaccgucauccccaacaucggcuuccgccccuggguccgcggccucuccucccgcaucuccaucuacuggaccaucgucaagcccggcgacauccuccucaucaacuccaccggcaaccucaucgccccccgcggcuacuucaagauccgcaacggcaaguccuccaucaugcgcuccgacgcccccaucggcaacugcuccuccgagugcaucacccccaacggcuccauccccaacgacaagcccuuccagaacgucaaccgcaucaccuacggcgccugcccccgcuacgucaagcagaacacccucaagcucgccaccggcaugcgcaacguccccgagaagcagacccgcggcaucuucggcgccaucgccggcuucaucgagaacggcugggagggcauggucgacggcugguacggcuuccgccaccagaacuccgagggcaccggccaggccgccgaccucaaguccacccaggccgccaucgaccagaucaacggcaagcucaaccgccucaucgagaagaccaacgagaaguuccaccagaucgagaaggaguucuccgaggucgagggccgcauccaggaccucgagaaguacgucgaggacaccaagaucgaccucugguccuacaacgccggccuccucgucgcccucgagaaccagcacaccaucgaccucaccgacuccgagaugaacaagcucuucgagcgcacccgcaagcagcuccgcgagaacgccgaggacaugggcaacggcugcuucaagaucuaccacaagugcgacaacgccugcaucggcuccauccgcaacggcaccuacgaccacgacgucuaccgcgacgaggcccucaacaaccgcuuccagaucaagggcgucgagcucaaguccggcuacaaggacuggauccucuggaucuccuucgccaucuccugcuuccuccucugcgucguccuccucggcuucaucaugugggccugccagaagggcaacauccgcugcaacaucugcaucuga

SEQ ID NO: 97020 - RNA, 1701 nt, Artificial Sequence
  derived and/or modified CDS sequence (opt2) from hemagglutinin__InfluenzaA__ABG37241
augaagaccaucaucgcccucuccuacauccucugccucgucuucgcccagaagcuccccggcaacgacaacuccaccgccacccucugccucggccaccacgccguccccaacggcacccucgucaagaccaucaccaacgaccagaucgaggucaccaacgccaccgagcucguccaguccucccccaccggccgcaucugcgacuccccccaccgcauccucgacggcaagaacugcacccucaucgacgcccuccucggcgacccccacugcgacggcuuccagaacaaggagugggaccucuucgucgagcgcuccaaggccuacuccaacugcuaccccuacgacguccccgacuacgccucccuccgcucccucgucgccuccuccggcacccucgaguucaccaacgagaacuucaacuggaccggcgucgcccaggacggcaaguccuacgccugcaagcgcggcuccgucaacuccuucuucucccgccucaacuggcuccacaagcucgaguacaaguaccccgcccucaacgucaccaugcccaacaacggcaaguucgacaagcucuacaucuggggcguccaccaccccuccaccgacuccgaccagaccucccucuacguccgcgccuccggcaaggucaccgucuccaccaagcgcucccagcagaccgucauccccgacaucggcuaccgccccuggguccgcggccucuccucccgcaucuccaucuacuggaccaucgucaagcccggcgacauccuccucaucaacuccaccggcaaccucaucgccccccgcggcuacuucaagauccgcaacggcaaguccuccaucaugcgcuccgacgcccccaucggcaacugcuccuccgagugcaucacccccaacggcuccauccccaacgacaagcccuuccagaacgucaaccgcaucaccuacggcgccugcccccgcuacgucaagcagaacacccucaagcucgccaccggcaugcgcaacguccccgagaagcagacccgcggcaucuucggcgccaucgccggcuucaucgagaacggcugggagggcauggucgacggcugguacggcuuccgccaccagaacuccgagggcaccggccaggccgccgaccucaaguccacccaggccgccaucgaccagaucaacggcaagcucaaccgccucgucgagaagaccaacgagaaguuccaccagaucgagaaggaguucuccgaggucgagggccgcauccaggaccucgagaaguacgucgaggacaccaagaucgaccucugguccuacaacgccgagcuccucgucgcccucgagaaccagcacaccaucgaccucaccgacuccgagaugaacaagcucuucgagcgcacccgcaagcagcuccgcgagaacgccgaggacaugggcaacggcugcuucaagaucuaccacaagugcgacaacgccugcaucggcuccauccgcaacggcaccuacgaccacgacgucuaccgcgacgaggcccucaacaaccgcuuccagaucaagggcgucgagcucaaguccggcuacaaggacuggauccucuggaucuccuucgccaucuccugcuuccuccucugcgucguccuccucggcuucaucaugugggccugccagaagggcaacauccgcugcaacaucugcaucuga

SEQ ID NO: 97021 - RNA, 1701 nt, Artificial Sequence
  derived and/or modified CDS sequence (opt2) from hemagglutinin__InfluenzaA__ABG37252
augaagaccaucaucgcccucuccuacauccucugccucgucuucgcccagaagcucaccggcaacgacaacuccaccgccacccucugccucggccaccacgccguccccaacggcacccucgucaagaccaucaccaacgaccagaucgaggucaccaacgccaccgagcucguccaguccucccccaccggccgcaucugcgacuccccccaccgcauccucgacggcaagaacugcacccucaucgacgcccuccucggcgacccccacugcgacggcuuccagaacaaggagugggaccucuucgucgagcgcuccaaggccuacuccaacugcuaccccuacgacguccccgacuacgccucccuccgcucccucgucgccuccuccggcacccucgaguucaccaacgagaacuucaacuggaccggcgucgcccaggacggcaaguccuacgccugcaagcgcggcuccgucaacuccuucuucucccgccucaacuggcuccacaagcucgaguacaaguaccccgcccucaacgucaccaugcccaacaacggcaaguucgacaagcucuacaucuggggcguccaccaccccuccaccgacuccgaccagaccucccucuacguccgcgccuccggcaaggucaccgucuccaccaagcgcucccagcagaccgucauccccgacaucggcuaccgccccuggguccgcggccucuccucccgcaucuccaucuacuggaccaucgucaagcccggcgacauccuccucaucaacuccaccggcaaccucaucgccccccgcggcuacuucaagauccgcaacggcaaguccuccaucaugcgcuccgacgcccccaucggcaacugcuccuccgagugcaucacccccaacggcuccauccccaacgacaagcccuuccagaacgucaaccgcaucaccuacggcgccugcccccgcuacgucaagcagaacacccucaagcucgccaccggcaugcgcaacguccccgagaagcagacccgcggcaucuucggcgccaucgccggcuucaucgagaacggcugggagggcauggucgacggcugguacggcuuccgccaccagaacuccgagggcaccggccaggccgccgaccucaaguccacccaggccgccaucgaccagaucaacggcaagcucaaccgccucgucgagaagaccaacgagaaguuccaccagaucgagaaggaguucuccgaggucgagggccgcauccaggaccucgagaaguacgucgaggacaccaagaucgaccucugguccuacaacgccgagcuccucgucgcccucgagaaccagcacaccaucgaccucaccgacuccgagaugaacaagcucuucgagcgcacccgcaagcagcuccgcgagaacgccgaggacaugggcaacggcugcuucaagaucuaccacaagugcgacaacgccugcaucggcuccauccgcaacggcaccuacgaccacgacgucuaccgcgacgaggcccucaacaaccgcuuccagaucaagggcgucgagcucaaguccggcuacaaggacuggauccucuggaucuccuucgccaucuccugcuuccuccucugcgucguccuccucggcuucaucaugugggccugccagaagggcaacauccgcugcaacaucugcaucuga

SEQ ID NO: 97022 - RNA, 1701 nt, Artificial Sequence
  derived and/or modified CDS sequence (opt2) from hemagglutinin__InfluenzaA__ABG37263
augaagaccaucaucgcccucuccuacauccucugccucgucuucgcccagaagcuccccggcaacgacaacuccaccgccacccucugccucggccaccacgccguccccaacggcacccucgucaagaccaucaccaacgaccagaucgaggucaccaacgccaccgagcucguccaguccuccuccaccggccgcaucugcgacuccccccaccgcauccucgacggcaagaacugcacccucaucgacgcccuccucggcgacccccacugcgacggcuuccagaacaaggagugggaccucuucgucgagcgcuccaaggccuacuccaacugcuaccccuacgacguccccgacuacgccucccuccgcucccucgucgccuccuccggcacccucgaguucaccaaggagggcuucaacuggaccggcgucgcccaggacggcaaguccuacgccugcaagcgcggcuccgucaacuccuucuucucccgccucaacuggcuccacaagcucgaguacaaguaccccgcccucaacgucaccaugcccaacaacgacaaguucgacaagcucuacaucuggggcguccaccaccccuccaccgacuccgaccagaccucccucuacguccaggccuccggccgcgucaccgucuccaccaagcgcucccagcagaccgucauccccaacaucggcucccgccccuggguccgcggcaucuccucccgcaucuccaucuacuggaccaucgucaagcccggcgacauccuccucaucaacuccaccggcaaccucaucgccccccgcggcuacuucaagauccgcaacggcaaguccuccaucaugcgcuccgacgcccccaucggcaacugcaacuccgagugcaucacccccaacggcuccauccccaacgacaagcccuuccagaacgucaaccgcaucaccuacggcgccugcccccgcuacgucaagcagaacacccucaagcucgccaccggcaugcgcaacguccccgagaagcagacccgcggcaucuucggcgccaucgccggcuucaucgagaacggcugggagggcauggucgacggcugguacggcuuccgccaccagaacuccgagggcaccggccaggccgccgaccucaaguccacccaggccgccaucgaccagaucaacggcaagcucaaccgccucaucgagaagaccaacgagaaguuccaccagaucgagaaggaguucuccgaggucgagggccgcauccaggaccucgagaaguacgucgaggacaccaagaucgaccucugguccuacaacgccgagcuccucgucgcccucgagaaccagcacaccaucgaccucaccgacuccgagaugaacaagcucuucgagcgcacccgcaagcagcuccgcgagaacgccgaggacaugggcaacggcugcuucaagaucuaccacaagugcgacaacaccugcaucggcuccauccgcaacggcaccuacgaccacgacgucuaccgcgacgaggcccucaacaaccgcuuccagaucaagggcgucgagcucaaguccggcuacaaggacuggauccucuggaucuccuucgccaucuccugcuuccuccucugcgucguccuccucggcuucaucaugugggccugccagaagggcaacauccgcugcaacaucugcaucuga

SEQ ID NO: 97023 - RNA, 1701 nt, Artificial Sequence
  derived and/or modified CDS sequence (opt2) from hemagglutinin__InfluenzaA__ABG37274
augaagaccaucaucgcccucuccuacauccucugccucgucuucgcccagaagcuccccggcaacgacaacuccaccgccacccucugccucggccaccacgccguccccaacggcacccucgucaagaccaucaccaacgaccagaucgaggucaccaacgccaccgagcucguccaguccucccccaccggccgcaucugcgacuccccccaccgcauccucgacggcaagaacugcacccucaucgacgcccuccucggcgacccccacugcgacggcuuccagaacaaggagugggaccucuucgucgagcgcuccaaggccuacuccaacugcuaccccuacgacguccccgacuacgccucccuccgcucccucgucgccuccuccggcacccucgaguucaccaacgagaacuucaacuggaccggcgucgcccaggacggcaaguccuacgccugcaagcgcggcuccgucaacuccuucuucucccgccucaacuggcuccacaagcucgaguacaaguaccccgcccucaacgucaccaugcccaacaacggcaaguucgacaagcucuacaucuggggcguccaccaccccuccaccgacuccgaccagaucucccucuacguccgcgccuccggcaaggucaccgucuccaccaagcgcucccagcagaccgucauccccgacaucggcuaccgccccuggguccgcggccucuccucccgcaucuccaucuacuggaccaucgucaagcccggcgacauccuccucaucuccuccaccggcaaccucaucgccccccgcggcuacuucaagauccgcaacggcaaguccuccaucaugcgcuccgacgcccccaucggcaacugcuccuccgagugcaucacccccaacggcuccauccccaacgacaagcccuuccagaacgucaaccgcaucaccuacggcgccugcccccgcuacgucaagcagaacacccucaagcucgccaccggcaugcgcaacguccccgagaagcagacccgcggcaucuucggcgccaucgccggcuucaucgagaacggcugggagggcauggucgacggcugguacggcuuccgccaccagaacuccgagggcaccggccaggccgccgaccucaaguccacccaggccgccaucgaccagaucaacggcaagcucaaccgccucgucgagaagaccaacgagaaguuccaccagaucgagaaggaguucuccgaggucgagggccgcauccaggaccucgagaaguacgucgaggacaccaagaucgaccucugguccuacaacgccgagcuccucgucgcccucgagaaccagcacaccaucgaccucaccgacuccgagaugaacaagcucuucgagcgcacccgcaagcagcuccgcgagaacgccgaggacaugggcaacggcugcuucaagaucuaccacaagugcgacaacgccugcaucggcuccauccgcaacggcaccuacgaccacgacgucuaccgcgacgaggcccucaacaaccgcuuccagaucaagggcgucgagcucaaguccggcuacaaggacuggauccucuggaucuccuucgccaucuccugcuuccuccucugcgucguccuccucggcuucaucaugugggccugccagaagggcaacauccgcugcaacaucugcaucuga

SEQ ID NO: 97024 - RNA, 1701 nt, Artificial Sequence
  derived and/or modified CDS sequence (opt2) from hemagglutinin__InfluenzaA__ABG37285
augaagaccaucaucgcccucuccuacauccucugccucgucuucgcccagaagcuccccggcaacgacaacuccaccgccacccucugccucggccaccacgccguccccaacggcacccucgucaagaccaucaccaacgaccagaucgaggucaccaacgccaccgagcucguccaguccucccccaccggccgcaucugcgacuccccccaccgcauccucgacggcaagaacugcacccucaucgacgcccuccucggcgacccccacugcgacggcuuccagaacaaggagugggaccucuucgucgagcgcuccaaggccuacuccaacugcuaccccuacgacguccccgacuacgccucccuccgcucccucgucgccuccuccggcacccucgaguucaccaacgagaacuucaacuggaccggcgucgcccaggacggcaaguccuacgccugcaagcgcggcuccgucaacuccuucuucucccgccucaacuggcuccacaagcucgacuacaaguaccccgcccucaacgucaccaugcccaacaacggcaaguucgacaagcucuacaucuggggcguccaccaccccuccaccgacuccgaccagaccucccucuacguccgcgccuccggcaaggucaccgucuccaccaagcgcucccagcagaccgucauccccgacaucggcuaccgccccuggguccgcggccucuccucccgcaucuccaucuacuggaccaucgucaagcccggcgacauccuccucaucaacuccaccggcaaccucaucgccccccgcggcuacuucaagauccgcaacggcaaguccuccaucaugcgcuccgacgcccccaucggcaacugcuccuccgagugcaucacccccaacggcuccauccccaacgacaagcccuuccagaacgucaaccgcaucaccuacggcgccugcccccgcuacgucaagcagaacacccucaagcucgccaccggcaugcgcaacguccccgagaagcagacccgcggcaucuucggcgccaucgccggcuucaucgagaacggcugggagggcauggucgacggcugguacggcuuccgccaccagaacuccgagggcaccggccaggccgccgaccucaaguccacccaggccgccaucgaccagaucaacggcaagcucaaccgccucgucgagaagaccaacgagaaguuccaccagaucgagaaggaguucuccgaggucgagggccgcauccaggaccucgagaaguacgucgaggacaccaagaucgaccucugguccuacaacgccgagcuccucgucgcccucgagaaccagcacaccaucgaccucaccgacuccgagaugaacaagcucuucgagcgcacccgcaagcagcuccgcgagaacgccgaggacaugggcaacggcugcuucaagaucuaccacaagugcgacaacgccugcaucggcuccauccgcaacggcaccuacgaccacgacgucuaccgcgacgaggcccucaacaaccgcuuccagaucaagggcgucgagcucaaguccggcuacaaggacuggauccucuggaucuccuucgccaucuccugcuuccuccucugcuucguccuccucggcuucaucaugugggccugccagaagggcaacauccgcugcaacaucugcaucuga

SEQ ID NO: 97025 - RNA, 1701 nt, Artificial Sequence
  derived and/or modified CDS sequence (opt2) from hemagglutinin__InfluenzaA__ABG37296
augaagaccaucaucgcccucuccuacauccucugccucgucuucgcccagaagcuccccggcaacgacaacuccaccgccacccucugccucggccaccacgccguccccaacggcacccucgucaagaccaucaccaacgaccagaucgaggucaccaacgccaccgagcucguccaguccuccuccaccggccgcaucugcgacuccccccaccgcauccucgacggcaagaacugcacccucaucgacgcccuccucggcgacccccacugcgacggcuuccagaacaaggagugggaccucuucgucgagcgcuccaaggccuacuccaacugcuaccccuacgacguccccgacuacgccucccuccgcucccucgucgccuccuccggcacccucgaguucaccaaggagggcuucaacuggaccggcgucgcccaggacggcaaguccuacgccugcaagcgcggcuccgucaacuccuucuucucccgccucaacuggcuccacaagcucgaguacaaguaccccgcccucaacgucaccaugcccaacaacgacaaguucgacaagcucuacaucuggggcguccaccaccccuccaccgacuccgaccagaccucccucuacguccaggccuccggccgcgucaccgucuccaccaagcgcucccagcagaccgucauccccaacaucggcucccgccccuggguccgcggcaucuccucccgcaucuccaucuacuggaccaucgucaagcccggcgacauccuccucaucaacuccaccggcaaccucaucgccccccgcggcuacuucaagauccgcaacggcaaguccuccaucaugcgcuccgacgcccccaucggcaacugcaacuccgagugcaucacccccaacggcuccauccccaacgacaagcccuuccagaacgucaaccgcaucaccuacggcgccugcccccgcuacgucaagcagaacacccucaagcucgccaccggcaugcgcaacguccccgagaagcagacccgcggcaucuucggcgccaucgccggcuucaucgagaacggcugggagggcauggucgacggcugguacggcuuccgccaccagaacuccgagggcaccggccaggccgccgaccucaaguccacccaggccgccaucgaccagaucaacggcaagcucaaccgccucaucgagaagaccaacgagaaguuccaccagaucgagaaggaguucuccgaggucgagggccgcauccaggaccucgagaaguacgucgaggacaccaagaucgaccucugguccuacaacgccgagcuccucgucgcccucgagaaccagcacaccaucgaccucaccgacuccgagaugaacaagcucuucgagcgcacccgcaagcagcuccgcgagaacgccgaggacaugggcaacggcugcuucaagaucuaccacaagugcgacaacgccugcaucggcuccauccgcaacggcaccuacgaccacgacgucuaccgcgacgaggcccucaacaaccgcuuccagaucaagggcgucgagcucaaguccggcuacaaggacuggauccucuggaucuccuucgccaucuccugcuuccuccucugcgucguccuccucggcuucaucaugugggccugccagaagggcaacauccgcugcaacaucugcaucuga

SEQ ID NO: 97026 - RNA, 1701 nt, Artificial Sequence; identical to SEQ ID NO: 97020
  derived and/or modified CDS sequence (opt2) from hemagglutinin__InfluenzaA__ABG37307

SEQ ID NO: 97027 - RNA, 1701 nt, Artificial Sequence; identical to SEQ ID NO: 97025
  derived and/or modified CDS sequence (opt2) from hemagglutinin__InfluenzaA__ABG37318

SEQ ID NO: 97028 - RNA, 1701 nt, Artificial Sequence
  derived and/or modified CDS sequence (opt2) from hemagglutinin__InfluenzaA__ABG37329
augaagaccaucaucgcccucuccuacauccucugccucgucuucgcccagaagcuccccgagaacgacaacuccaccgccacccucugccucggccaccacgccguccccaacggcacccucgucaagaccaucaccaacgaccagaucgaggucaccaacgccaccgagcucguccaguccucccccaccggccgcaucugcgacuccccccaccgcauccucgacggcaagaacugcacccucaucgacgcccuccucggcgacccccacugcgacggcuuccagaacaaggagugggaccucuucgucgagcgcuccaaggccuacuccaacugcuaccccuacgacguccccgacuacgccucccuccgcucccucgucgccuccuccggcacccucgaguucaccaacgagaacuucaacuggaccggcgucgcccaggacggcaaguccuacgccugcaagcgcggcuccgucaacuccuucuucucccgccucaacuggcuccacaagcucgaguacaaguaccccgcccucaacgucaccaugcccaacaacggcaaguucgacaagcucuacaucuggggcguccaccaccccuccaccgacuccgaccagaccucccucuacguccgcgccuccggcaaggucaccgucuccaccaagcgcucccagcagaccgucauccccgacaucggcuaccgccccuggguccgcggccucuccucccgcaucuccaucuacuggaccaucgucaagcccggcgacauccuccucaucaacuccaccggcaaccucaucgccccccgcggcuacuucaagauccgcaacggcaaguccuccaucaugcgcuccgacgcccccaucggcaacugcuccuccgagugcaucacccccaacggcuccauccccaacgacaagcccuuccagaacgucaaccgcaucaccuacggcgccugcccccgcuacgucaagcagaacacccucaagcucgccaccggcaugcgcaacguccccgagaagcagacccgcggcaucuucggcgccaucgccggcuucaucgagaacggcugggagggcauggucgacggcugguacggcuuccgccaccagaacuccgagggcaccggccaggccgccgaccucaaguccacccaggccgccaucgaccagaucaacggcaagcucaaccgccucgucgagaagaccaacgagaaguuccaccagaucgagaaggaguucuccgaggucgagggccgcauccaggaccucgagaaguacgucgaggacaccaagaucgaccucugguccuacaacgccgagcuccucgucgcccucgagaaccagcacaccaucgaccucaccgacuccgagaugaacaagcucuucgagcgcacccgcaagcagcuccgcgagaacgccgaggacaugggcaacggcugcuucaagaucuaccacaagugcgacaacgccugcaucggcuccauccgcaacggcaccuacgaccacgacgucuaccgcgacgaggcccucaacaaccgcuuccagaucaagggcgucgagcucaaguccggcuacaaggacuggauccucuggaucuccuucgccaucuccugcuuccuccucugcgucguccuccucggcuucaucaugugggccugccagaagggcaacauccgcugcaacaucugcaucuga

SEQ ID NO: 97029 - RNA, 1701 nt, Artificial Sequence
  derived and/or modified CDS sequence (opt2) from hemagglutinin__InfluenzaA__ABG37340
augaagaccaucaucgcccucuccuacauccucugccucgucuucgcccagaagcuccccggcaacgacaacuccaccgccacccucugccucggccaccacgccguccccaacggcacccucgucaagaccaucaccaacgaccagaucgaggucaccaacgccaccgagcucguccaguccuuccccaccggccgcaucugcgacuccccccaccgcauccucgacggcaagaacugcacccucaucgacgcccuccucggcgacccccacugcgacggcuuccagaacaaggagugggaccucuucgucgagcgcuccaaggccuacuccaacugcuaccccuacgacguccccgacuacgccucccuccgcucccucgucgccuccuccggcacccucgaguucaccaacgagaacuucaacuggaccggcgucgcccaggacggcaaguccuacuccugcaagcgcggcuccgucaacuccuucuucucccgccucaacuggcuccacaagcucgaguacaaguaccccgcccucaacgucaccaugcccaacaacggcaaguucgacaagcucuacaucuggggcguccaccaccccuccaccgacuccgaccagaccucccucuacguccgcgccuccggcaaggucaccgucuccaccaagcgcucccagcagaccgucauccccgacaucggcuaccgccccuggguccgcggccucuccucccgcaucuccaucuacuggaccaucgucaagcccggcgacauccuccucaucaacuccaccggcaaccucaucgccccccgcggcuacuucaagauccgcaacggcaaguccuccaucaugcgcuccgacgcccccaucggcaacugcuccuccgagugcaucacccccaacggcuccauccccaacgacaagcccuuccagaacgucaaccgcaucaccuacggcgccugcccccgcuacgucaagcagaacacccucaagcucgccaccggcaugcgcaacguccccgagaagcagacccgcggcaucuucggcgccaucgccggcuucaucgagaacggcugggagggcauggucgacggcugguacggcuuccgccaccagaacuccgagggcaccggccaggccgccgaccucaaguccacccaggccgccaucgaccagaucaacggcaagcucaaccgccucgucgagaagaccaacgagaaguuccaccagaucgagaaggaguucuccgaggucgagggccgcauccaggaccucgagaaguacgucgaggacaccaagaucgaccucugguccuacaacgccgagcuccucgucgcccucgagaaccagcacaccaucgaccucaccgacuccgagaugaacaagcucuucgagcgcacccgcaagcagcuccgcgagaacgccgaggacaugggcaacggcugcuucaagaucuaccacaagugcgacaacgccugcaucggcuccauccgcaacggcaccuacgaccacgacgucuaccgcgacgaggcccucaacaaccgcuuccagaucaagggcgucgagcucaaguccggcuacaaggacuggauccucuggaucuccuucgccaucuccugcuuccuccucugcgucguccuccucggcuucaucaugugggccugccagaagggcaacauccgcugcaacaucugcaucuga

SEQ ID NO: 97030 - RNA, 1701 nt, Artificial Sequence
  derived and/or modified CDS sequence (opt2) from hemagglutinin__InfluenzaA__ABG37351
augaagaccaucaucgcccucuccuacauccucugccucgucuucgcccagaagcuccccggcaacgacaacuccaccgccacccucugccucggccaccacgccguccccaacggcacccucgucaagaccaucaccaacgaccagaucgaggucaccaacgccaccgagcucguccaguccuccuccaccggccgcaucugcgacuccccccaccgcauccucgacggcaagaacugcacccucaucgacgcccuccucggcgacccccacugcgacggcuuccagaacaaggagugggaccucuucgucgagcgcuccaaggccuacuccaacugcuaccccuacgacguccccgacuacgccucccuccgcucccucgucgccuccuccggcacccucgaguucaucaacgaggacuucaacuggaccggcgucgcccaggacggcaaguccuacgccugcaagcgcggcuccgucaacuccuucuucucccgccucaacuggcuccacaagcucgaguacaaguaccccgcccucaacgucaccaugcccaacaacggcaaguucgacaagcucuacaucuggggcguccaccaccccuccaccgacuccgaccagaccucccucuacguccgcgccuccggccgcgucaccgucuccaccaagcgcucccagcagaccgucauccccaacaucggcuuccgccccuggguccgcggccucuccucccgcaucuccaucuacuggaccaucgucaagcccggcgacauccuccucaucgacuccaccggcaaccucaucgccccccgcggcuacuucaagauccgcaacggcaaguccuccaucaugcgcuccgacgcccccaucggcaacugcuccuccgagugcaucacccccaacggcuccauccccaacgacaagcccuuccagaacgucaaccgcaucaccuacggcgccugcccccgcuacgucaagcagaacacccucaagcucgccaccggcaugcgcaacguccccgagaagcagacccgcggcaucuucggcgccaucgccggcuucaucgagaacggcugggagggcauggucgacggcugguacggcuuccgccaccagaacuccgagggcaccggccaggccgccgaccucaaguccacccaggccgccaucgaccagaucaacggcaagcucaaccgccucaucgagaagaccaacgagaaguuccaccagaucgagaaggaguucuccgaggucgagggccgcauccaggaccucgagaaguacgucgaggacaccaagaucgaccucugguccuacaacgccggccuccucgucgcccucgagaaccagcacaccaucgaccucaccgacuccgagaugaacaagcucuucgagcgcacccgcaagcagcuccgcgagaacgccgaggacaugggcaacggcugcuucaagaucuaccacaagugcgacaacgccugcaucggcuccauccgcaacggcaccuacgaccacgacgucuaccgcgacgaggcccucaacaaccgcuuccagaucaagggcgucgagcucaaguccggcuacaaggacuggauccucuggaucuccuucgccaucuccugcuuccuccucugcgucguccuccucggcuucaucaugugggccugccagaagggcaacauccgcugcaacaucugcaucuga

SEQ ID NO: 97031 - RNA, 1698 nt, Artificial Sequence
  derived and/or modified CDS sequence (opt2) from hemagglutinin__InfluenzaA__ABG37362
augaaggucaagcuccucguccuccucugcaccuucaccgccaccuacgccgacaccaucugcaucggcuaccacgccaacaacuccaccgacaccgucgacaccguccucgagaagaacgucaccgucacccacuccgucaaccuccucgaggacucccacaacggcaagcucugccuccucaagggcaucgccccccuccagcucggcaacugcuccgucgccggcuggauccucggcaaccccgagugcgagcuccucaucuccaaggaguccugguccuacaucgucgagacccccaaccccgagaacggcaccugcuaccccggcuacuucgccgacuacgaggagcuccgcgagcagcucuccuccgucuccuccuucgagcgcuucgagaucuuccccaaggaguccuccuggcccaaccacaccgucaccggcgucuccgccuccugcucccacaacggcaaguccuccuucuaccgcaaccuccucuggcucaccggcaagaacggccucuaccccaaccucuccaaguccuacgccaacaacaaggagaaggagguccucguccucuggggcguccaccacccccccaacaucggcaaccagcgcgcccucuaccacaccgagaacgccuacgucuccgucgucuccucccacuacucccgccgcuucacccccgagaucgccaagcgccccaagguccgcgaccaggagggccgcaucaacuacuacuggacccuccucgagcccggcgacaccaucaucuucgaggccaacggcaaccucaucgcccccugguacgccuucgcccucucccgcggcuucggcuccggcaucaucaccuccaacgcccccauggacgagugcgacgccaagugccagaccccccagggcgccaucaacuccucccuccccuuccagaacguccaccccgucaccaucggcgagugccccaaguacguccgcuccgccaagcuccgcauggucaccggccuccgcaacauccccuccauccagucccgcggccucuucggcgccaucgccggcuucaucgagggcggcuggaccggcauggucgacggcugguacggcuaccaccaccagaacgagcagggcuccggcuacgccgccgaccagaaguccacccagaacgccaucaacggcaucaccaacaaggucaacuccgucaucgagaagaugaacacccaguucaccgccgucggcaaggaguucaacaagcucgagcgccgcauggagaaccucaacaagaaggucgacgacggcuuccucgacaucuggaccuacaacgccgagcuccucguccuccucgagaacgagcgcacccucgacuuccacgacuccaacgucaagaaccucuacgagaaggucaagucccagcucaagaacaacgccaaggagaucggcaacggcugcuucgaguucuaccacaagugcaacaacgagugcauggaguccgucaagaacggcaccuacgacuaccccaaguacuccgaggaguccaagcucaaccgcgagaagaucgacggcgucaagcucgaguccaugggcgucuaccagauccucgccaucuacuccaccgucgccuccucccucguccuccucgucucccucggcgccaucuccuucuggaugugcuccaacggcucccuccagugccgcaucugcaucuga

SEQ ID NO: 97032 - RNA, 1698 nt, Artificial Sequence; identical to SEQ ID NO: 96836
  derived and/or modified CDS sequence (opt2) from hemagglutinin__InfluenzaA__ABG37384

SEQ ID NO: 97033 - RNA, 1698 nt, Artificial Sequence; identical to SEQ ID NO: 96906
  derived and/or modified CDS sequence (opt2) from hemagglutinin__InfluenzaA__ABG37395

SEQ ID NO: 97034 - RNA, 1701 nt, Artificial Sequence; identical to SEQ ID NO: 96813
  derived and/or modified CDS sequence (opt2) from hemagglutinin__InfluenzaA__ABG37406

SEQ ID NO: 97035 - RNA, 1701 nt, Artificial Sequence
  derived and/or modified CDS sequence (opt2) from hemagglutinin__InfluenzaA__ABG37428
augaagaccaucaucgcccucuccuacauccucugccucgucuucgcccagaagcuccccggcaacgacaacuccaccgccacccucugccucggccaccacgccguccccaacggcacccucgucaagaccaucaccaacgaccagaucgaggucaccaacgccaccgagcucguccaguccuccuccaccggccgcaucugcgacuccccccaccagauccucgacggcgagaacugcacccucaucgacgcccuccucggcgacccccacugcgacggcuuccagaacaaggagugggaccucuucgucgagcgcuccaaggccuacuccaacugcuaccccuacgacguccccgacuacgucucccuccgcucccucgucgccuccuccggcacccucgaguucaacaacgaguccuucaacuggaccggcgucgcccagaacggcaccuccuccgccugcaagcgccgcuccgacaaguccuucuucucccgccucaacuggcuccaccagcucaaguacaaguaccccgcccucaacgucaccaugcccaacaacgagaaguucgacaagcucuacaucuggggcguccaccaccccggcaccgacuccgaccagaucucccucuacgcccaggccuccggccgcgucaccgucuccaccaagcgcucccagcagaccgucauccccaacaucggcucccgccccuggguccgcggcgucuccucccgcaucuccaucuacuggaccaucgucaagcccggcgacauccuccucaucaacuccaccggcaaccucaucgccccccgcggcuacuucaagauccgcuccggcaaguccuccaucaugcgcuccgacgcccccaucggcaagugcaacuccgagugcaucacccccaacggcuccauccccaacgacaagcccuuccagaacgucaaccgcaucaccuacggcgccugcccccgcuacgucaagcagaacacccucaagcucgccaccggcaugcgcaacguccccgagaagcagacccgcggcaucuucggcgccaucgccggcuucaucgagaacggcugggagggcaugauggacggcugguacggcuuccgccaccagaacuccgagggcaccggccaggccgccgaccucaaguccacccaggccgccaucaaccagaucaacggcaagcucaaccgccucaucgagaagaccaacgagaagucccaccagaucgagaaggaguucuccgaggucgagggccgcauccaggaccucgagaaguacgucgaggacaccaagaucgaccucugguccuacaacgccgagcuccucgucgcccucgagaaccagcacaccaucgaccucaccgacuccgagaugaacaagcucuucgagcgcaccaagaagcagcuccgcgagaacgccgaggacaugggcaacggcugcuucaagaucuaccacaagugcgacaacgccugcaucggcuccauccgcaacggcaccuacgaccacgacgucuaccgcgacgaggcccucaacaaccgcuuccagaucaagggcgucgagcucaaguccggcuacaaggacuggguccucuggaucuccuucgccaucuccugcuuccuccucugcaucguccuccucggcuucaucaugugggccugccagaagggcaacauccgcugcaacaucugcaucuga

SEQ ID NO: 97036 - RNA, 1701 nt, Artificial Sequence; identical to SEQ ID NO: 96598
  derived and/or modified CDS sequence (opt2) from hemagglutinin__InfluenzaA__ABG37439

SEQ ID NO: 97037 - RNA, 1701 nt, Artificial Sequence; identical to SEQ ID NO: 96676
  derived and/or modified CDS sequence (opt2) from hemagglutinin__InfluenzaA__ABG37461

SEQ ID NO: 97038 - RNA, 1701 nt, Artificial Sequence
  derived and/or modified CDS sequence (opt2) from hemagglutinin__InfluenzaA__ABG37472
augaagaccaucaucgcccucuccuacauccucugccucgucuucgcccagaagcuccccggcaacgacaacuccaccgccacccucugccucggccaccacgccguccccaacggcacccucgucaagaccaucaccaacgaccagaucgaggucaccaacgccaccgagcucguccaguccuccuccaccggccgcaucugcgacuccccccaccagguccucgacggcgagaacugcacccucaucgacgcccuccucggcgacccccacugcgacggcuuccagaacaaggagugggaccucuucgucgagcgcuccaaggccuacuccaacugcuaccccuacgacguccccgacuacgucucccuccgcucccucgucgccuccuccggcacccucgaguucaacaacgaguccuucaacuggaccggcgucgcccagaacggcaccuccuccgccugcaagcgccgcuccgacaaguccuucuucucccgccucaacuggcuccaccagcucaaguacaaguaccccgcccucaacgucaccaugcccaacaacgagaaguucgacaagcucuacaucuggggcguccaccaccccggcaccgacuccgaccagaucucccucuacgcccaggccuccggccgcgucaccgucuccaccaagcgcucccagcagaccgucauccccaacaucggcucccgccccuggguccgcggcgucuccucccgcaucuccaucuacuggaccaucgucaagcccggcgacauccuccucaucaacuccaccggcaaccucaucgccccccgcggcuacuucaagauccgcuccggcaaguccuccaucaugcgcuccgacgcccccaucggcaagugcaacuccgagugcaucacccccaacggcuccauccccaacgacaagcccuuccagaacgucaaccgcaucaccuacggccccugcccccgcuacgucaagcagaacacccucaagcucgccaccggcaugcgcaacguccccgagaagcagacccgcggcaucuucggcgccaucgccggcuucaucgagaacggcugggagggcaugauggacggcugguacggcuuccgccaccagaacuccgagggcaccggccaggccgccgaccucaaguccacccaggccgccaucaaccagaucaacggcaagcucaaccgccucaucgagaagaccaacgagaaguuccaccagaucgagaaggaguucuccgaggucgagggccgcauccaggaccucgagaaguacgucgaggacaccaagaucgaccucugguccuacaacgccgagcuccucgucgcccucgagaaccagcacaccaucgaccucaccgacuccgagaugaacaagcucuucgagcgcaccaagaagcagcuccgcgagaacgccgaggacaugggcaacggcugcuucaagaucuaccacaagugcgacaacgccugcaucggcuccauccgcaacggcaccuacgaccacgacgucuaccgcgacgaggcccucaacaaccgcuuccagaucaagggcgucgagcucaaguccggcuacaaggacuggauccucuggaucuccuucgccaucuccugcuuccuccucugcaucguccuccucggcuucaucaugugggccugccagaagggcaacauccgcugcaacaucugcaucuga

SEQ ID NO: 97039 - RNA, 1701 nt, Artificial Sequence; identical to SEQ ID NO: 96598
  derived and/or modified CDS sequence (opt2) from hemagglutinin__InfluenzaA__ABG37483

SEQ ID NO: 97040 - RNA, 1701 nt, Artificial Sequence; identical to SEQ ID NO: 96676
  derived and/or modified CDS sequence (opt2) from hemagglutinin__InfluenzaA__ABG37494

SEQ ID NO: 97041 - RNA, 1701 nt, Artificial Sequence
  derived and/or modified CDS sequence (opt2) from hemagglutinin__InfluenzaA__ABG37505
augaagaccaucaucgcccucuccuacauccucugccucgucuucgcccagaagcuccccggcaacgacaacuccauggccacccucugccucggccaccacgccguccccaacggcacccucgucaagaccaucaccaacgaccagaucgaggucaccaacgccaccgagcucguccaguccuccuccaccggccgcaucugcgacuccccccaccagauccucgacggcgagaacugcacccucaucgacgcccuccucggcgacccccacugcgacggcuuccagaacaaggagugggaccucuucgucgagcgcuccaaggccuacuccaacugcuaccccuacgacguccccgacuacgucucccuccgcucccucgucgccuccuccggcacccucgaguucaacaacgaguccuucaacuggaccggcgucgcccagaacggcaccuccuccgccugcaagcgccgcuccgacaaguccuucuucucccgccucaacuggcuccaccagcucaaguacaaguaccccgcccucaacgucaccaugcccaacaacgagaaguucgacaagcucuacaucuggggcguccaccaccccggcaccgacuccgaccagaucucccucuacgcccaggccuccggccgcgucaccgucuccaccaagcgcucccagcagaccgucauccccaacaucggcucccgccccuggguccgcggcgucuccucccgcaucuccaucuacuggaccaucgucaagcccggcgacauccuccucaucaacuccaccggcaaccucaucgccccccgcggcuacuucaagauccgcuccggcaaguccuccaucaugcgcuccgacgcccccaucgacaagugcaacuccgagugcaucacccccaacggcuccauccccaacgacaagcccuuccagaacgucaaccgcaucaccuacggccucugcccccgcuacgucaagcagaacacccucaagcucgccaccggcaugcgcaacguccccgagaagcagacccgcggcaucuucggcgccaucgccggcuucaucgagaacggcugggagggcaugauggacggcugguacggcuuccgccaccagaacuccgagggcaccggccaggccgccgaccucaaguccacccaggccgccaucaaccagaucaacggcaagcucaaccgccucaucgagaagaccaacgagaaguuccaccagaucgagaaggaguucuccgaggucgagggccgcauccaggaccucgagaaguacgucgaggacaccaagaucgaccucugguccuacaacgccgagcuccucgucgcccucgagaaccagcacaccaucgaccucaccgacuccgagaugaacaagcucuucgagcgcaccaagaagcagcuccgcgagaacgccgaggacaugggcaacggcugcuucaagaucuaccacaagugcgacaacgccugcaucggcuccauccgcaacggcaccuacgaccacgacgucuaccgcgacgaggcccucaacaaccgcuuccagaucaagggcgucgagcucaaguccggcuacaaggacuggauccucuggaucuccuucgccaucuccugcuuccuccucugcaucguccuccucggcuucaucaugugggccugccagaagggcaacauccgcugcaacaucugcaucuga

SEQ ID NO: 97042 - RNA, 1701 nt, Artificial Sequence; identical to SEQ ID NO: 96552
  derived and/or modified CDS sequence (opt2) from hemagglutinin__InfluenzaA__ABG37516

SEQ ID NO: 97043 - RNA, 1701 nt, Artificial Sequence; identical to SEQ ID NO: 96552
  derived and/or modified CDS sequence (opt2) from hemagglutinin__InfluenzaA__ABG37527

SEQ ID NO: 97044 - RNA, 1701 nt, Artificial Sequence; identical to SEQ ID NO: 96552
  derived and/or modified CDS sequence (opt2) from hemagglutinin__InfluenzaA__ABG37538

SEQ ID NO: 97045 - RNA, 1701 nt, Artificial Sequence; identical to SEQ ID NO: 96552
  derived and/or modified CDS sequence (opt2) from hemagglutinin__InfluenzaA__ABG37549

SEQ ID NO: 97046 - RNA, 1701 nt, Artificial Sequence; identical to SEQ ID NO: 96552
  derived and/or modified CDS sequence (opt2) from hemagglutinin__InfluenzaA__ABG37560

SEQ ID NO: 97047 - RNA, 1701 nt, Artificial Sequence; identical to SEQ ID NO: 96552
  derived and/or modified CDS sequence (opt2) from hemagglutinin__InfluenzaA__ABG37571

SEQ ID NO: 97048 - RNA, 1701 nt, Artificial Sequence
  derived and/or modified CDS sequence (opt2) from hemagglutinin__InfluenzaA__ABG37582
augaagaccaucaucgcccucuccuacauccucugccucgucuucgcccagaagcuccccggcaacgacaacuccaccgccacccucugccucggccaccacgccguccccaacggcaccaucgucaagaccaucaccaacgaccagaucgaggucaccaacgccaccgagcucguccagaucuccuccaccggcggcaucugcgacuccccccaccagauccucgacggcgagaacugcacccucaucgacgcccuccucggcgacccccagugcgacggcuuccagaacaagaagugggaccucuucgucgagcgcuccaaggccuacuccaacugcuaccccuacgacguccccgaccacgccucccuccgcucccucgucgccuccuccggcacccucgaguucaacaacgaguccuucgacuggaccggcgucacccagaacggcaccuccuccgccugcaagcgccgcuccaacaaguccuucuucucccgccucaacuggcucacccaccucaaguacaaguaccccgcccucaacgucaccaugcccaacaacgagaaguucgacaagcucuacaucuggggcguccaccaccccggcaccgacuccgaccagaucucccucuacgcccaggccuccggccgcaucaccgucuccaccaagcgcucccagcagaccgucauccccaacaucggcucccgcccccgcguccgcgacgucuccucccgcaucuccaucuacuggaccaucgucaagcccggcgacauccuccucaucaacuccaccggcaaccucaucgccccccgcggcuacuucaagauccgcuccggcaaguccuccaucaugcgcuccgacgcccccaucggcaagugcaacuccgagugcaucacccccaacggcuccauccccaacgacaagcccuuccagaacgucaaccgcaucaccuacggcgccugcccccgcuacgucaagcagaacacccucaagcucgccaccggcaugcgcaacguccccgagaagcagacccgcggcaucuucggcgccaucgccggcuucaucgagaacggcugggagggcauggucgacggcugguacggcuuccgccaccagaacuccgagggcaccggccaggccgccgaccucaaguccacccaggccgccaucaaccagaucaacggcaagcucaaccgccucaucggcaagaccaacgagaaguuccaccagaucgagaaggaguucuccgaggucgagggccgcauccaggaccucgagaaguacgucgaggacaccaagaucgaccucugguccuacaacgccgagcuccucgucgcccucgagaaccagcacaccaucgaccucaccgacuccgagaugaacaagcucuucgagcgcaccaagaagcagcuccgcgagaacgccgaggacaugggcaacggcugcuucaagaucuaccacaagugcgacaacgccugcaucggcuccauccgcaacggcaccuacgaccacgacgucuaccgcgacgaggcccucaacaaccgcuuccagaucaagggcgucgagcucaaguccggcuacaaggacuggauccucuggaucuccuucgccaucuccugcuuccuccucugcgucgcccuccucggcuucaucaugugggccugccagaagggcaacauccgcugcaacaucugcaucuga

SEQ ID NO: 97049 - RNA, 1701 nt, Artificial Sequence; identical to SEQ ID NO: 96552
  derived and/or modified CDS sequence (opt2) from hemagglutinin__InfluenzaA__ABG37604

SEQ ID NO: 97050 - RNA, 1701 nt, Artificial Sequence; identical to SEQ ID NO: 96552
  derived and/or modified CDS sequence (opt2) from hemagglutinin__InfluenzaA__ABG37615

SEQ ID NO: 97051 - RNA, 1698 nt, Artificial Sequence; identical to SEQ ID NO: 96778
  derived and/or modified CDS sequence (opt2) from hemagglutinin__InfluenzaA__ABG47807

SEQ ID NO: 97052 - RNA, 1698 nt, Artificial Sequence; identical to SEQ ID NO: 96777
  derived and/or modified CDS sequence (opt2) from hemagglutinin__InfluenzaA__ABG47818

SEQ ID NO: 97053 - RNA, 1701 nt, Artificial Sequence
  derived and/or modified CDS sequence (opt2) from hemagglutinin__InfluenzaA__ABG47829
augaaggccaagcuccucguccuccucugcgccuucaccgccaccuacgccgacaccaucugcaucggcuaccacgccaacaacuccaccgacaccgucgacaccguccucgagaagaacgucaccgucacccacuccgucaaccuccucgaggacucccacaacggcaagcucugccgccucaagggcaccgccccccuccagcucggcaacugcuccgucgccggcuggauccucggcaaccccgagugcgagucccucuucuccaaggaguccugguccuacaucgccgagacccccaaccccgagaacggcaccugcuaccccggcuacuucgccgacuacgaggagcuccgcgagcagcucuccuccgucuccuccuucgagcgcuucgagaucuuccccaaggaguccuccuggcccaaccacaccgucaccaagggcgucaccgccuccugcucccacaacggcaaguccuccuucuacaagaaccuccucuggcucaccgagaagaacggccucuaccccaaccucuccaaguccuacgucaacaacaaggagaaggagguccucguccucuggggcguccaccaccccuccaacaucggcgaccagcgcgccaucuaccacaccgagaacgccuacgucuccgucgucuccucccacuacucccgccgcuucacccccgagaucaccaagcgccccaagguccgcaaccaggagggccgcaucaacuacuacuggacccuccucgagcccggcgacaccaucaucuucgaggccaacggcaaccucaucgcccccugguacgccuucgcccucucccgcggcuucggcuccggcaucaucaccuccaacgccuccaugggcgagugcgacgccaagugccagaccccccagggcgccaucaacuccucccuccccuuccagaacguccaccccgucaccaucggcgagugccccaaguacguccgcuccaccaagcuccgcauggucaccggccuccgcaacauccccuccauccagucccgcggccucuucggcgccaucgccggcuucaucgagggcggcuggaccggcaugaucgacggcugguacggcuaccaccaccagaacgagcagggcuccggcuacgccgccgaccagaaguccacccagaacgccaucgacggcaucaccaacaaggucaacuccgucaucgagaagaugaacacccaguucaccgccgucggcaaggaguucaacaagcucgagcgccgcauggagaaccucaacaagaaggucgacgacggcuuccucgacaucuggaccuacaacgccgagcuccucguccuccucgagaacgagcgcacccucgacuuccacgacuccaacgucaagaaccucuacgagaaggucaagacccagcucaagaacaacgccaaggagaucggcaacggcugcuucgaguucuaccacaagugcaacaacgagugcauggaguccgucaagaacggcaccuacgacuaccccaaguacuccgaggaguccaagcucaaccgcgagaagaucgacggcgucaagcucgaguccaugggcgucuaccagauccucgccaucuacuccaccgucgccuccucccucguccuccucgucucccucggcgccaucuccuucuggaugugcuccaacggcucccuccagugccgcaucugcaucuga

SEQ ID NO: 97054 - RNA, 1701 nt, Artificial Sequence
  derived and/or modified CDS sequence (opt2) from hemagglutinin__InfluenzaA__ABG47840
augaaggucaagcuccucguccuccucugcgccuucaccgccaccuacgccgacaccaucugcaucggcuaccacgccaacaacuccaccgacaccgucgacaccguccucgagaagaacgucaccgucacccacuccgucaaccuccucgaggacucccacaacggcaagcucugccgccucaagggcaccgccccccuccagcucggcaacugcuccgucgccggcuggauccucggcaaccccgagugcgagucccucuucuccaaggaguccugguccuacaucgccgagacccccaaccccgagaacggcaccugcuaccccggcuacuucgccgacuacgaggagcuccgcgagcagcucuccuccgucuccuccuucgagcgcuucgagaucuuccccaaggaguccuccuggcccaaccacaccgucaccaagggcgucaccgccuccugcucccacaacggcaaguccuccuucuacaagaaccuccucuggcucaccgagaagaacggccucuaccccaaccucuccaaguccuacgucaacaacaaggagaaggagguccucguccucuggggcguccaccaccccuccaacaucggcgaccagcgcgccaucuaccacaccgagaacgccuacgucuccgucgucuccucccacuacucccgccgcuucacccccgagaucgccaagcgccccaagguccgcgaccaggagggccgcaucaacuacuacuggacccuccucgagcccggcgacaccaucaucuucgaggccaacggcaaccucaucgcccccugguacgccuucgcccucucccgcggcuucggcuccggcaucaucaccuccaacgccuccauguccgagugcgacgccaagugccagaccccccagggcgccaucaacuccucccuccccuuccagaacguccaccccgucaccaucggcgagugccccaaguacguccgcuccaccaagcuccgcauggucaccggccuccgcaacauccccuccauccagucccgcggccucuucggcgccaucgccggcuucaucgagggcggcuggaccggcaugaucgacggcugguacggcuaccaccaccagaacgagcagggcuccggcuacgccgccgaccagaaguccacccagaacgccaucgacggcaucaccaacaaggucaacuccgucaucgagaagaugaacacccaguucaccgccgucggcaaggaguucaacaagcucgagcgccgcauggagaaccucaacaagaaggucgacgacggcuuccucgacaucuggaccuacaacgccgagcuccucguccuccucgagaacgagcgcacccucgacuuccacgacuccaacgucaagaaccucuacgagaaggucaagaaccagcucaagaacaacgccaaggagaucggcaacggcugcuucgaguucuaccacaagugcaacaacgagugcauggaguccgucaagaacggcaccuacgacuaccccaaguacuccgaggaguccaagcucaaccgcgagaagaucgacggcgucaagcucgaguccaugggcgucuaccagauccucgccaucuacuccaccgucgccuccucccucguccuccucgucucccucggcgccaucuccuucuggaugugcuccaacggcucccuccagugccgcaucugcaucuga

SEQ ID NO: 97055 - RNA, 1701 nt, Artificial Sequence
  derived and/or modified CDS sequence (opt2) from hemagglutinin__InfluenzaA__ABG47851
augaagaccaucaucgcccucuccuacauccucugccucgucuucgcccagaagcuccccggcaacgacaacuccaccgccacccucugccucggccaccacgccguccccaacggcacccucgucaagaccaucaccaacgaccagaucgaggucaccaacgccaccgagcucguccaguccuccuccaccggccgcaucugcgacuccccccaccgcauccucgacggcaagaacugcacccucaucgacgcccuccucggcgacccccacugcgacggcuuccagaacaaggagugggaccucuucgucgagcgcuccaaggccuacuccaacugcuaccccuacgacguccccgacuacgccucccuccgcucccucgucgccuccuccggcacccucgaguucaccaacgagggcuucaacuggaccggcgucgcccaggacggcaaguccuacgccugcaagcgcggcuccgucaacuccuucuucucccgccucaacuggcuccacaagcucgaguacaaguaccccgcccucaacgucaccaugcccaacaacgacaaguucgacaagcucuacaucuggggcguccaccaccccuccaccgacuccgaccagaccucccucuacguccaggccuccggccgcgucaccgucuccaccaagcgcucccagcagaccgucauccccaacaucggcucccgccccuggguccgcggcaucuccucccgcaucuccaucuacuggaccaucgucaagcccggcgacauccuccucaucaacuccaccggcaaccucaucgccccccgcggcuacuucaagauccgcaacggcaaguccuccaucaugcgcuccgacgcccccaucgacaacugcaacuccgagugcaucacccccaacggcuccauccccaacgacaagcccuuccagaacgucaaccgcaucaccuacggcgccugcccccgcuacgucaagcagaacacccucaagcucgccaccggcaugcgcaacguccccgagaagcagacccgcggcaucuucggcgccaucgccggcuucaucgagaacggcugggagggcauggucgacggcugguacggcuuccgccaccagaacuccgagggcaccggccaggccgccgaccucaaguccacccaggccgccaucgaccagaucaacggcaagcucaaccgccucaucgagaagaccaacgagaaguuccaccagaucgagaaggaguucuccgaggucgagggccgcauccaggaccucgagaaguacgucgaggacaccaagaucgaccucugguccuacaacgccgagcuccucgucgcccucgagaaccagcacaccaucgaccucaccgacuccgagaugaacaagcucuucgagcgcacccgcaagcagcuccgcgagaacgccgaggacaugggcaacggcugcuucaagaucuaccacaagugcgacaacgccugcaucggcuccauccgcaacggcaccuacaaccacgacgucuaccgcgacgaggcccucaacaaccgcuuccagaucaagggcgucgagcucaaguccggcuacaaggacuggauccucuggaucuccuucgccaucuccugcuuccuccucugcgucguccuccucggcuucaucaugugggccugccagaagggcaacauccgcugcuccaucugcaucuga

SEQ ID NO: 97056 - RNA, 1701 nt, Artificial Sequence
  derived and/or modified CDS sequence (opt2) from hemagglutinin__InfluenzaA__ABG47862
augcgcaccaucaucgcccucuccuacauccucugccucgucuucgcccagaagcuccccggcaacgacaacuccaccgccacccucugccucggccaccacgccguccccaacggcacccucgucaagaccaucaccaacgaccagaucgaggucaccaacgccaccgagcucguccaguccuccuccaccggccgcaucugcaacuccccccaccgcauccucgacggcaagaacugcacccucaucgacgcccuccucggcgacccccacugcgacggcuuccagaacaaggagugggaccucuucgucgagcgcuccaaggccuacuccaacugcuaccccuacgacguccccgacuacgccucccuccgcucccucaucgccuccuccggcacccucgaguucaccaacgagggcuucaacuggaccggcgucgcccaggacggcaccuccuacgccugcaagcgcggcuccgucaaguccuucuucucccgccucaacuggcuccacaagcucgaguacaaguaccccgcccucaacgucaccaugcccaacaacgacaaguucgacaagcucuacaucuggggcguccaccaccccuccaccgacuccgaccagaccucccucuacguccaggccuccggccgcgucaccgucuccaccaagcgcucccagcagaccgucauccccaacaucggcucccgccccuggguccgcggcgucuccucccgcaucuccaucuacuggaccaucgucaagcccggcgacauccuccucaucaacuccaccggcaaccucaucgccccccgcggcuacuucaagauccgcuccggcaaguccuccaucaugcgcuccgacgcccccaucggcaacugcaacuccgagugcaucacccccaacggcuccauccccaacgacaagcccuuccagaacgucaaccgcaucaccuacggcgccugcccccgcuacgucaagcagaacacccucaagcucgccaccggcaugcgcaacguccccgagaagcagacccgcggcaucuucggcgccaucgccggcuucaucgagaacggcugggagggcauggucgacggcugguacggcuuccgccaccagaacuccgagggcaccggccaggccgccgaccucaaguccacccaggccgccaucaaccagaucaacggcaagcucaaccgccucaucgagaagaccaacgagaaguuccaccagaucgagaaggaguucuccgaggucgagggccgcauccaggaccucgagaaguacgucgaggacaccaagaucgaccucugguccuacaacgccgagcuccucgucgcccucgagaaccagcacaccaucgaccucaccgacuccgagaugaacaagcucuucgagcgcacccgcaagcagcuccgcgagaacgccgaggacaugggcaacggcugcuucaagaucuaccacaagugcgacaacgccugcaucggcuccauccgcaacggcaccuacgaccacgacgucuaccgcgacgaggcccucaacaaccgcuuccagaucaagggcgucgagcucaaguccggcuacaaggacuggauccucuggaucuccuucgccaucuccugcuuccuccucugcgucguccuccucggcuucaucaugugggccugccagaagggcaacauccgcugcaacaucugcaucuga

SEQ ID NO: 97057 - RNA, 1701 nt, Artificial Sequence; identical to SEQ ID NO: 97020
  derived and/or modified CDS sequence (opt2) from hemagglutinin__InfluenzaA__ABG47873

SEQ ID NO: 97058 - RNA, 1701 nt, Artificial Sequence; identical to SEQ ID NO: 97025
  derived and/or modified CDS sequence (opt2) from hemagglutinin__InfluenzaA__ABG47895

SEQ ID NO: 97059 - RNA, 1701 nt, Artificial Sequence; identical to SEQ ID NO: 97020
  derived and/or modified CDS sequence (opt2) from hemagglutinin__InfluenzaA__ABG47906

SEQ ID NO: 97060 - RNA, 1701 nt, Artificial Sequence
  derived and/or modified CDS sequence (opt2) from hemagglutinin__InfluenzaA__ABG47917
augaagaccaucaucgcccucuccuacauccucugccucgucuucgcccagaagcuccccggcaacgacaacuccaccgccacccucugccucggccaccacgccguccccaacggcacccucgucaagaccaucaccaacgaccagaucgaggucaccaacgccaccgagcucguccaguccuccuccaccggccgcaucugcgacuccccccaccgcauccucgacggcaagaacugcacccucaucgacgcccuccucggcgacccccacugcgacggcuuccagaacaaggagugggaccucuucgucgagcgcuccaaggccuacuccaacugcuaccccuacgacguccccgacuacgccucccuccgcucccucgucgccuccuccggcacccucgaguucaucaacgaggacuucaacuggaccggcgucgcccaggacggcaaguccuacgccugcaagcgcggcuccgucaacuccuucuucucccgccucaacuggcuccacaagcucgaguacaaguaccccgcccucaacgucaccaugcccaacaacggcaaguucgacaagcucuacaucuggggcguccaccaccccuccaccgacuccgaccagaccucccucuacguccgcgccuccggccgcgucaccgucuccaccaagcgcucccagcagaccgucauccccaacaucggcuuccgccccuggguccgcggccucuccucccgcaucuccaucuacuggaccaucgucaagcccggcgacauccuccucaucaacuccaccggcaaccucaucgccccccgcggcuacuucaagauccgcaacggcaaguccuccaucaugcgcuccgacgcccccaucggcaacugcuccuccgagugcaucacccccaacggcuccauccccaacgacaagcccuuccagaacgucaaccgcaucaccuacggcgccugcccccgcuacgucaagcagaacacccucaagcucgccaccggcaugcgcaacguccccgagaagcagacccgcggcaucuucggcgccaucgccggcuucaucgagaacggcugggagggcauggucgacggcugguacggcuuccgccaccagaacuccgagggcaccggccaggccgccgaccucaaguccacccaggccgccaucgaccagaucaacggcaagcucaaccgccucaucgagaagaccaacgagaaguuccaccagaucgagaaggaguucuccgaggucgagggccgcauccaggaccucgagaaguacgucgaggacaccaagaucgaccucugguccuacaacgccggccuccucgucgcccucgagaaccagcacaccaucgaccucaccgacuccgagaugaacaagcucuucgagcgcacccgcaagcagcuccgcgagaacgccgaggacaugggcaacggcugcuucaagaucuaccacaagugcgacaacgccugcaucggcuccauccgcaacggcaccuacgaccacgacgucuaccgcgacgaggcccucaacaaccgcuuccagaucaagggcgucgagcucaaguccggcuacaaggacuggauccucuggaucuccuucgccaucuccugcuuccuccucugcgucguccuccucggcuucaucaugugggccugccagaagggcaacauccgcugcaacaucugcaucuga

SEQ ID NO: 97061 - RNA, 1701 nt, Artificial Sequence; identical to SEQ ID NO: 97060
  derived and/or modified CDS sequence (opt2) from hemagglutinin__InfluenzaA__ABG47928

SEQ ID NO: 97062 - RNA, 1701 nt, Artificial Sequence
  derived and/or modified CDS sequence (opt2) from hemagglutinin__InfluenzaA__ABG47939
augaagaccaucaucgcccucuccuacauccucugccucgucuucgcccagaagcuccccggcaacgacaacuccaccgccacccucugccucggccaccacgccguccccaacggcacccucgucaagaccaucaccaacgaccagaucgaggucaccaacgccaccgagcucguccaguccuccuccaccggccgcaucugcgacucccccuaccgcauccucgacggcaagaacugcacccucaucgacgcccuccucggcgacccccacugcgacggcuuccagaacaaggagugggaccucuucgucgagcgcuccaaggccuacuccaacugcuaccccuacgacguccccgacuacgccucccuccgcucccucgucgccuccuccggcacccucgaguucaucaacgaggacuucaacuggaccggcgucgcccaggacggcaaguccuacgccugcaagcgcggcuccgucaacuccuucuucucccgccucaacuggcuccacaagcucgaguacaaguaccccgcccucaacgucaccaugcccaacaacggcaaguucgacaagcucuacaucuggggcguccaccaccccuccaccgacuccgaccagaccucccucuacguccgcgccuccggccgcgucaccgucuccaccaagcgcucccagcagaccgucauccccaacaucggcuuccgccccuggguccgcggccucuccucccgcaucuccaucuacuggaccaucgucaagcccggcgacauccuccucaucaacuccaccggcaaccucaucgccccccgcggcuacuucaagauccgcaacggcaaguccuccaucaugcgcuccgacgcccccaucggcaacugcuccuccgagugcaucacccccaacggcuccauccccaacgacaagcccuuccagaacgucaaccgcaucaccuacggcgccugcccccgcuacgucaagcagaacacccucaagcucgccaccggcaugcgcaacguccccgagaagcagacccgcggcaucuucggcgccaucgccggcuucaucgagaacggcugggagggcauggucgacggcugguacggcuuccgccaccagaacuccgagggcaccggccaggccgccgaccucaaguccacccaggccgccaucgaccagaucaacggcaagcucaaccgccucaucgagaagaccaacgagaaguuccaccagaucgagaaggaguucuccgaggucgagggccgcauccaggaccucgagaaguacgucgaggacaccaagaucgaccucugguccuacaacgccggccuccucgucgcccucgagaaccagcacaccaucgaccucaccgacuccgagaugaacaagcucuucgagcgcacccgcaagcagcuccgcgagaacgccgaggacaugggcaacggcugcuucaagaucuaccacaagugcgacaacgccugcaucggcuccauccgcaacggcaccuacgaccacgacgucuaccgcgacgaggcccucaacaaccgcuuccagaucaagggcgucgagcucaaguccggcuacaaggacuggauccucuggaucuccuucgccaucuccugcuuccuccucugcgucguccuccucggcuucaucaugugggccugccagaagggcaacauccgcugcaacaucugcaucuga

SEQ ID NO: 97063 - RNA, 1701 nt, Artificial Sequence
  derived and/or modified CDS sequence (opt2) from hemagglutinin__InfluenzaA__ABG47950
augaagaccaucaucgcccucuccuacauccucugccucgucuucgcccagaagcuccccggcaacgacaacuccaccgccacccucugccucggccaccacgccguccccaacggcacccucgucaagaccaucaccaacgaccagaucgaggucaccaacgccaccgagcucguccaguccuccuccaccggccgcaucugcgacuccccccaccgcauccucgacggcaagaacugcacccucaucgacgcccuccucggcgacccccacugcgacggcuuccagaacaaggagugggaccucuucgucgagcgcuccaaggccuacuccaacugcuaccccuacgacguccccgacuacgccucccuccgcucccucgucgccucccucggcacccucgaguucaucaacgaggacuucaacuggaccggcgucgcccaggacggcaaguccuacuccugcaagcgcggcuccgucaacuccuucuucucccgccucaacuggcuccacaagcucgaguacaaguaccccgcccucaacgucaccaugcccaacaacggcaaguucgacaagcucuacaucuggggcguccaccaccccuccaccgacuccgaccagaccucccucuacgcccgcgccuccggccgcgucaccgucuccaccaagcgcucccagcagaccgucauccccaacaucggcuuccgccccuggguccgcggccucuccucccgcaucuccaucuacuggaccaucgucaagcccggcgacauccuccucaucaacuccaccggcaaccucaucgccccccgcggcuacuucaagauccgcaccggcaaguccuccaucaugcgcuccgacgcccccaucggcaacugcuccuccgagugcaucacccccaacggcaacauccccaacgacaagcccuuccagaacgucaaccgcaucaccuacggcgccugcccccgcuacgucaagcagaacacccucaagcucgccaccggcaugcgcaacguccccgagaagcagacccgcggcaucuucggcgccaucgccggcuucaucgagaacggcugggagggcauggucgacggcugguacggcuuccgccaccagaacuccgagggcaccggccaggccgccgaccucaaguccacccaggccgccaucgaccagaucaacggcaagcucaaccgccucaucgagaagaccaacgagaaguuccaccagaucgagaaggaguucuccgaggucgagggccgcauccaggaccucgagaaguacgucgaggacaccaagaucgaccucugguccuacaacgccggcuuccucgucgcccucgagaaccagcacaccaucgaccucaccgacuccgagaugaacaagcucuucgagcgcacccgcaagcagcuccgcgagaacgccgaggacaugggcaacggcugcuucaagaucuaccacaagugcgacaacgccugcaucggcuccauccgcaacggcaccuacgaccacgacgucuaccgcgacgaggcccucaacaaccgcuuccagaucaagggcgucgagcucaaguccggcuacaaggacuggauccucuggaucuccuucgccaucuccugcuuccuccucugcgucguccuccucggcuucaucaugugggccugccagaagggcaacauccgcugcaacaucugcaucuga

SEQ ID NO: 97064 - RNA, 1701 nt, Artificial Sequence
  derived and/or modified CDS sequence (opt2) from hemagglutinin__InfluenzaA__ABG47961
augaagaccaucaucgcccucuccuacauccucugccucgucuucgcccagaagcuccccggcaacgacaacuccaccgccacccucugccucggccaccacgccguccccaacggcacccucgucaagaccaucaccaacgaccagaucgaggucaccaacgccaccgagcucguccaguccuccuccaccggccgcaucugcgacuccccccaccgcauccucgacggcaagaacugcacccucaucgacgcccuccucggcgacccccacugcgacggcuuccagaacaaggagugggaccucuucgucgagcgcuccaaggccuacuccaacugcuaccccuacgacguccccgacuacgccucccuccgcucccucgucgccuccuccggcacccucgaguucaucaacgaggacuucaacuggaccggcgucgcccaggacggcaaguccuacuccugcaagcgcggcuccgucaacuccuucuucucccgccucaacuggcuccacaagcucgaguacaaguaccccgcccucaacgucaccaugcccaacaacggcaaguucgacaagcucuacaucuggggcguccaccaccccuccaccgacuccgaccagaccucccucuacguccgcgccuccggcggcgucaccgucuccaccaagcgcucccagcagaccgucauccccaacaucggcucccgccccuggguccgcggccucuccucccgcaucuccaucuacuggaccaucgucaagcccggcgacauccuccucaucaacuccaccggcaaccucaucgccccccgcggcuacuucaagaugcgcaacggcaaguccuccaucaugcgcuccgacgcccccaucggcaacugcuccuccgagugcaucacccccaacggcuccauccccaacgacaagcccuuccagaacgucaaccgcaucaccuacggcgccugcccccgcuacgucaagcagaacacccucaagcucgccaccggcaugcgcaacguccccgagaagcagacccgcggcaucuucggcgccaucgccggcuucaucgagaacggcugggagggcauggucgacggcugguacggcuuccgccaccagaacuccgagggcaccggccaggccgccgaccucaaguccacccaggccgccaucgaccagaucaacggcaagcucaaccgccucaucggcaagaccaacgagaaguuccaccagaucgagaaggaguucuccgaggucgagggccgcauccaggaccucgagaaguacgucgaggacaccaagaucgaccucugguccuacaacgccgagcuccucgucgcccucgagaaccagcacaccaucgaccucaccgacuccgagaugaacaagcucuucgagcgcacccgcaagcagcuccgcgagaacgccgaggacaugggcaacggcugcuucaagaucuaccacaagugcgacaacgccugcaucggcuccauccgcaacggcaccuacgaccacgacgucuaccgcgacgaggcccucaacaaccgcuuccagaucaagggcgucgagcucaaguccggcuacaaggacuggauccucuggaucuccuucgccaucuccugcuuccuccucugcgucguccuccucggcuucaucaugugggccugccagaagggcaacauccgcugcaacaucugcaucuga

SEQ ID NO: 97065 - RNA, 1701 nt, Artificial Sequence; identical to SEQ ID NO: 97060
  derived and/or modified CDS sequence (opt2) from hemagglutinin__InfluenzaA__ABG47972

SEQ ID NO: 97066 - RNA, 1701 nt, Artificial Sequence; identical to SEQ ID NO: 97060
  derived and/or modified CDS sequence (opt2) from hemagglutinin__InfluenzaA__ABG47983

SEQ ID NO: 97067 - RNA, 1701 nt, Artificial Sequence; identical to SEQ ID NO: 97060
  derived and/or modified CDS sequence (opt2) from hemagglutinin__InfluenzaA__ABG47994

SEQ ID NO: 97068 - RNA, 1701 nt, Artificial Sequence
  derived and/or modified CDS sequence (opt2) from hemagglutinin__InfluenzaA__ABG48005
augaagaccaucaucgcccucuccuacauccucugccucgucuucgcccagaagcuccccggcaacgacaacuccaccgccacccucugccucggccaccacgccguccccaacggcacccucgucaagaccaucaccaacgaccagaucgaggucaccaacgccaccgagcucguccaguccuccuccaccggccgcaucugcgacuccccccaccgcauccucgacggcaagaacugcacccucaucgacgcccuccucggcgacccccacugcgacggcuuccagaacaaggagugggaccucuucgucgagcgcuccaaggccuacuccaacugcuaccccuacgacguccccgacuacgccucccuccgcucccucgucgccuccuccggcacccucgaguucaucaacgaggacuucaacuggaccggcgucgcccaggacggcaaguccuacgccugcaagcgcggcuccgucaacuccuucuucucccgccucaacuggcuccacaagcucgaguacaaguaccccgcccucaacgucaccaugcccaacaacggcaaguucgacaagcucuacaucuggggcguccaccaccccuccaccgacuccgaccagaccucccucuacguccgcgccuccggccgcgucaccgucuccaccaagcgcucccagcagaccgucauccccaacaucggcuuccgccccuggguccgcggccucuccucccgcaucuccaucuacuggaccaucgucaagcccggcgacauccuccucaucaacuccaccggcaaccucaucgccccccgcggcuacuucaagauccgcaacggcaaguccuccaucaugcgcuccgacgcccccaucggcaacugcuccuccgagugcaucacccccaacggcuccauccccaacgacaagcccuuccagaacgucaaccgcaucaccuacggcgccugcccccgcuacgucaagcagaacacccucaagcucgccaccggcaugcgcaacguccccgagaagcagacccgcggcaucuucggcgccaucgccggcuucaucgagaacggcugggagggcauggucgacggcugguacggcuuccgccaccagaacuccgagggcaccggccaggccgccgaccucaaguccacccaggccgccaucaaccagaucaacggcaagcucaaccgccucaucgagaagaccaacgagaaguuccaccagaucgagaaggaguucuccgaggucgagggccgcauccaggaccucgagaaguacgucgaggacaccaagaucgaccucugguccuacaacgccggccuccucgucgcccucgagaaccagcacaccaucgaccucaccgacuccgagaugaacaagcucuucgagcgcacccgcaagcagcuccgcgagaacgccgaggacaugggcaacggcugcuucaagaucuaccacaagugcgacaacgccugcaucggcuccauccgcaacggcaccuacgaccacgacgucuaccgcgacgaggcccucaacaaccgcuuccagaucaagggcgucgagcucaaguccggcuacaaggacuggauccucuggaucuccuucgccaucuccugcuuccuccucugcgucguccuccucggcuucaucaugugggccugccagaagggcaacauccgcugcaacaucugcaucuga

SEQ ID NO: 97069 - RNA, 1701 nt, Artificial Sequence; identical to SEQ ID NO: 97060
  derived and/or modified CDS sequence (opt2) from hemagglutinin__InfluenzaA__ABG48016

SEQ ID NO: 97070 - RNA, 1701 nt, Artificial Sequence; identical to SEQ ID NO: 97060
  derived and/or modified CDS sequence (opt2) from hemagglutinin__InfluenzaA__ABG48027

SEQ ID NO: 97071 - RNA, 1698 nt, Artificial Sequence
  derived and/or modified CDS sequence (opt2) from hemagglutinin__InfluenzaA__ABG48049
augaaggucaagcuccucguccuccucugcaccuucaccgccaccuacgccgacaccaucugcaucggcuaccacgccaacaacuccaccgacaccgucgacaccguccucgagaagaacgucaccgucacccacuccgucaaccuccucgaggacucccacaacggcaagcucugccuccucaagggcaucgccccccuccagcucggcaacugcuccgucgccggcuggauccucggcaaccccgagugcgagcuccucaucuccaaggaguccugguccuacaucgucgagacccccaaccccgagaacggcaccugcuaccccggcuacuucgccgacuacgaggagcuccgcgagcagcucuccuccgucuccuccuucgagcgcuucgagaucuuccccaaggaguccuccuggcccaaccacaccgucaccggcgucuccgccuccugcucccacaacggcaaguccuccuucuaccgcaaccuccucuggcucaccggcaagaacggccucuaccccaaccucuccaaguccuacgccaacaacaaggagaaggagguccucguccucuggggcguccaccacccccccaacaucggcgaccagcgcgcccucuaccacaccgagaacgccuacgucuccgucgucuccacccacuacucccgccgcuucacccccgagaucgccaagcgccccaagguccgcgaccaggagggccgcaucaacuacuacuggacccuccucgagcccggcgacaccaucaucuucgaggccaacggcaaccucaucgccccccgcuacgccuucgcccucucccgcggcuucggcuccggcaucaucaccuccaacgcccccauggacgagugcgacgccaagugccagaccccccagggcgccaucaacuccucccuccccuuccagaacguccaccccgucaccaucggcgagugccccaaguacguccgcuccgccaagcuccgcauggucaccggccuccgcaacauccccuccauccagucccgcggccucuucggcgccaucgccggcuucaucgagggcggcuggaccggcauggucgacggcugguacggcuaccaccaccagaacgagcagggcuccggcuacgccgccgaccagaaguccacccagaacgccaucaacggcaucaccaacaaggucaacuccgucaucgagaagaugaacacccaguucaccgccgucggcaaggaguucaacaagcucgagcgccgcauggagaaccucaacaagaaggucgacgacggcuuccucgacaucuggaccuacaacgccgagcuccucguccuccucgagaacgagcgcacccucgacuuccacgacuccaacgucaagaaccucuacgagaaggucaagucccagcucaagaacaacgccaaggagaucggcaacggcugcuucgaguucuaccacaagugcaacaacgagugcauggaguccgucaagaacggcaccuacgacuaccccaaguacuccgaggaguccaagcucaaccgcgagaagaucgacggcgucaagcucgaguccaugggcgucuaccagauccucgccaucuacuccaccgucgccuccucccucguccuccucgucucccucggcgccaucuccuucuggaugugcuccaacggcucccuccagugccgcaucugcaucuga

SEQ ID NO: 97072 - RNA, 1701 nt, Artificial Sequence; identical to SEQ ID NO: 96686
  derived and/or modified CDS sequence (opt2) from hemagglutinin__InfluenzaA__ABG48060

SEQ ID NO: 97073 - RNA, 1701 nt, Artificial Sequence; identical to SEQ ID NO: 96686
  derived and/or modified CDS sequence (opt2) from hemagglutinin__InfluenzaA__ABG48071

SEQ ID NO: 97074 - RNA, 1701 nt, Artificial Sequence
  derived and/or modified CDS sequence (opt2) from hemagglutinin__InfluenzaA__ABG48082
augaagaccaucaucgcccucuccuacauccucugccucgucuucgcccagaagcuccccggcaacgacaacuccaccgccacccucugccucggccaccacgccguccccaacggcacccucgucaagaccaucaccaacgaccagaucgaggucaccaacgccaccgagcucguccaguccuccuccaccggccgcaucugcgacuccccccaccagauccucgacggcgagaacugcacccucaucgacgcccuccucggcgacccccacugcgacggcuuccagaacaaggagugggaccucuucgucgagcgcuccaaggccuacuccaacugcuaccccuacgacguccccgacuacgucucccuccgcucccucgucgccuccuccggcacccucgaguucaacaacgaguccuucaacuggaccggcgucgcccagaacggcaccuccuccgccugcaagcgccgcuccgacaaguccuucuucucccgccucaacuggcuccaccagcucaaguacaaguaccccgcccucaacgucaccaugcccaacaacgagaaguucgacaagcucuacaucuggggcguccuccaccccggcaccgacuccgaccagaucucccucuacgcccaggccuccggccgcgucaccgucuccaccaagcgcucccagcagaccgucauccccaacaucggcucccgccccuggguccgcggcgucuccucccgcaucuccaucuacuggaccaucgucaagcccggcgacauccuccucaucaacuccaccggcaaccucaucgccccccgcggcuacuucaagauccgcuccggcaaguccuccaucaugcgcuccgacgcccccaucggcaagugcaacuccgagugcaucacccccaacggcuccauccccaacggcaagcccuuccagaacgucaaccgcaucaccuacggcgccugcccccgcuacgucaagcagaacacccucaagcucgccaccggcaugcgcaacguccccgagaagcagacccgcggcaucuucggcgccaucgccggcuucaucgagaacggcugggagggcaugauggacggcugguacggcuuccgccaccagaacuccgagggcaccggccaggccgccgaccucaaguccacccaggccgccaucaaccagaucaacggcaagcucaaccgccucaucgagaagaccaacgagaaguuccaccagaucgagaaggaguucuccgaggucgagggccgcauccaggaccucgagaaguacgucgaggacaccaagaucgaccucugguccuacaacgccgagcuccucgucgcccucgagaaccagcacaccaucgaccucaccgacuccgagaugaacaagcucuucgagcgcaccaagaagcagcuccgcgagaacgccgaggacaugggcaacggcugcuucaagaucuaccacaagugcgacaacgccugcaucggcuccauccgcaacggcaccuacgaccacgacgucuaccgcgacgaggcccucaacaaccgcuuccagaucaagggcgucgagcucaaguccggcuacaaggacuggauccucuggaucuccuucgccaucuccugcuuccuccucugcaucguccuccucggcuucaucaugugggccugccagaagggcaacauccgcugcaacaucugcaucuga

SEQ ID NO: 97075 - RNA, 1701 nt, Artificial Sequence
  derived and/or modified CDS sequence (opt2) from hemagglutinin__InfluenzaA__ABG48104
augaagaccaucaucgcccucuccuacauccucugccucgucuucgcccagaagcuccccggcaacgacaacuccaccgccacccucugccucggccaccacgccguccccaacggcacccucgucaagaccaucaccaacgaccagaucgaggucaccaacgccaccgagcucguccaguccuccuccaccggccgcaucugcgacuccccccaccagauccucgacggcgagaacugcacccucaucgacgcccuccucggcgacccccacugcgacggcuuccagaacaaggagugggaccucuucgucgagcgcucccgcgccuacuccaacugcuaccccuacgacguccccgacuacgucucccuccgcucccucgucgccuccuccggcacccucgaguucaacaacgaguccuucaacuggaccggcgucgcccagaacggcaccuccuccgccugcaagcgccgcuccgacaaguccuucuucucccgccucaacuggcuccaccagcucaaguacaaguaccccgcccucaacgucaccaugcccaacaacgagaaguucgacaagcucuacaucuggggcguccaccaccccggcaccgacuccgaccagaucucccucuacgcccaggccuccggccgcgucaccgucuccaccaagcgcucccagcagaccgucauccccaacaucggcucccgccccuggguccgcggcgucuccucccgcaucuccaucuacuggaccaucgucaagcccggcgacauccuccucaucaacuccaccggcaaccucaucgccccccgcggcuacuucaagauccgcuccggcaaguccuccaucaugcgcuccgacgcccccaucggcaagugcaacuccgagugcaucacccccaacggcuccauccccaacgacaagcccuuccagaacgucaaccgcaucaccuacggccccugcccccgcuacgucaagcagaacacccucaagcucgccaccggcaugcgcaacguccccgagaagcagacccgcggcaucuucggcgccaucgccggcuucaucgagaacggcugggagggcaugauggacggcugguacggcuuccgccaccagaacuccgagggcaccggccaggccgccgaccucaaguccacccaggccgccaucaaccagaucaacggcaagcucaaccgccucaucgagaagaccaacgagaaguuccaccagaucgagaaggaguucuccgaggucgagggccgcauccaggaccucgagaaguacgucgaggacaccaagaucgaccucugguccuacaacgccgagcuccucgucgcccucgagaaccagcacaccaucgaccucaccgacuccgagaugaacaagcucuucgagcgcaccaagaagcagcuccgcgagaacgccgaggacaugggcaacggcugcuucaagaucuaccacaagugcgacaacgccugcaucggcuccauccgcaacggcaccuacgaccacgacgucuaccgcgacgaggcccucaacaaccgcuuccagaucaagggcgucgagcucaaguccggcuacaaggacuggauccucuggaucuccuucgccaucuccugcuuccuccucugcaucguccuccucggcuucaucaugugggccugccagaagggcaacauccgcugcaacaucugcaucuga

SEQ ID NO: 97076 - RNA, 1701 nt, Artificial Sequence; identical to SEQ ID NO: 96676
  derived and/or modified CDS sequence (opt2) from hemagglutinin__InfluenzaA__ABG48115

SEQ ID NO: 97077 - RNA, 1701 nt, Artificial Sequence; identical to SEQ ID NO: 96683
  derived and/or modified CDS sequence (opt2) from hemagglutinin__InfluenzaA__ABG48126

SEQ ID NO: 97078 - RNA, 1701 nt, Artificial Sequence; identical to SEQ ID NO: 96598
  derived and/or modified CDS sequence (opt2) from hemagglutinin__InfluenzaA__ABG48148

SEQ ID NO: 97079 - RNA, 1701 nt, Artificial Sequence; identical to SEQ ID NO: 96598
  derived and/or modified CDS sequence (opt2) from hemagglutinin__InfluenzaA__ABG48159

SEQ ID NO: 97080 - RNA, 1701 nt, Artificial Sequence
  derived and/or modified CDS sequence (opt2) from hemagglutinin__InfluenzaA__ABG48170
augaagaccaucaucgcccucuccuacauccucugccucgucuucgcccagaagcuccccggcaacgacaacuccaccgccacccucugccucggccaccacgccguccccaacggcacccucgucaagaccaucaccaacgaccagaucgaggucaccaacgccaccgagcucguccaguccuccuccaccggccgcaucugcgacuccccccaccagauccucgacggcgagaacugcacccucaucgacgcccuccucggcgacccccacugcgacggcuuccagaacaaggagugggaccucuucgucgagcgcuccaaggccuacuccaacugcuaccccuacgacguccccgacuacgucucccuccgcucccucgucgccuccuccggcacccucgaguucaacaacgaguccuucaacuggaccggcgucgcccagaacggcaccuccuccgccugcaagcgccgcuccgacaaguccuucuucucccgccucaacuggcuccaccagcucaaguacaaguaccccgcccucaacgucaccaugcccaacaacgagaaguucgacaagcucuacaucuggggcguccaccaccccggcaccgacuccgaccagaucucccucuacgcccaggccuccggccgcgucaccgucuccaccaagcgcucccagcagaccgucauccccaacaucggcucccgccccuggguccgcggcgucuccucccgcaucuccaucuacuggaccaucgucaagcccggcgacauccuccucaucaacuccaccggcaaccucaucgccccccgcggcuacuucaagauccgcuccggcaaguccuccaucaugaaguccgacgcccccaucggcaagugcaacuucgagugcaucacccccaacggcuccauccccaacggcaagcccuuccagaacgucaaccgcaucaccuacggcgccugcccccgcuacgucaagcagaacacccucaagcucgccaccggcaugcgcaacguccccgagaagcagacccgcggcaucuucggcgccaucgccggcuucaucgagaacggcugggagggcaugauggacggcugguacggcuuccgccaccagaacuccgagggcaccggccaggccgccgaccucaaguccacccaggccgccaucaaccagaucaacggcaagcucaaccgccucaucgagaagaccaacgagaaguuccaccagaucgagaaggaguucuccgaggucgagggccgcauccaggaccucgagaaguacgucgaggacaccaagaucgaccucugguccuacaacgccgagcuccucgucgcccucgagaaccagcacaccaucgaccucaccgacuccgagaugaacaagcucuucgagcgcaccaagaagcagcuccgcgagaacgccgaggacaugggcaacggcugcuucaagaucuaccacaagugcgacaacgccugcaucggcuccauccgcaacggcaccuacgaccacgacgucuaccgcgacgaggcccucaacaaccgcuuccagaucaagggcgucgagcucaaguccggcuacaaggacuggauccucuggaucuccuucgccaucuccugcuuccuccucugcaucguccuccucggcuucaucaugugggccugccagaagggcaacauccgcugcaacaucugcaucuga

SEQ ID NO: 97081 - RNA, 1701 nt, Artificial Sequence
  derived and/or modified CDS sequence (opt2) from hemagglutinin__InfluenzaA__ABG48181
augaagaccaucaucgcccucuccuacauccucugccucgucuucgcccagaagcuccccggcaacgacaacuccaccgccacccucugccucggccaccacgccguccccaacggcacccucgucaagaccaucaccaacgaccagaucgaggucaccaacgccaccgagcucguccaguccuccuccaccggccgcaucugcgacuccccccaccagauccucgacggcgagaacugcacccucaucgacgcccuccucggcgacccccacugcgacggcuuccagaacaaggagugggaccucuucgucgagcgcuccaaggccuacuccaacugcuaccccuacgacguccccgacuacgucucccuccgcucccucgucgccuccuccggcacccucgaguucaacaacgaguccuucaacuggaccggcgucgcccagaacggcaccuccuacgccugcaagcgccgcuccgacaaguccuucuucucccgccucaacuggcuccaccagcucaaguacaaguaccccgcccucaacgucaccaugcccaacaacgagaaguucgacaagcucuacaucuggggcguccaccaccccggcaccgacuccgaccagaucucccucuacgcccaggccuccggccgcgucaccgucuccaccaagcgcucccagcagaccgucauccccaacaucggcucccgccccuggguccgcggcgucuccucccgcaucuccaucuacuggaccaucgucaagcccggcgacauccuccucaucaacuccaccggcaaccucaucgccccccgcggcuacuucaagauccgcuccggcaaguccuccaucaugcgcuccgacgcccccaucggcaagugcaacuccgagugcaucacccccaacggcuccauccccaacgacaagcccuuccagaacgucaaccgcaucaccuacggcgccugcccccgcuacgucaagcagaacacccucaagcucgccaccggcaugcgcaacguccccgagaagcagacccgcggcaucuucggcgccaucgccggcuucaucgagaacggcugggagggcaugauggacggcugguacggcuuccgccaccagaacuccgagggcaccggccaggccgccgaccucaaguccacccaggccgccaucaaccagaucaacggcaagcucaaccgccucaucgagaagaccaacgagaaguuccaccagaucgagaaggaguucuccgaggucgagggccgcauccaggaccucgagaaguacgucgaggacaccaagaucgaccucugguccuacaacgccgagcuccucgucgcccucgagaaccagcacaccaucgaccucaccgacuccgagaugaacaagcucuucgagcgcaccaagaagcagcuccgcgagaacgccgaggacaugggcaacggcugcuucaagaucuaccacaagugcgacaacgccugcaucggcuccauccgcaacggcaccuacgaccacgacgucuaccgcgacgaggcccucaacaaccgcuuccagaucaagggcgucgagcucaaguccggcuacaaggacuggguccucuggaucuccuucgccaucuccugcuuccuccucugcaucguccuccucggcuucaucaugugggccugccagaagggcaacauccgcugcaacaucugcaucuga

SEQ ID NO: 97082 - RNA, 1701 nt, Artificial Sequence; identical to SEQ ID NO: 96598
  derived and/or modified CDS sequence (opt2) from hemagglutinin__InfluenzaA__ABG48192

SEQ ID NO: 97083 - RNA, 1701 nt, Artificial Sequence
  derived and/or modified CDS sequence (opt2) from hemagglutinin__InfluenzaA__ABG48203
augaagaccaucaucgcccucuccuacauccucugccucgucuucgcccagaagcuccccggcaacgacaacuccaccgccacccucugccucggccaccacgccguccccaacggcaccaucgucaagaccaucaccaacgaccagaucgaggucaccaacgccaccgagcucguccaguccuccuccaccggcggcaucugcgacuccccccaccagauccucgacggcgagaacugcacccucaucgacgcccuccucggcgacccccagugcgacggcuuccagaacaagaagugggaccucuucgucgagcgcuccaaggccuacuccaacugcuaccccuacgacguccccgaccacgccucccuccgcucccucgucgccuccuccggcacccucgaguucaacaacgaguccuucgacuggaccggcgucacccagaacggcaccuccuccgccugcaagcgccgcuccaacaaguccuucuucucccgccucaacuggcucacccaccucaaguacaaguaccccgcccucaacgucaccaugcccaacaacgagaaguucgacaagcucuacaucuggggcguccaccaccccggcaccgacuccgaccagaucucccucuacgcccaggccuccggccgcaucaccgucuccaccaagcgcucccagcagaccgucauccccaacaucggcucccgcccccgcguccgcgacgucuccucccgcaucuccaucuacuggaccaucgucaagcccggcgacauccuccucaucaacuccaccggcaaccucaucgccccccgcggcuacuucaagauccgcuccggcaaguccuccaucaugcgcuccgacgcccccaucggcaagugcaacuccgagugcaucacccccaacggcuccauccccaacgacaagcccuuccagaacgucaaccgcaucaccuacggcgccugcccccgcuacgucaagcagaacacccucaagcucgccaccggcaugcgcaacguccccgagaagcagacccgcggcaucuucggcgccaucgccggcuucaucgagaacggcugggagggcauggucgacggcugguacggcuuccgccaccagaacuccgagggcaccggccaggccgccgaccucaaguccacccaggccgccaucaaccagaucaacggcaagcucaaccgccucaucggcaagaccaacgagaaguuccaccagaucgagaaggaguucuccgaggucgagggccgcauccaggaccucgagaaguacgucgaggacaccaagaucgaccucugguccuacaacgccgagcuccucgucgcccucgagaaccagcacaccaucgaccucaccgacuccgagaugaacaagcucuucgagcgcaccaagaagcagcuccgcgagaacgccgaggacaugggcaacggcugcuucaagaucuaccacaagugcgacaacgccugcaucggcuccauccgcaacggcaccuacgaccacgacgucuaccgcgacgaggcccucaacaaccgcuuccagaucaagggcgucgagcucaaguccggcuacaaggacuggauccucuggaucuccuucgccaucuccugcuuccuccucugcgucgcccuccucggcuucaucaugugggccugccagaagggcaacauccgcugcaacgucugcaucuga

SEQ ID NO: 97084 - RNA, 1701 nt, Artificial Sequence; identical to SEQ ID NO: 96552
  derived and/or modified CDS sequence (opt2) from hemagglutinin__InfluenzaA__ABG48214

SEQ ID NO: 97085 - RNA, 1701 nt, Artificial Sequence; identical to SEQ ID NO: 96552
  derived and/or modified CDS sequence (opt2) from hemagglutinin__InfluenzaA__ABG48236

SEQ ID NO: 97086 - RNA, 1701 nt, Artificial Sequence
  derived and/or modified CDS sequence (opt2) from hemagglutinin__InfluenzaA__ABG48247
augaagaccaucaucgcccucuccuacauccucugccucgucuucgcccagaagcuccccggcaacgacaacaacaccgccacccucugccucggccaccacgccguccccaacggcaccaucgucaagaccaucaccaacgaccagaucgaggucaccaacgccaccgagcucguccaguccuccuccaccggcggcaucugcgacuccccccaccagauccucgacggcgagaacugcacccucaucgacgcccuccucggcgacccccagugcgacggcuuccagaacaagaagugggaccucuucgucgagcgcuccaaggccuacuccaacugcuaccccuacgacguccccgaccacgccucccuccgcucccucgucgccuccuccggcacccucgaguucaacaacgaguccuucgacuggaccggcgucacccagaacggcaccuccuccgccugcaagcgccgcuccaacaaguccuucuucucccgccucaacuggcucacccaccucaaguacaaguaccccgcccucaacgucaccaugcccaacaacgagaaguucgacaagcucuacaucuggggcguccaccaccccggcaccgacuccgaccagaucucccucuacgcccaggccuccggccgcaucaccgucuccaccaagcgcucccagcagaccgucauccccaacaucggcucccgcccccgcguccgcgacgucuccucccgcaucuccaucuacuggaccaucgucaagcccggcgacauccuccucaucaacuccaccggcaaccucaucgccccccgcggcuacuucaagauccgcuccggcaaguccuccaucaugcgcuccgacgcccccaucggcaagugcaacuccgagugcaucacccccaacggcuccauccccaacgacaagcccuuccagaacgucaaccgcaucaccuacggcgccugcccccgcuacgucaagcagaacacccucaagcucgccaccggcaugcgcaacguccccgagaagcagacccgcggcaucuucggcgccaucgccggcuucaucgagaacggcugggagggcauggucgacggcugguacggcuuccgccaccagaacuccgagggcaccggccaggccgccgaccucaaguccacccaggccgccaucaaccagaucaacggcaagcucaaccgccucaucggcaagaccaacgagaaguuccaccagaucgagaaggaguucuccgaggucgagggccgcauccaggaccucgagaaguacgucgaggacaccaagaucgaccucugguccuacaacgccgagcuccucgucgcccucgagaaccagcacaccaucgaccucaccgacuccgagaugaacaagcucuucgagcgcaccaagaagcagcuccgcgagaacgccgaggacaugggcaacggcugcuucaagaucuaccacaagugcgacaacgccugcaucggcuccauccgcaacggcaccuacgaccacgacgucuaccgcgacgaggcccucaacaaccgcuuccagaucaagggcgucgagcucaaguccggcuacaaggacuggauccucuggaucuccuucgccaucuccugcuuccuccucugcgucgcccuccucggcuucaucaugugggccugccagaagggcaacauccgcugcaacaucugcaucuga

SEQ ID NO: 97087 - RNA, 1701 nt, Artificial Sequence
  derived and/or modified CDS sequence (opt2) from hemagglutinin__InfluenzaA__ABG48269
augaagaccaucaucgcccucuccuacauccucugccucgucuucgcccagaagcuccccggcaacgacaacuccaccgccacccucugccucggccaccacgccguccccaacggcaccaucgucaagaccaucaccaacgaccagaucgaggucaccaacgccaccgagcucguccaguccucccccaccggcggcaucugcgacuccccccaccagauccucgacggcgagaacugcacccucaucgacgcccuccucggcgacccccagugcgacggcuuccagaacaagaagugggaccucuucgucgagcgcuccaaggcccacuccaacugcuaccccuacgacguccccgacuacgccucccuccgcucccucgucgccuccuccggcacccucgaguucaacaacgaguccuucaacuggaccggcgucacccagaacggcaccuccuccgccugcaagcgccgcuccaacaaguccuucuucucccgccucaacuggcucacccaccucaaguucaaguaccccgcccucaacgucaccaugcccaacaacgagaaguucgacaagcucuacaucuggggcguccaccaccccggcaccgacaacgaccagaucucccucuacgcccaggccuccggccgcaucaccgucuccaccaagcgcucccagcagaccgucauccccaacaucggcucccgcccccgcguccgcgacguccccucccgcaucuccaucuacuggaccaucgucaagcccggcgacauccuccucaucaacuccaccggcaaccucaucgccccccgcggcuacuucaagauccgcuccggcaaguccuccaucaugcgcuccgacgcccccaucggcaagugcaacuccgagugcaucacccccaacggcuccauccccaacgacaagcccuuccagaacgucaaccgcaucaccuacggcgccugcccccgcuacgucaagcagaacacccucaagcucgccaccggcaugcgcaacguccccgagaagcagacccgcggcaucuucggcgccaucgccggcuucaucgagaacggcugggagggcauggucgacggcugguacggcuuccgccaccagaacuccgagggcaccggccaggccgccgaccucaaguccacccaggccgccaucaaccagaucaacggcaagcucaaccgccucaucggcaagaccaacgagaaguuccaccagaucgagaaggaguucuccgaggucgagggccgcauccaggaccucgagaaguacgucgaggacaccaagaucgaccucugguccuacaacgccgagcuccucgucgcccucgagaaccagcacaccaucgaccucaccgacuccgagaugaacaagcucuucgagcgcaccaagaagcagcuccgcgagaacgccgaggacaugggcaacggcugcuucaagaucuaccacaagugcgacaacgccugcaucggcuccauccgcaacggcaccuacgaccacgacgucuaccgcgacgaggcccucaacaaccgcuuccagaucaagggcgucgagcucaaguccggcuacaaggacuggauccucuggaucuccuucgccaucuccugcuuccuccucugcgucgcccuccucggcuucaucaugugggccugccagaagggcaacauccgcugcaacaucugcaucuga

SEQ ID NO: 97088 - RNA, 1701 nt, Artificial Sequence
  derived and/or modified CDS sequence (opt2) from hemagglutinin__InfluenzaA__ABG48291
augaagaccaucaucgcccucuccuacauccucugccucgucuucgcccagaagcuccccggcaacgacaacuccaccgccacccucugccucggccaccacgccguccccaacggcacccucgucaagaccaucaccaacgaccagaucgaggucaccaacgccaccgagcucguccaguccuccuccaccggccgcaucugcgacuccccccaccgcauccucgacggcaagaacugcacccucaucgacgcccuccucggcgacccccacugcgacggcuuccagaacaaggagugggaccucuucgucgagcgcuccaaggccuacuccaacugcuaccccuacgacguccccgacuacgccucccuccgcucccucgucgccuccuccggcacccucgaguucaucaacgaggacuucaacuggaccggcgucgcccaggacggcggcuccuacgccugcaagcgcggcuccgucaacuccuucuucucccgccucaacuggcuccacaaguccgaguacaaguaccccgcccucaacgucuccaugcccaacaacggcaaguucaacaagcucuacaucuggggcguccaccaccccuccaccgacuccgaccagaccucccucuacguccgcgccuccggccgcgucaccgucuccaccaagcgcucccagcagaccgucacccccaacaucggcucccgccccuggguccgcggccucuccucccgcaucuccaucuacuggaccaucgucaagcccggcgacauccuccucaucaacuccaccggcaaccucaucgccccccgcggcuacuucaagauccgcaacggcaaguccuccaucaugcgcuccgacgcccccaucggcaccugcuccuucgagugcaucacccccaacggcuccauccccaacgacaagcccuuccagaacgucaaccgcaucaccuacggcgccugcccccgcuacgucaagcagaacacccucaagcucgccaccggcaugcgcaacguccccgagaagcagacccgcggcaucuucggcgccaucgccggcuucaucgagaacggcugggagggcauggucgacggcugguacggcuuccgccaccagaacuccgagggcaccggccaggccgccgaccucaaguccacccaggccgccaucgaccagaucaacggcaagcucaaccgccucaucgagaagaccaacgagaaguuccaccagaucgagaaggaguucuccgaggucgagggccgcauccaggaccucgagaaguacgucgaggacaccaagaucgaccucugguccuacaacgccgagcuccucgucgcccucgagaaccagcacaccaucgaccucaccgacuccgagaugaacaagcucuucgagaagacccgcaagcagcuccgcgagaacgccgaggacaugggcaacggcugcuucaagaucuaccacaagugcgacaacgccugcaucggcuccauccgcaacggcaccuacgaccacgacgucuaccgcgacgaggcccucaacaaccgcuuccagaucaagggcgucgagcucaaguccggcuacaaggacuggauccucuggaucuccuucgccaucuccugcuuccuccucugcgucguccuccucggcuucaucaugugggccugccagaagggcaacauccgcugcaacaucugcaucuga

SEQ ID NO: 97089 - RNA, 1701 nt, Artificial Sequence
  derived and/or modified CDS sequence (opt2) from hemagglutinin__InfluenzaA__ABG48335
augaagaccaucaucgcccucuccuacauccucugccucgucuucgcccagaagcuccccggcaacgacaacuccaccgccacccucugccucggccaccacgccguccccaacggcacccucgucaagaccaucaccaacgaccagaucgaggucaccaacgccaccgagcucguccaguccuccuccaccggccgcaucugcgacuccccccaccgcauccucgacggcaagaacugcacccucaucgacgcccuccucggcgacccccacugcgacggcuuccagaacaaggagugggaccucuucgucgagcgcuccaaggccuacuccaacugcuaccccuacgacguccccgacuacgccucccuccgcucccucgucgccuccuccggcacccucgaguucaucaacgaggacuucaacuggaccggcgucgcccaggacggcaaguccuacgccugcaagcgcggcuccgucaacuccuucuucucccgccucaacuggcuccacaagcucgaguacaaguaccccgcccucaacgucaccaugcccaacaacggcaaguucgacaagcucuacaucuggggcguccaccaccccuccaccgacuccgaccagaccucccucuacguccgcgccuccggccgcgucaccgucuccaccaagcgcucccagcagaccgucauccccaacaucggcucccgccccuggguccgcggccucuccucccgcaucuccaucuacuggaccaucgucaagcccggcgacauccuccucaucaacuccaccggcaaccucaucgccccccgcggcuacuucaagauccgcaacggcaaguccuccaucaugcgcuccgacgcccccaucggcaacugcuccuccgagugcaucacccccaacggcuccauccccaacgacaagcccuuccagaacgucaaccgcaucaccuacggcgccugcccccgcuacgucaagcagaacacccucaagcucgccaccggcaugcgcaacguccccgagaagcagacccgcggcaucuucggcgccaucgccggcuucaucgagaacggcugggagggcauggucgacggcugguacggcuuccgccaccagaacuccgagggcaccggccaggccgccgaccucaaguccacccaggccgccaucgaccagaucaacggcaagcucaaccgccucaucgagaagaccaacgagaaguuccaccagaucgagaaggaguucuccgaggucgagggccgcauccaggaccucgagaaguacgucgaggacaccaagaucgaccucugguccuacaacgccgagcuccucgucgcccucgagaaccagcacaccaucgaccucaccgacuccgagaugaacaagcucuucgagcgcacccgcaagcagcuccgcgagaacgccgaggacaugggcaacggcugcuucaagaucuaccacaagugcgacaacgccugcaucggcuccauccgcaacggcaccuacgaccacgacgucuaccgcgacgaggcccucaacaaccgcuuccagaucaagggcgucgagcucaaguccggcuacaaggacuggauccucuggaucuccuucgccaucuccugcuuccuccucugcgucguccuccucggcuucaucaugugggccugccagaagggcaacauccgcugcaacaucugcaucuga

SEQ ID NO: 97090 - RNA, 1701 nt, Artificial Sequence
  derived and/or modified CDS sequence (opt2) from hemagglutinin__InfluenzaA__ABG48346
augaagaccaucaucgcccucuccuacauccucugccucgucuucgcccagaagcuccccggcaacgacaacuccaccgccacccucugccucggccaccacgccguccccaacggcacccucgucaagaccaucaccaacgaccagaucgaggucaccaacgccaccgagcucguccaguccuccuccaccggccgcaucugcgacuccccccaccgcauccucgacggcaagaacugcacccucaucgacgcccuccucggcgacccccacugcgacggcuuccagaacaaggagugggaccucuucgucgagcgcaacaaggccuacuccaacugcuaccccuacgacguccccgacuacgccucccuccgcucccucgucgccuccuccggcacccucgaguucaucaacgaggacuucaacuggaccggcgucgcccaggacggcaaguccuacgccugcaagcgcggcuccgucaacuccuucuucucccgccucaacuggcuccacaagcucgaguacaaguaccccgcccucaacgucaccaugcccaacaacggcaaguucgacaagcucuacaucuggggcguccaccaccccuccaccgacuccgaccagaccucccucuacguccgcgccuccggccgcgucaccgucuccaccaagcgcucccagcagaccgucauccccaacaucggcucccgccccuggguccgcggccucuccucccgcaucuccaucuacuggaccaucgucaagcccggcgacauccuccucaucaacuccaccggcaaccucaucgccccccgcggcuacuucaagauccgcaacggcaaguccuccaucaugcgcuccgacgcccccaucggcaacugcuccuccgagugcaucacccccaacggcuccauccccaacgaccgccccuuccagaacgucaaccgcaucaccuacggcgccugcccccgcuacgucaagcagaacacccucaagcucgccaccggcaugcgcaacguccccgagaagcagacccgcggcaucuucggcgccaucgccggcuucaucgagaacggcugggagggcauggucgacggcugguacggcuuccgccaccagaacuccgagggcaccggccaggccgccgaccucaaguccacccaggccgccaucgaccagaucaacggcaagcucaaccgccucaucgagaagaccaacgagaaguuccaccagaucgagaaggaguucuccgaggucgagggccgcauccaggaccucgagaaguacgucgaggacaccaagaucgaccucugguccuacaacgccgagcuccucgucgcccucgagaaccagcacaccaucgaccucaccgacuccgagaugaacaagcucuucgagcgcacccgcaagcagcuccgcgagaacgccgaggacaugggcaacggcugcuucaagaucuaccacaagugcgacaacgccugcaucggcuccauccgcaacggcaccuacgaccacgacgucuaccgcgacgaggcccucaacaaccgcuuccagaucaagggcgucgagcucaaguccggcuacaaggacuggauccucuggaucuccuucgccaucuccugcuuccuccucugcgucguccuccucggcuucaucaugugggccugccagaagggcaacauccgcugcaacaucugcaucuga

SEQ ID NO: 97091 - RNA, 1701 nt, Artificial Sequence; identical to SEQ ID NO: 97089
  derived and/or modified CDS sequence (opt2) from hemagglutinin__InfluenzaA__ABG48357

SEQ ID NO: 97092 - RNA, 1701 nt, Artificial Sequence
  derived and/or modified CDS sequence (opt2) from hemagglutinin__InfluenzaA__ABG48368
augaagaccaucaucgcccucuccuacauccucugccucgucuucgcccagaagcuccccggcaacgacaacuccaccgccacccucugccucggccaccacgccguccccaacggcacccucgucaagaccaucaccaacgaccagaucgaggucaccaacgccaccgagcucguccaguccuccuccaccggccgcaucugcgacuccccccaccgcauccucgacggcaagaacugcacccucaucgacgcccuccucggcgacccccacugcgacggcuuccagaacaaggagugggaccucuucgucgagcgcuccaaggccuacuccaacugcuaccccuacgacguccccgacuacgccucccuccgcucccucgucgccuccuccggcacccucgaguucaucaacgaggacuucaacuggaccggcgucgcccaggacggcaaguccuacgccugcaagcgcggcuccgucaacuccuucuucucccgccucaacuggcuccacaagcucgaguacaaguaccccgcccucaacgucaccaugcccaacaacggcaaguucgacaagcucuacaucuggggcguccaccaccccuccaccgacuccgaccagaccucccucuacguccgcgccuccggccgcgucaccgucuccaccaagcgcucccagcagaccgucauccccaacaucggcucccgccccuggguccgcggccucuccucccgcaucuccaucuacuggaccaucgucaagcccggcgacauccuccucaucaacuccaccggcaaccucaucgccccccgcggcuacuucaagauccgcaacggcaaguccuccaucaugcgcuccgacgcccccaucggcaacugcuccuccgagugcaucacccccaacggcuccauccccaacgacaagcccuuccagaacgucaaccgcaucaccuacggcgccugcccccgcuacgucaagcagaacacccucaagcucgccaccggcaugcgcaacguccccgagaagcagacccgcggcaucuucggcgccaucgccggcuucaucgagaacggcugggagggcauggucgacggcugguacggcuuccgccaccagaacuccgagggcaccggccaggccgccgaccucaaguccacccaggccgccaucgaccagaucaacggcaagcucaaccgccucaucgagaagaccaacgagaaguuccaccagaucgagaaggaguucuccgaggucgagggccgcauccaggaccucgagaaguacgucgaggacaccaagaucgaccucugguccuacaacgccgagcuccucgucgcccucgagaaccagcacaccaucgaccucaccgacuccgagaugaacaagcucuucgagcgcacccgcaagcagcuccgcgagaacgccgaggacaugggcaacggcugcuucaaggucuaccacaagugcgacaacgccugcaucgaguccauccgcaacggcaccuacgaccacgacgucuaccgcgacgaggcccucaacaaccgcuuccagaucaagggcgucgagcucaaguccggcuacaaggacuggauccucuggaucuccuucgccaucuccugcuuccuccucugcgucguccuccucggcuucaucaugugggccugccagaagggcaacauccgcugcaacaucugcaucuga

SEQ ID NO: 97093 - RNA, 1701 nt, Artificial Sequence; identical to SEQ ID NO: 96943
  derived and/or modified CDS sequence (opt2) from hemagglutinin__InfluenzaA__ABG67135

SEQ ID NO: 97094 - RNA, 1701 nt, Artificial Sequence; identical to SEQ ID NO: 96819
  derived and/or modified CDS sequence (opt2) from hemagglutinin__InfluenzaA__ABG67146

SEQ ID NO: 97095 - RNA, 1701 nt, Artificial Sequence
  derived and/or modified CDS sequence (opt2) from hemagglutinin__InfluenzaA__ABG67157
augaagaccaucaucgcccucuccuacauccucugccucgucuucgcccagaagcuccccggcaacgacaacuccaccgccacccucugccucggccaccacgccguccccaacggcacccucgucaagaccaucaccaacgaccagaucgaggucaccaacgccaccgagcucguccaguccucccccaccggccgcaucugcaacuccccccaccgcaucaucgacggcaagaacugcacccucaucgacgcccuccucggcgacccccacugcgacggcuuccagaacaaggagugggaccucuucgucgagcgcuccaaggccuacuccaacugcuaccccuacgacguccccgacuacgccucccuccgcucccucgucgccuccuccggcacccucgaguucaucaacgagaacuucaacuggaccggcgucgcccaggacggcaaguccuacgccugcaagcgcggcuccgucaacuccuucuucucccgccucaacuggcuccacaagcucgaguacaaguaccccgcccucaacgucaccaugcccaacaacggcaaguucgacaagcucuacaucuggggcguccaccaccccuccaccgacuccgaccagaccucccucuacguccgcgccuccggccgcgucaccgucuccaccaagcgcucccagcagaccgucauccccgacaucggcuaccgccccuggguccgcggccucuccucccgcaucuccaucuacuggaccaucgucaagcccggcgacauccuccucaucaacuccaccggcaaccucaucgccccccgcggcuacuucaagcuccgcaacggcaaguccuccaucaugcgcuccgacgcccccaucggcaacugcuccuccgagugcaucacccccaacggcuccauccccaacgacaagcccuuccagaacgucaaccgcaucaccuacggcgccugcccccgcuacaucaagcagaacacccucaagcucgccaccggcaugcgcaacguccccgagaagcagacccgcggcaucuucggcgccaucgccggcuucaucgagaacggcugggagggcauggucgacggcugguacggcuuccgccaccagaacuccgagggcaccggccaggccgccgaccucaaguccacccaggccgccaucgaccagaucaacggcaagcucaaccgccucgucgagaagaccaacgagaaguuccaccagaucgagaaggaguucuccgaggucgagggccgcauccaggaccucgagaaguacgucgaggacaccaagaucgaccucugguccuacaacgccgagcuccucgucgcccucgagaaccagcacaccaucgaccucaccgacuccgagaugaacaagcucuucgagcgcaccaagaagcagcuccgcgagaacgccgaggacaugggcaacggcugcuucaagaucuaccacaagugcgacaacgccugcaucggcuccauccgcaacggcaccuacgaccacgacgucuaccgcgacgaggcccucaacaaccgcuuccagaucaagggcgucgagcucaaguccggcuacaaggacuggauccucuggaucuccuucgccaucuccugcuuccuccucugcgucguccuccucggcuucaucaugugggccugccagaagggcaacauccgcugcaacaucugcaucuga

SEQ ID NO: 97096 - RNA, 1701 nt, Artificial Sequence; identical to SEQ ID NO: 97020
  derived and/or modified CDS sequence (opt2) from hemagglutinin__InfluenzaA__ABG67168

SEQ ID NO: 97097 - RNA, 1701 nt, Artificial Sequence; identical to SEQ ID NO: 97020
  derived and/or modified CDS sequence (opt2) from hemagglutinin__InfluenzaA__ABG67179

SEQ ID NO: 97098 - RNA, 1701 nt, Artificial Sequence
  derived and/or modified CDS sequence (opt2) from hemagglutinin__InfluenzaA__ABG67190
augaagaccaucaucgcccucuccuacauccucugccucgucuucgcccagaagcuccccggcaacgacaacuccaccgccacccucugccucggccaccacgccguccccaacggcacccucgucaagaccaucaccaacgaccagaucgaggucaccaacgccaccgagcucguccaguccuuccccaccggccgcaucugcgacuccccccaccgcauccucgacggcaagaacugcacccucaucgacgcccuccucggcgacccccacugcgacggcuuccagaacaaggagugggaccucuucgucgagcgcuccaaggccuacuccaacugcuaccccuacgacguccccgacuacgccucccuccgcucccucgucgccuccuccggcacccucgaguucaccaacgagaacuucaacuggaccggcgucgcccaggacggcaaguccuacgccugcaagcgcggcuccgucaacuccuucuucucccgccucaacuggcuccacaagcucgaguacaaguaccccgcccucaacgucaccaugcccaacaacggcaaguucgacaagcucuacaucuggggcguccaccaccccuccaccgacuccgaccagaccucccucuacguccgcgccuccggcaaggucaccgucuccaccaagcgcucccagcagaccgucauccccgacaucggcuaccgccccuggguccgcggccucuccucccgcaucuccaucuacuggaccaucgucaagcccggcgacauccuccucaucaacuccaccggcaaccucaucgccccccgcggcuacuucaagauccgcaacggcaaguccuccaucaugcgcuccgacgcccccaucggcaacugcuccuccgagugcaucacccccaacggcuccauccccaacgacaagcccuuccagaacgucaaccgcaucaccuacggcgccugcccccgcuacgucaagcagaacacccucaagcucgccaccggcaugcgcaacguccccgagaagcagacccgcggcaucuucggcgccaucgccggcuucaucgagaacggcugggagggcauggucgacggcugguacggcuuccgccaccagaacuccgagggcaccggccaggccgccgaccucaaguccacccaggccgccaucgaccagaucaacggcaagcucaaccgccucgucgagaagaccaacgagaaguuccaccagaucgagaaggaguucuccgaggucgagggccgcauccaggaccucgagaaguacgucgaggacaccaagaucgaccucugguccuacaacgccgagcuccucgucgcccucgagaaccagcacaccaucgaccucaccgacuccgagaugaacaagcucuucgagcgcacccgcaagcagcuccgcgagaacgccgaggacaugggcaacggcugcuucaagaucuaccacaagugcgacaacgccugcaucggcuccauccgcaacggcaccuacgaccacgacgucuaccgcgacgaggcccucaacaaccgcuuccagaucaagggcgucgagcucaaguccggcuacaaggacuggauccucuggaucuccuucgccaucuccugcuuccuccucugcgucguccuccucggcuucaucaugugggccugccagaagggcaacauccgcugcaacaucugcaucuga

SEQ ID NO: 97099 - RNA, 1701 nt, Artificial Sequence
  derived and/or modified CDS sequence (opt2) from hemagglutinin__InfluenzaA__ABG67212
augaagaccaucaucgcccucuccuacauccucugccucgucuucgcccagaagcuccccggcaacgacaacuccaccgccacccucugccucggccaccacgccguccccaacggcacccucgucaagaccaucaccaacgaccagaucgaggucaccaacgccaccgagcucguccaguccuccuccaccggccgcaucugcgacuccccccaccgcauccucgacggcaagaacugcacccucaucgacgcccuccucggcgacccccacugcgacggcuuccagaacaaggagugggaccucuucgucgagcgcuccaaggccuacuccaacugcuaccccuacgacguccccgacuacgccucccuccgcucccucgucgccuccuccggcacccucgaguucaucaacgaggacuucaacuggaccggcgucgcccaggacggcaaguccuacgccugcaagcgcggcuccgucaacuccuucuucucccgccucaacuggcuccacaagcucgaguaccgcuaccccgcccucaacgucaccaugcccaacaacggcaaguucgacaagcucuacaucuggggcguccaccaccccuccaccgacuccgaccagaccucccucuacguccgcgccuccggccgcgucaccgucuccaccaagcgcucccagcagaccgucauccccaacaucggcuuccgccccuggguccgcggccucuccucccgcaucuccaucuacuggaccaucgucaagcccggcgacauccuccucaucaacuccaccggcaaccucaucgccccccgcggcuacuucaagauccgcaacggcaaguccuccaucaugcgcuccgacgcccccaucggcaacugcuccuccgagugcaucacccccaacggcuccauccccaacgacaagcccuuccagaacgucaaccgcaucaccuacggcgccugcccccgcuacgucaagcagaacacccucaagcucgccaccggcaugcgcaacguccccgagaagcagacccgcggcaucuucggcgccaucgccggcuucaucgagaacggcugggagggcauggucgacggcugguacggcuuccgccaccagaacuccgagggcaccggccaggccgccgaccucaaguccacccaggccgccaucgaccagaucaacggcaagcucaaccgccucaucgagaagaccaacgagaaguuccaccagaucgagaaggaguucuccgaggucgagggccgcauccaggaccucgagaaguacgucgaggacaccaagaucgaccucugguccuacaacgccggccuccucgucgcccucgagaaccagcacaccaucgaccucaccgacuccgagaugaacaagcucuucgagcgcacccgcaagcagcuccgcgagaacgccgaggacaugggcaacggcugcuucaagaucuaccacaagugcgacaacgccugcaucggcuccauccgcaacggcaccuacgaccacgacgucuaccgcgacgaggcccucaacaaccgcuuccagaucaagggcgucgagcucaaguccggcuacaaggacuggauccucuggaucuccuucgccaucuccugcuuccuccucugcgucguccuccucggcuucaucaugugggccugccagaagggcaacauccgcugcaacaucugcaucuga

SEQ ID NO: 97100 - RNA, 1701 nt, Artificial Sequence; identical to SEQ ID NO: 97060
  derived and/or modified CDS sequence (opt2) from hemagglutinin__InfluenzaA__ABG67223

SEQ ID NO: 97101 - RNA, 1701 nt, Artificial Sequence
  derived and/or modified CDS sequence (opt2) from hemagglutinin__InfluenzaA__ABG67234
augaagaccaucaucgcccucuccuacauccucugccucgucuucgcccagaagcuccccggcgacgacaacuccaccgccacccucugccucggccaccacgccguccccaacggcacccucgucaagaccaucaccaacgaccagaucgaggucaccaacgccaccgagcucguccaguccuccuccaccggccgcaucugcgacuccccccaccgcauccucgacggcaagaacugcacccucaucgacgcccuccucggcgacccccacugcgacggcuuccagaacaaggagugggaccucuucgucgagcgcuccaaggccuacuccaacugcuaccccuacgacguccccgacuacgccucccuccgcucccucgucgccuccuccggcacccucgaguucaucaacgaggacuucaacuggaccggcgucgcccaggacggcaaguccuacgccugcaagcgcggcuccgucaacuccuucuucucccgccucaacuggcuccacaagcucgaguacaaguaccccgcccucaacgucaccaugcccaacaacggcaaguucgacaagcucuacaucuggggcguccaccaccccuccaccgacuccgaccagaccucccucuacguccgcgccuccggccgcgucaccgucuccaccaagcgcucccagcagaccgucauccccaacaucggcuuccgccccuggguccgcggccucuccucccgcaucuccaucuacuggaccaucgucgagcccggcgacauccuccucaucaacuccaccggcaaccucaucgccccccgcggcuacuucaagauccgcaacggcaaguccuccaucaugcgcuccgacgcccccaucggcaacugcuccuccgagugcaucacccccaacggcuccauccccaacgacaagcccuuccagaacgucaaccgcaucaccuacggcgccugcccccgcuacgucaagcagaacacccucaagcucgccaccggcaugcgcaacguccccgagaagcagacccgcggcaucuucggcgccaucgccggcuucaucgagaacggcugggagggcauggucgacggcugguacggcuuccgccaccagaacuccgagggcaccggccaggccgccgaccucaaguccacccaggccgccaucgaccagaucaacggcaagcucaaccgccucaucgagaagaccaacgagaaguuccaccagaucgagaaggaguucuccgaggucgagggccgcauccaggaccucgagaaguacgucgaggacaccaagaucgaccucugguccuacaacgccggccuccucgucgcccucgagaaccagcacaccaucgaccucaccgacuccgagaugaacaagcucuucgagcgcacccgcaagcagcuccgcgagaacgccgaggacaugggcaacggcugcuucaagaucuaccacaagugcgacaacgccugcaucggcuccauccgcaacggcaccuacgaccacgacgucuaccgcgacgaggcccucaacaaccgcuuccagaucaagggcgucgagcucaaguccggcuacaaggacuggauccucuggaucuccuucgccaucuccugcuuccuccucugcgucguccuccucggcuucaucaugugggccugccagaagggcaacauccgcugcaacaucugcaucuga

SEQ ID NO: 97102 - RNA, 1701 nt, Artificial Sequence
  derived and/or modified CDS sequence (opt2) from hemagglutinin__InfluenzaA__ABG67245
augaagaccaucaucgcccucuccuacauccucugccucgucuucgcccagaagcuccccggcaacgacaacuccaccgccacccucugccucggccaccacgccguccccaacggcacccucgucaagaccaucaccaacgaccagaucgaggucaccaacgccaccgagcucguccaguccuccuccaccggccgcaucugcgacuccccccaccgcauccucgacggcaagaacugcacccucaucgacgcccuccucggcgacccccacugcgacggcuuccagaacaaggagugggaccucuucgucgagcgcuccaaggccuacuccaacugcuaccccuacgacguccccgacuacgccucccuccgcucccucgucgccuccuccggcacccucgaguucaucaacgaggacuucaacuggaccggcgucgcccaggacggcaaguccuacgccugcaagcgcggcuccgucaacuccuucuucucccgccucaacuggcuccacaagcucgaguacaaguaccccgcccucaacgucaccaugcccaacaacggcaaguucgacaagcucuacaucuggggcguccaccaccccuccaccgacuccgaccagaccucccucuacguccgcgccuccggccgcgucaccgucuccaccaagcgcucccagcagaccgucauccccaacaucggcuuccgccccuggguccgcggccucuccucccgcaucuccaucuacuggaccaucgucaagcccggcgacauccuccucaucaacuccaccggcaaccucaucgccccccgcggcuacuucaagauccgcaacggcaaguccuccaucaugcgcuccgacgcccccaucggcaacugcuccuccgagugcaucacccccaacggcuccauccccaacgacaagcccuuccagaacgucaaccgcaucaccuacggcgccugcccccgcuacgucaagcagaacacccucaagcucgccaccggcaugcgcaacguccccgagaagcagacccgcggcaucuucggcgccaucgccggcuucaucgagaacggcugggagggcauggucgacggcugguacggcuuccgccaccagaacuccgagggcaccggccaggccgccgaccucaaguccacccaggccgccaucgaccagaucgacggcaagcucaaccgccucaucgagaagaccaacgagaaguuccaccagaucgagaaggaguucuccgaggucgagggccgcauccaggaccucgagaaguacgucgaggacaccaagaucgaccucugguccuacaacgccggccuccucgucgcccucgagaaccagcacaccaucgaccucaccgacuccgagaugaacaagcucuucgagcgcacccgcaagcagcuccgcgagaacgccgaggacaugggcaacggcugcuucaagaucuaccacaagugcgacaacgccugcaucggcuccauccgcaacggcaccuacgaccacgacgucuaccgcgacgaggcccucaacaaccgcuuccagaucaagggcgucgagcucaaguccggcuacaaggacuggauccucuggaucuccuucgccaucuccugcuuccuccucugcgucguccuccucggcuucaucaugugggccugccagaagggcaacauccgcugcaacaucugcaucuga

SEQ ID NO: 97103 - RNA, 1698 nt, Artificial Sequence; identical to SEQ ID NO: 96778
  derived and/or modified CDS sequence (opt2) from hemagglutinin__InfluenzaA__ABG67477

SEQ ID NO: 97104 - RNA, 1698 nt, Artificial Sequence; identical to SEQ ID NO: 96836
  derived and/or modified CDS sequence (opt2) from hemagglutinin__InfluenzaA__ABG67491

SEQ ID NO: 97105 - RNA, 1701 nt, Artificial Sequence
  derived and/or modified CDS sequence (opt2) from hemagglutinin__InfluenzaA__ABG67502
augaagaccaucaucgcccucuccuacauccucugccucgucuucgcccagaagcuccccggcaacgacaacuccaccgccacccucugccucggccaccacgccguccccaacggcacccucgucaagaccaucaccaacgaccagaucgaggucaccaacgccaccgagcucguccaguccuccuccaccggccgcaucugcgacuccccccaccagauccucgacggcgagaacugcacccucaucgacgcccuccucggcgacccccacugcgacggcuuccagaacaaggagugggaccucuucgucgagcgcuccaaggccuacuccaacugcuaccccuacgacgucuccgacuacgucucccuccgcucccucgucgccuccuccggcacccucgaguucaacaacgaguccuucaacuggaccggcgucgcccagaacggcaccuccuccgccugcaagcgccgcuccgacaaguccuucuucucccgccucaacuggcuccaccagcucaaguacaaguaccccgcccucaacgucaccaugcccaacaacgagaaguucgacaagcucuacaucuggggcguccaccaccccggcaccgacuccgaccagaucucccucuacgcccaggccuccggccgcgucaccgucuccaccaagcgcucccagcagaccgucauccccaacaucggcucccgccccuggguccgcggcaucuccucccgcaucuccaucuacuggaccaucgucaagcccggcgacauccuccucaucaacuccaccggcaaccucaucgccccccgcggcuacuucaagauccgcuccggcaaguccuccaucaugcgcuccgacgcccccaucggcaagugcaacuccgagugcaucacccccaacggcuccauccccaacgacaagcccuuccagaacgucaaccgcaucaccuacggccccugcccccgcuacgucaagcagaacacccucaagcucgccaccggcaugcgcaacguccccgagaagcagacccgcggcaucuucggcgccaucgccggcuucaucgagaacggcugggagggcaugauggacggcugguacggcuuccgccaccagaacuccgagggcaccggccaggccgccgaccucaaguccacccaggccgccaucaaccagaucaacggcaagcucaaccgccucaucgagaagaccaacgagaaguuccaccagaucgagaaggaguucuccgaggucgagggccgcauccaggaccucgagaaguacgucgaggacaccaagaucgaccucugguccuacaacgccgagcuccucgucgcccucgagaaccagcacaccaucgaccucaccgacuccgagaugaacaagcucuucgagcgcaccaagaagcagcuccgcgagaacgccgaggacaugggcaacggcugcuucaagaucuaccacaagugcgacaacgccugcaucggcuccauccgcaacggcaccuacgaccacgacgucuaccgcgacgaggcccucaacaaccgcuuccagaucaagggcgucgagcucaaguccggcuacaaggacuggauccucuggaucuccuucgccaucuccugcuuccuccucugcaucguccuccucggcuucaucaugugggccugccagaagggcaacauccgcugcaacaucugcaucuga

SEQ ID NO: 97106 - RNA, 1701 nt, Artificial Sequence
  derived and/or modified CDS sequence (opt2) from hemagglutinin__InfluenzaA__ABG67524
augaagaccaucaucgcccucuccuacauccucugccucgucuucgcccagaagcuccccggcaacgacaacuccaccgccacccucugccucggccaccacgccguccccaacggcacccucgucaagaccaucaccaacgaccagaucgaggucaccaacgccaccgagcucguccaguccuccuccaccggccgcaucugcgacuccccccaccagauccucgacggcgagaacugcacccucaucgacgcccuccucggcgacccccacugcgacggcuuccagaacaaggagugggaccucuucgucgagcgcucccgcgccuacuccaacugcuaccccuacgacguccccgacuacgucucccuccgcucccucgucgccuccuccggcacccucgaguucaacaacgaguccuucaacuggaccggcgucgcccagaacggcaccuccuccgccugcaagcgccgcuccgacaaguccuucuucucccgccucaacuggcuccaccagcucaaguacaaguaccccgcccucaacgucaccaugcccaacaacgagaaguucgacaagcucuacaucuggggcguccaccaccccggcaccgacuccgaccagaucucccucuacgcccaggccuccggccgcgucaccgucuccaccaagcgcucccagcagaccgucauccccaacaucggcucccgccccuggguccgcggcgucuccucccgcaucuccaucuacuggaccaucgucaagcccggcgacauccuccucaucaacuccaccggcaaccucaucgccccccgcggcuacuucaagauccgcuccggcaaguccuccaucaugcgcuccgacgcccccaucggcaagugcaacuccgagugcaucacccccaacggcuccauccccaacgacaagcccuuccagaacgucaaccgcaucaccuacggccccugcccccgcuacgucaagcagaacacccucaagcucgccaccggcaugcgcaacguccccgagaagcagacccgcggcaucuucggcgccaucgccggcuucaucgagaacggcugggagggcaugauggacggcugguacggcuuccgccaccagaacuccgagggcaccggccaggccgccgaccucaaguccacccaggccgccgucaaccagaucaacggcaagcucaaccgccucaucgagaagaccaacgagaaguuccaccagaucgagaaggaguucuccgaggucgagggccgcauccaggaccucgagaaguacgucgaggacaccaagaucgaccucugguccuacaacgccgagcuccucgucgcccucgagaaccagcacaccaucgaccucaccgacuccgagaugaacaagcucuucgagcgcaccaagaagcagcuccgcgagaacgccgaggacaugggcaacggcugcuucaagaucuaccacaagugcgacaacgccugcaucggcuccauccgcaacggcaccuacgaccacgacgucuaccgcgacgaggcccucaacaaccgcuuccagaucaagggcgucgagcucaaguccggcuacaaggacuggauccucuggaucuccuucgccaucuccugcuuccuccucugcaucguccuccucggcuucaucaugugggccugccagaagggcaacauccgcugcaacaucugcaucuga

SEQ ID NO: 97107 - RNA, 1701 nt, Artificial Sequence; identical to SEQ ID NO: 96598
  derived and/or modified CDS sequence (opt2) from hemagglutinin__InfluenzaA__ABG67535

SEQ ID NO: 97108 - RNA, 1701 nt, Artificial Sequence; identical to SEQ ID NO: 96552
  derived and/or modified CDS sequence (opt2) from hemagglutinin__InfluenzaA__ABG67546

SEQ ID NO: 97109 - RNA, 1701 nt, Artificial Sequence
  derived and/or modified CDS sequence (opt2) from hemagglutinin__InfluenzaA__ABG67557
augaagaccaucaucgcccucuccuacauccucugccucgucuucgcccagaagcuccccggcaacgacaacuccaccgccacccucugccucggccaccacgccguccccaacggcaccaucgucaagaccaucaccaacgaccagaucgaggucaccaacgccaccgagcucguccaguccuccuccaccggcggcaucugcgacuccccccaccagauccucgacggcgagaacugcacccucaucgacgcccuccucggcgacccccagugcgacggcuuccagaacaagaagugggaccucuucgucgagcgcuccaaggccuacuccaacugcuaccccuacgacguccccgaccacgccucccuccgcucccucgucgccuccuccggcacccucgaguucaacaacgaguccuucgacuggaccggcgucacccagaacggcaccuccuccgccugcaagcgccgcuccaacaaguccuucuucucccgccucaacuggcucacccaccucaaguacaaguaccccgcccucaacgucaccaugcccaacaacgagaaguucgacaagcucuacaucuggggcguccaccaccccggcaccgacuccgaccagaucucccucuacgcccaggccuccggccgcaucaccgucuccaccaagcgcucccagcagaccgucauccccaacaucggcucccgcccccgcguccgcgacgucuccucccgcaucuccaucuacuggaccaucgucaagcccggcgacauccuccucaucaacuccaccggcaaccucaucgccccccgcggcuacuucaagauccgcuccggcaaguccuccaucaugcgcuccgacgcccccaucggcaagugcaacuccgagugcaucacccccaacggcuccauccccaacgacaagcccuuccagaacgucaaccgcaucaccuacggcgccugcccccgcuacgucaagcagaacacccucaagcucgccaccggcaugcgcaacguccccgagaagcagacccgcggcaucuucggcgccaucgccggcuucaucgagaacggcugggagggcauggucgacggcugguacggcuuccgccaccagaacuccgagggcaccggccaggccgccgaccucaaguccacccaggccaccaucaaccagaucaacggcaagcucaaccgccucaucggcaagaccaacgagaaguuccaccagaucgagaaggaguucuccgaggucgagggccgcauccaggaccucgagaaguacgucgaggacaccaagaucgaccucugguccuacaacgccgagcuccucgucgcccucgagaaccagcacaccaucgaccucaccgacuccgagaugaacaagcucuucgagcgcaccaagaagcagcuccgcgagaacgccgaggacaugggcaacggcugcuucaagaucuaccacaagugcgacaacgccugcaucggcuccauccgcaacggcaccuacgaccacgacgucuaccgcgacgaggcccucaacaaccgcuuccagaucaagggcgucgagcucaaguccggcuacaaggacuggauccucuggaucuccuucgccaucuccugcuuccuccucugcgucgcccuccucggcuucaucaugugggccugccagaagggcaacauccgcugcaacaucugcaucuga

SEQ ID NO: 97110 - RNA, 1701 nt, Artificial Sequence; identical to SEQ ID NO: 96552
  derived and/or modified CDS sequence (opt2) from hemagglutinin__InfluenzaA__ABG67568

SEQ ID NO: 97111 - RNA, 1701 nt, Artificial Sequence; identical to SEQ ID NO: 96552
  derived and/or modified CDS sequence (opt2) from hemagglutinin__InfluenzaA__ABG67579

SEQ ID NO: 97112 - RNA, 1701 nt, Artificial Sequence; identical to SEQ ID NO: 96552
  derived and/or modified CDS sequence (opt2) from hemagglutinin__InfluenzaA__ABG67590

SEQ ID NO: 97113 - RNA, 1701 nt, Artificial Sequence; identical to SEQ ID NO: 96552
  derived and/or modified CDS sequence (opt2) from hemagglutinin__InfluenzaA__ABG67601

SEQ ID NO: 97114 - RNA, 1701 nt, Artificial Sequence; identical to SEQ ID NO: 96552
  derived and/or modified CDS sequence (opt2) from hemagglutinin__InfluenzaA__ABG67612

SEQ ID NO: 97115 - RNA, 1701 nt, Artificial Sequence; identical to SEQ ID NO: 96552
  derived and/or modified CDS sequence (opt2) from hemagglutinin__InfluenzaA__ABG67623

SEQ ID NO: 97116 - RNA, 1701 nt, Artificial Sequence
  derived and/or modified CDS sequence (opt2) from hemagglutinin__InfluenzaA__ABG67634
augaagaccaucaucgcccucuccuacauccucugccucgucuucgcccagaagcuccccggcaacgacaacaacaccgccacccucugccucggccaccacgccguccccaacggcaccaucgucaagaccaucaccaacgaccagaucgaggucaccaacgccaccgagcucguccaguccuccuccaccggcggcaucugcgacuccccccaccagauccucgacggcgagaacugcacccucaucgacgcccuccucggcgacccccagugcgacggcuuccagaacaagaagugggaccucuucgucgagcgcuccaaggccuacuccaacugcuaccccuacgacguccccgaccacgccucccuccgcucccucgucgccuccuccggcacccucgaguucaacaacgaguccuucgacuggaccggcgucacccagaacggcaccuccuccgccugcaagcgccgcuccaacaaguccuucuucucccgccucaacuggcucacccaccucaaguacaaguaccccgcccucaacgucaccaugcccaacaacgagaaguucgacaagcucuacaucuggggcguccaccaccccggcaccgacuccgaccagaucucccucuacgcccaggccuccggccgcaucaccgucuccaccaagcgcucccagcagaccgucauccccaacaucggcucccgcccccgcguccgcgacgucuccucccgcaucuccaucuacuggaccaucgucaagcccggcgacauccuccucaucaacuccaccggcaaccucaucgccccccgcggcuacuucaagauccgcuccggcaaguccuccaucaugcgcuccgacgcccccaucggcaagugcaacuccgagugcaucacccccaacggcuccauccccaacgacaagcccuuccagaacgucaaccgcaucaccuacggcgccugcccccgcuacgucaagcagaacacccucaagcucgccaccggcaugcgcaacguccccgagaagcagacccgcggcaucuucggcgccaucgccggcuucaucgagaacggcugggagggcauggucgacggcugguacggcuuccgccaccagaacuccgagggcaccggccaggccgccgaccucaaguccacccaggccgccaucaaccagaucaacggcaagcucaaccgccucaucggcaagaccaacgagaaguuccaccagaucgagaaggaguucuccgaggucgagggccgcauccaggaccucgagaaguacgucgaggacaccaagaucgaccucugguccuacaacgccgagcuccucgucgcccucgagaaccagcacaccaucgaccucaccgacuccaagaugaacaagcucuucgagcgcaccaagaagcagcuccgcgagaacgccgaggacaugggcaacggcugcuucaagaucuaccacaagugcgacaacgccugcaucggcuccauccgcaacggcaccuacgaccacgacgucuaccgcgacgaggcccucaacaaccgcuuccagaucaagggcgucgagcucaaguccggcuacaaggacuggauccucuggaucuccuucgccaucuccugcuuccuccucugcgucgcccuccucggcuucaucaugugggccugccagaagggcaacauccgcugcaacaucugcaucuga

SEQ ID NO: 97117 - RNA, 1701 nt, Artificial Sequence; identical to SEQ ID NO: 96552
  derived and/or modified CDS sequence (opt2) from hemagglutinin__InfluenzaA__ABG67645

SEQ ID NO: 97118 - RNA, 1701 nt, Artificial Sequence
  derived and/or modified CDS sequence (opt2) from hemagglutinin__InfluenzaA__ABG67656
augaagaccaucaucgcccucuccuacauccucugccucgucuucgcccagaagcuccccggcaacgacaacuccaccgccacccucugccucggccaccacgccguccccaacggcaccaucgucaagaccaucaccaacgaccagaucgaggucaccaacgccaccgagcucguccaguccuccuccaccggcggcaucugcgacuccccccaccagauccucgacggcgagaacugcacccucaucgacgcccuccucggcgacccccagugcgacggcuuccagaacaagaagugggaccucuucgucgagcgcuccaaggccuacuccaacugcuaccccuacgacguccccgaccacgccucccuccgcucccucgucgccuccuccggcacccucgaguucaacaacgaguccuucgacugggccggcgucacccagaacggcaccuccuccgccugcaagcgccgcuccaacaaguccuucuucucccgccucaacuggcucacccaccucaaguacaaguaccccgcccucaacgucaccaugcccaacaacgagaaguucgacaagcucuacaucuggggcguccaccaccccggcaccgacuccgaccagaucucccucuacgcccaggccuccggccgcaucaccgucuccaccaagcgcucccagcagaccgucauccccaacaucggcucccgcccccgcguccgcgacgucuccucccgcaucuccaucuacuggaccaucgucaagcccggcgacauccuccucaucaacuccaccggcaaccucaucgccccccgcggcuacuucaagauccgcuccggcaaguccuccaucaugcgcuccgacgcccccaucggcaagugcaacuccgagugcaucacccccaacggcuccauccccaacgacaagcccuuccagaacgucaaccgcaucaccuacggcgccugcccccgcuacgucaagcagaacacccucaagcucgccaccggcaugcgcaacguccccgagaagcagacccgcggcaucuucggcgccaucgccggcuucaucgagaacggcugggagggcauggucgacggcugguacggcuuccgccaccagaacuccgagggcaccggccaggccgccgaccucaaguccacccaggccgccaucaaccagaucaacggcaagcucaaccgccucaucggcaagaccaacgagaaguuccaccagaucgagaaggaguucuccgagaucgagggccgcauccaggaccucgagaaguacgucgaggacaccaagaucgaccucugguccuacaacgccgagcuccucgucgcccucgagaaccagcacaccaucgaccucaccgacuccgagaugaacaagcucuucgagcgcaccaagaagcagcuccgcgagaacgccgaggacaugggcaacggcugcuucaagaucuaccacaagugcgacaacgccugcaucggcuccauccgcaacggcaccuacgaccacgacgucuaccgcgacgaggcccucaacaaccgcuuccagaucaagggcgucgagcucaaguccggcuacaaggacuggauccucuggaucuccuucgccaucuccugcuuccuccucugcgucgcccuccucggcuucaucaugugggccugccagaagggcaacauccgcugcaacaucugcaucuga

SEQ ID NO: 97119 - RNA, 1701 nt, Artificial Sequence
  derived and/or modified CDS sequence (opt2) from hemagglutinin__InfluenzaA__ABG67667
augaagaccaucaucgcccucuccuacauccucugccaggucuucgcccagaagcuccccggcaacgacaacuccaccgccacccucugccucggccaccacgccguccccaacggcacccucgucaagaccaucaccaacgaccagaucgaggucaccaacgccaccgagcucguccaguccuccuccaccggccgcaucugcgacuccccccaccgcauccucgacggcaagaacugcacccucaucgacgcccuccucggcgacccccacugcgacggcuuccagaacaaggagugggaccucuucgucgagcgcuccaaggccuacuccaacugcuaccccuacgacguccccgacuacgccucccuccgcucccucgucgccuccuccggcacccucgaguucaccaacgagggcuucaacuggaucggcgucgcccaggacggcaaguccuacgccugcaagcgcggcuccgucaacuccuucuucucccgccucaacuggcuccacaagcucgaguacaaguaccccgcccucaacgucaccaugcccaacaacgacaaguucgacaagcucuacaucuggggcguccaccaccccuccaccgacuccgaccagaccucccucuacguccaggccuccggccgcgucaccgucuccaccaagcgcucccagcagaccgucauccccaacaucggcucccgccccuggguccgcggcaucuccucccgcaucuccaucuacuggaccaucgucaagcccggcgacauccuccucaucaacuccaccggcaaccucaucgccccccgcggcuacuucaagauccgcaacggcaaguccuccaucaugcgcuccgacgcccccaucgacaacugcaacuccgagugcaucacccccaacggcuccauccccaacgacaagcccuuccagaacgucaaccgcaucaccuacggcgccugcccccgcuacgucaagcagaacacccucaagcucgccaccggcaugcgcaacguccccgagaagcagacccgcggcaucuucggcgccaucgccggcuucaucgagaacggcugggagggcaugaucgacggcugguacggcuuccgccaccagaacuccgagggcaccggccaggccgccgaccucaaguccacccaggccgccaucgaccagaucaacggcaagcucaaccgccucaucgagaagaccaacgagaaguuccaccagaucgagaaggaguucuccgaggucgagggccgcauccaggaccucgagaaguacgucgaggacaccaagaucgaccucugguccuacaacgccgagcuccucgucgcccucgagaaccagcacaccaucgaccucaccgacuccgagaugaacaagcucuucgagcgcacccgcaagcagcuccgcgagaacgccgaggacaugggcaacggcugcuucaagaucuaccacaagugcgacaacgccugcaucggcuccauccgcaacggcaccuacgaccacgacgucuaccgcgacgaggcccucaacaaccgcuuccagaucaagggcgucgagcucaaguccggcuacaaggacuggauccucuggaucuccuucgccaucuccugcuuccuccucugcgucguccuccucggcuucaucaugugggccugccagaagggcaacauccgcugcaacaucugcaucuga

SEQ ID NO: 97120 - RNA, 1701 nt, Artificial Sequence
  derived and/or modified CDS sequence (opt2) from hemagglutinin__InfluenzaA__ABG79941
augaagaccaucaucgcccucuccuacauccucugccucgucuucgcccagaagcuccccggcaacgacaacuccaccgccacccucugccucggccaccacgccguccccaacggcacccucgucaagaccaucaccaacgaccagaucgaggucaccaacgccaccgagcucguccaguccuccuccaccggcggcaucugcgacuccccccaccagauccucgacggcgagaacugcacccucaucgacgcccuccucggcgacccccacugcgacggcuuccagaacaaggagugggaccucuucgucgagcgcuccaaggccuacuccaacugcuaccccuacgacguccccgacuacgccucccuccgcucccucgucgccuccuccggcacccucgaguucaacaacgaguccuucaacuggaccggcgucgcccagaacggcaccuccuccgccugcaagcgccgcuccaacaaguccuucuucucccgccucaacuggcuccaccagcucaaguacaaguaccccgcccucaacgucaccaugcccaacaacgagaaguucgacaagcucuacaucuggggcguccaccaccccuccaccgacuccgaccagaucucccucuacgcccaggcccccggccgcgucaccgucuccaccaagcgcucccagcagaccgucauccccaacaucggcucccgccccuggguccgcggcgucuccucccgcaucuccaucuacuggaccaucgucaagcccggcgacauccuccucaucaacugcaccggcaaccucaucgccccccgcggcuacuucaagauccgcuccggcaaguccuccaucaugcgcuccgacgccuccaucggcaagugcaacuccgagugcaucacccccaacggcuccauccccaacgacaagcccuuccagaacgucaaccgcaucaccuacggcgccugcccccgcuacgucaagcagaacacccucaagcucgccaccggcaugcgcaacguccccgagaagcagacccgcggcaucuucggcgccaucgccggcuucaucgagaacggcugggagggcauggucgacggcugguacggcuuccgccaccagaacuccgagggcaccggccaggccgccgaccucaaguccacccaggccgccaucaaccagaucaacggcaagcucaaccgccucaucgagaagaccaacgagaaguuccaccagaucgagaaggaguucuccgaggucgagggccgcauccaggaccucgagaaguacgucgaggacaccaagaucgaccucugguccuacaacgccgagcuccucgucgcccucgagaaccagcacaccaucgaccucaccgacuccgagaugaacaagcucuucgagcgcaccaagaagcagcuccgcgagaacgccgaggacaugggcaacggcugcuucaagaucuaccacaagugcgacaacgccugcaucggcuccauccgcaacggcaccuacgaccacgacgucuaccgcgacgaggcccucaacaaccgcuuccagaucaagggcgucgagcucaaguccggcuacaaggacuggauccucuggaucuccuucgccaucuccugcuuccuccucugcgucguccuccucggcuucaucaugugggccugccagaagggcaacauccgcugcuccaucugcaucuga

SEQ ID NO: 97121 - RNA, 1701 nt, Artificial Sequence; identical to SEQ ID NO: 96957
  derived and/or modified CDS sequence (opt2) from hemagglutinin__InfluenzaA__ABG79952

SEQ ID NO: 97122 - RNA, 1701 nt, Artificial Sequence; identical to SEQ ID NO: 97020
  derived and/or modified CDS sequence (opt2) from hemagglutinin__InfluenzaA__ABG79974

SEQ ID NO: 97123 - RNA, 1701 nt, Artificial Sequence; identical to SEQ ID NO: 97020
  derived and/or modified CDS sequence (opt2) from hemagglutinin__InfluenzaA__ABG79985

SEQ ID NO: 97124 - RNA, 1701 nt, Artificial Sequence
  derived and/or modified CDS sequence (opt2) from hemagglutinin__InfluenzaA__ABG79996
augaagaccaucaucgcccucuccuacauccucugccucgucuucgcccagaagcuccccggcaacgacaacuccaccgccacccucugccucggccaccacgccguccccaacggcacccucgucaagaccaucaccaacgaccagaucgaggucaccaacgccaccgagcucguccaguccucccccaccggccgcaucugcgacuccccccaccgcauccucgacggcaagaacugcacccucaucgacgcccuccucggcgacccccacugcgacggcuuccagaacaaggagugggaccucuucgucgagcgcuccaaggccuacuccaacugcuaccccuacgacguccccgacuacgccucccuccgcucccucgucgccuccuccggcacccucgaguucaccaacgagaacuucaacuggaccggcgucgcccaggacggcaaguccuacuccugcaagcgcggcuccgucaacuccuucuucucccgccucaacuggcuccacaagcucgaguacaaguaccccgcccucaacgucaccaugcccaacaacggcaaguucgacaagcucuacaucuggggcguccaccaccccuccaccgacuccgaccagaccucccucuacguccgcgccuccggcaaggucaccgucuccaccaagcgcucccagcagaccgucauccccgacaucggcuaccgccccuggguccgcggccucuccucccgcaucuccaucuacuggaccaucgucaagcccggcgacauccuccucaucaacuccaccggcaaccucaucgccccccgcggcuacuucaagauccgcaacggcaaguccuccaucaugcgcuccgacgcccccaucggcaacugcuccuccgagugcaucacccccaacggcuccauccccaacgacaagcccuuccagaacgucaaccgcaucaccuacggcgccugcccccgcuacgucaagcagaacacccucaagcucgccaccggcaugcgcaacguccccgagaagcagacccgcggcaucuucggcgccaucgccggcuucaucgagaacggcugggagggcauggucgacggcugguacggcuuccgccaccagaacuccgagggcaccggccaggccgccgaccucaaguccacccaggccgccaucgaccagaucaacggcaagcucaaccgccucgucgagaagaccaacgagaaguuccaccagaucgagaaggaguucuccgaggucgagggccgcauccaggaccucgagaaguacgucgaggacaccaagaucgaccucugguccuacaacgccgagcuccucgucgcccucgagaaccagcacaccaucgaccucaccgacuccgagaugaacaagcucuucgagcgcacccgcaagcagcuccgcgagaacgccgaggacaugggcaacggcugcuucaagaucuaccacaagugcgacaacgccugcaucggcuccauccgcaacggcaccuacgaccacgacgucuaccgcgacgaggcccucaacaaccgcuuccagaucaagggcgucgagcucaaguccggcuacaaggacuggauccucuggaucuccuucgccaucuccugcuuccuccucugcgucguccuccucggcuucaucaugugggccugccagaagggcaacauccgcugcaacaucugcaucuga

SEQ ID NO: 97125 - RNA, 1701 nt, Artificial Sequence; identical to SEQ ID NO: 97020
  derived and/or modified CDS sequence (opt2) from hemagglutinin__InfluenzaA__ABG80007

SEQ ID NO: 97126 - RNA, 1701 nt, Artificial Sequence; identical to SEQ ID NO: 97020
  derived and/or modified CDS sequence (opt2) from hemagglutinin__InfluenzaA__ABG80018

SEQ ID NO: 97127 - RNA, 1701 nt, Artificial Sequence; identical to SEQ ID NO: 97025
  derived and/or modified CDS sequence (opt2) from hemagglutinin__InfluenzaA__ABG80029

SEQ ID NO: 97128 - RNA, 1701 nt, Artificial Sequence; identical to SEQ ID NO: 97025
  derived and/or modified CDS sequence (opt2) from hemagglutinin__InfluenzaA__ABG80040

SEQ ID NO: 97129 - RNA, 1701 nt, Artificial Sequence; identical to SEQ ID NO: 97020
  derived and/or modified CDS sequence (opt2) from hemagglutinin__InfluenzaA__ABG80051

SEQ ID NO: 97130 - RNA, 1701 nt, Artificial Sequence
  derived and/or modified CDS sequence (opt2) from hemagglutinin__InfluenzaA__ABG80062
augaagaccaucaucgcccucuccuacauccucugccucgucuucgcccagaagcuccccggcaacgacaacuccaccgccacccucugccucggccaccacgccguccccaacggcacccucgucaagaccaucaccaacgaccagaucgaggucaccaacgccaccgagcucguccaguccuccuccaccggccgcaucugcgacuccccccaccgcauccucgacggcaagaacugcacccucaucgacgcccuccucggcgacccccacugcgacggcuuccagaacaaggagugggaccucuucgucgagcgcuccaaggccuacuccaacugcuaccccuacgacguccccgacuacgccucccuccgcucccucgucgccuccuccggcacccucgaguucaccaaggagggcuucaacuggaccggcgucgcccaggacggcaaguccuacgccugcaagcgcggcuccgucaacuccuucuucucccgccucaacuggcuccacaagcucgaguacaaguaccccgcccucaacgucaccaugcccaacaacgacaaguucgacaagcucuacaucuggggcguccaccaccccuccaccgacuccgaccagaccucccucuacguccaggccuccggccgcgucaccgucuccaccaagcgcucccagcagaccgucauccccaacaucggcucccgccccuggguccgcggcaucuccucccgcaucuccaucuacuggaccaucgucaagcccggcgacauccuccucaucaacuccaccggcaaccucaucgccccccgcggcuacuucaagauccgcaacggcaaguccuccaucaugcgcuccgacgcccccaucggcaacugcaacuccgagugcaucacccccaacggcuccauccccaacgacaagcccuuccagaacgucaaccgcaucaccuacggcgccugcccccgcuacgucaagcagaacacccucaagcucgccaccggcaugcgcaacguccccgagaagcagacccgcggcaucuucggcgccaucgccggcuucaucgagaacggcugggagggcauggucgacggcugguacggcuuccgccaccagaacuccgagggcaccggccaggccgccgaccucaaguccacccaggccgccaucgaccagaucaacggcaagcucaaccgccucaucgagaagaccaacgagaaguuccaccagaucgagaaggaguucuccgaggucgagggccgcauccaggaccucgagaaguacgucgaggacaccaagaucgaccucugguccuacaacgccgagcuccucgucgcccucgagaaccagcacaccaucgaccucaccgacuccgagaugaacaagcucuucgagcgcacccgcaagcagcuccgcgagaacgccgaggacaugggcaacggcugcuucaagaucuaccacaagugcgacaacgccugcaucggcuccauccgcaacggcaccuacgaccacgacgucuaccgcgacgaggcccucaacaaccgcuuccagaucaagggcgucgagcucaagaccggcuacaaggacuggauccucuggaucuccuucgccaucuccugcuuccuccucugcgucguccuccucggcuucaucaugugggccugccagaagggcaacauccgcugcaacaucugcaucuga

SEQ ID NO: 97131 - RNA, 1701 nt, Artificial Sequence
  derived and/or modified CDS sequence (opt2) from hemagglutinin__InfluenzaA__ABG80073
augaagaccaucaucgcccucuccuacauccucugccucgucuucgcccagaagcuccccggcaacgacaacuccaccgccacccucugccucggccaccacgccguccccaacggcacccucgucaagaccaucaccaacgaccagaucgaggucaccaacgccaccgagcucguccaguccuccuccaccggccgcaucugcgacuccccccaccgcauccucgacggcaagaacugcacccucaucgacgcccuccucggcgaccccaacugcgacggcuuccagaacaaggagugggaccucuucgucgagcgcuccaaggccuacuccaacugcuaccccuacgacguccccgacuacgccucccuccgcucccucgucgccuccuccggcacccucgaguucaccaacgaggacuucaacuggaccggcgucgcccaggacggcggcuccuacgccugcaagcgcggcuccgucaacuccuucuucucccgccucaacuggcuccacaagcucgaguacaaguaccccgcccucaacgucaccaugcccaacaacggcaaguucgacaagcucuacaucuggggcguccaccaccccuccaccgacuccgaccagaccucccucuacguccgcgccuccggccgcgucaccgucuccaccaagcgcucccagcagaccgucacccccaacaucggcucccgccccuggguccgcggccucuccucccgcaucuccaucuacuggaccaucgucaagcccggcgacauccuccucaucaacuccaccggcaaccucaucgccccccgcggcuacuucaagauccgcaacggcaaguccuccaucaugcgcuccgacgcccccaucggcaccugcuccuccgagugcaucacccccaacggcuccauccccaacgacaagcccuuccagaacgucaaccgcaucaccuacggcgccugcccccgcuacgucaagcagaacacccucaagcucgccaccggcaugcgcaacguccccgagaagcagacccgcggcaucuucggcgccaucgccggcuucaucgagaacggcugggagggcauggucgacggcugguacggcuuccgccaccagaacuccgagggcaccggccaggccgccgaccucaaguccacccaggccgccaucgaccagaucaacggcaagcucaaccgccucaucgagaagaccaacgagaaguuccaccagaucgagaaggaguucuccgaggucgagggccgcauccaggaccucgagaaguacgucgaggacaccaagaucgaccucugguccuacaacgccgagcuccucgucgcccucgagaaccagcacaccaucgaccucaccgacuccgagaugaacaagcucuucgagaagacccgcaagcagcuccgcgagaacgccgaggacaugggcaacggcugcuucaagaucuaccacaagugcgacaacgccugcaucggcuccauccgcaacggcaccuacgaccacgacgucuaccgcgacgaggcccucaacaaccgcuuccagaucaagggcgucgagcucaaguccggcuacaaggacuggauccucuggaucuccuucgccaucuccugcuuccuccucugcgucguccuccucggcuucaucaugugggccugccagaagggcaacauccgcugcaacaucugcaucuga

SEQ ID NO: 97132 - RNA, 1701 nt, Artificial Sequence
  derived and/or modified CDS sequence (opt2) from hemagglutinin__InfluenzaA__ABG80084
augaagaccaucaucgcccucuccuacauccucugccucgucuucgcccagaagcuccccggcaacgacaacuccaccgccacccucugccucggccaccacgccguccccaacggcacccucgucaagaccaucaccaacgaccagaucgaggucaccaacgccaccgagcucguccaguccuccuccaccggccgcaucugcgacuccccccaccgcauccucgacggcaagaacugcacccucaucgacgcccuccucggcgacccccacugcgacggcuuccagaacaaggagugggaccucuucgucgagcgcuccaaggccuacuccaacugcuaccccuacgacguccccgacuacgccucccuccgcucccucgucgccuccuccggcacccucgaguucaucaacgaggacuucaacuggaccggcgucgcccaggacggcaaguccuacgccugcaagcgcggcuccgucaacuccuucuucucccgccucaacuggcuccacaagcucgaguacaaguaccccgcccucaacgucaccaugcccaacaacggcaaguucgacaagcucuacaucuggggcguccaccaccccuccaccgacuccgaccagaccucccucuacguccgcgccuccggccgcgucaccgucuccaccaagcgcucccagcagaccgucauccccaacaucggcuuccgccccuggguccgcggccucuccuccggcaucuccaucuacuggaccaucgucaagcccggcgacauccuccucaucaacuccaccggcaaccucaucgccccccgcggcuacuucaagauccgcaacggcaaguccuccaucaugcgcuccgacgcccccaucggcaacugcuccuccgagugcaucacccccaacggcuccauccccaacgacaagcccuuccagaacgucaaccgcaucaccuacggcgccugcccccgcuacgucaagcagaacacccucaagcucgccaccggcaugcgcaacguccccgagaagcagacccgcggcaucuucggcgccaucgccggcuucaucgagaacggcugggagggcauggucgacggcugguacggcuuccgccaccagaacuccgagggcaccggccaggccgccgaccucaaguccacccaggccgccaucgaccagaucaacggcaagcucaaccgccucaucgagaagaccaacgagaaguuccaccagaucgagaaggaguucuccgaggucgagggccgcauccaggaccucgagaaguacgucgaggacaccaagaucgaccucugguccuacaacgccggccuccucgucgcccucgagaaccagcacaccaucgaccucaccgacuccgagaugaacaagcucuucgagcgcacccgcaagcagcuccgcgagaacgccgaggacaugggcaacggcugcuucaagaucuaccacaagugcgacaacgccugcaucggcuccauccgcaacggcaccuacgaccacgacaucuaccgcgacgaggcccucaacaaccgcuuccagaucaagggcgucgagcucaaguccggcuacaaggacuggauccucuggaucuccuucgccaucuccugcuuccuccucugcgucguccuccucggcuucaucaugugggccugccagaagggcaacauccgcugcaacaucugcaucuga

SEQ ID NO: 97133 - RNA, 1701 nt, Artificial Sequence
  derived and/or modified CDS sequence (opt2) from hemagglutinin__InfluenzaA__ABG80095
augaagaccaucaucgcccucuccuacauccucugccucgucuucgcccagaagcuccccggcaacgacaacuccaccgccacccucugccucggccaccacgccguccccaacggcacccucgucaagaccaucaccaacgaccagaucgaggucaccaacgccaccgagcucguccaguccuccuccaccggccgcaucugcgacuccccccaccgcauccucgacggcaagaacugcacccucaucgacgcccuccucggcgacccccacugcgacggcuuccagaacaaggagugggaccucuucgucgagcgcuccaaggccuacuccaacugcuaccccuacgacguccccgacuacgccucccuccgcucccucgucgccuccuccggcacccucgaguucaucaacgaggacuucaacuggaccggcgucgcccaggacggcaaguccuacgccugcaagcgcggcuccgucaacuccuucuucucccgccucaacuggcuccacaagcucgaguacaaguaccccgcccucaacgucaccaugcccaacaacggcaaggucgacaagcucuacaucuggggcguccaccaccccuccaccgacuccgaccagaccucccucuacguccgcgccuccggccgcgucaccgucuccaccaagcgcucccagcagaccgucauccccaacaucggcuuccgccccuggguccgcggccucuccucccgcaucuccaucuacuggaccaucgucaagcccggcgacauccuccucaucaacuccaccggcaaccucaucgccccccgcggcuacuucaagauccgcaacggcaaguccuccaucaugcgcuccgacgcccccaucggcaacugcuccuccgagugcaucacccccaacggcuccauccccaacgacaagcccuuccagaacgucaaccgcaucaccuacggcgccugcccccgcuacgucaagcagaacacccucaagcucgccaccggcaugcgcaacguccccgagaagcagacccgcggcaucuucggcgccaucgccggcuucaucgagaacggcugggagggcauggucgacggcugguacggcuuccgccaccagaacuccgagggcaccggccaggccgccgaccucaaguccacccaggccgccaucgaccagaucaacggcaagcucaaccgccucaucgagaagaccaacgagaaguuccaccagaucgagaaggaguucuccgaggucgagggccgcauccaggaccucgagaaguacgucgaggacaccaagaucgaccucugguccuacaacgccggccuccucgucgcccucgagaaccagcacaccaucgaccucaccgacuccgagaugaacaagcucuucgagcgcacccgcaagcagcuccgcgagaacgccgaggacaugggcaacggcugcuucaagaucuaccacaagugcgacaacgccugcaucggcuccauccgcaacggcaccuacgaccacgacgucuaccgcgacgaggcccucaacaaccgcuuccagaucaagggcgucgagcucaaguccggcuacaaggacuggauccucuggaucuccuucgccaucuccugcuuccuccucugcgucguccuccucggcuucaucaugugggccugccagaagggcaacauccgcugcaacaucugcaucuga

SEQ ID NO: 97134 - RNA, 1701 nt, Artificial Sequence; identical to SEQ ID NO: 97060
  derived and/or modified CDS sequence (opt2) from hemagglutinin__InfluenzaA__ABG80106

SEQ ID NO: 97135 - RNA, 1701 nt, Artificial Sequence
  derived and/or modified CDS sequence (opt2) from hemagglutinin__InfluenzaA__ABG80117
augaagaccaucaucgcccucuccuacauccucugccucgucuucgcccagaagcuccccggcaacgacaacuccaccgccacccucugccucggccaccacgccguccccaacggcacccucgucaagaccaucaccaacgaccagaucgaggucaccaacgccaccgagcucguccaguccuccuccaccggccgcaucugcgacuccccccaccgcauccucgacggcaagaacugcacccucaucgacgcccuccucggcgacccccacugcgacggcuuccagaacaaggagugggaccucuucgucgagcgcuccaaggccuacuccaacugcuaccccuacgacguccccgacuacgccucccuccgcucccucgucgccuccuccggcacccucgaguucaucaacgaggacuucaacuggaccggcgucgcccaggacggcaaguccuacgccugcaagcgcggcuccgucaacuccuucuucucccgccucaacuggcuccacaagcucgaguacaaguaccccgcccucaacgucaccaugcccaacaacggcaaguucgacaagcucuacaucuggggcguccaccaccccuccaccgacuccgaccagaccucccucuacguccgcgccuccggccgcgucaccgucuccaccaagcgcucccagcagaccgucauccccaacaucggcuuccgccccuggguccgcggccucuccucccgcaucuccaucuacuggaccaucgucaagcccggcgacauccuccucaucaacuccaccggcaaccucaucgccccccgcggcuacuucaagauccgcaacggcaaguccuccaucaugcgcuccgacgcccccaucggcaacugcuccuccgagugcaucacccccaacggcuccauccccaacgacaagcccuuccagaacgucaaccgcaucaccuacggcgccugcccccgcuacgucaagcagaacacccucaagcucgccaccggcaugcgcaacguccccgucaagcagacccgcggcaucuucggcgccaucgccggcuucaucgagaacggcugggagggcauggucgacggcugguacggcuuccgccaccagaacuccgagggcaccggccaggccgccgaccucaaguccacccaggccgccaucgaccagaucaacggcaagcucaaccgccucaucgagaagaccaacgagaaguuccaccagaucgagaaggaguucuccgaggucgagggccgcauccaggaccucgagaaguacgucgaggacaccaagaucgaccucugguccuacaacgccggccuccucgucgcccucgagaaccagcacaccaucgaccucaccgacuccgagaugaacaagcucuucgagcgcacccgcaagcagcuccgcgagaacgccgaggacaugggcaacggcugcuucaagaucuaccacaagugcgacaacgccugcaucggcuccauccgcaacggcaccuacgaccacgacgucuaccgcgacgaggcccucaacaaccgcuuccagaucaagggcgucgagcucaaguccggcuacaaggacuggauccucuggaucuccuucgccaucuccugcuuccuccucugcgucguccuccucggcuucaucaugugggccugccagaagggcaacauccgcugcaacaucugcaucuga

SEQ ID NO: 97136 - RNA, 1701 nt, Artificial Sequence
  derived and/or modified CDS sequence (opt2) from hemagglutinin__InfluenzaA__ABG80128
augaagaccaucaucgcccucuccuacauccucugccucgucuucgcccagaagcuccccggcaacgacaacuccaccgccacccucugccucggccaccacgccguccccaacggcacccucgucaagaccaucaccaacgaccgcaucgaggucaccaacgccaccgagcucguccaguccuccuccaccggccgcaucugcgacuccccccaccgcauccucgacggcaagaacugcacccucaucgacgcccuccucggcgacccccacugcgacggcuuccagaacaaggagugggaccucuucgucgagcgcuccaaggccuacuccaacugcuaccccuacgacguccccgacuacgccucccuccgcucccucgucgccuccuccggcacccucgaguucaucaacgaggacuucaacuggaccggcgucgcccaggacggcaaguccuacgccugcaagcgcggcuccgucaacuccuucuucucccgccucaacuggcuccacaagcucgaguacaaguaccccgcccucaacgucaccaugcccaacaacggcaaguucgacaagcucuacaucuggggcguccaccaccccuccaccgacuccgaccagaccucccucuacguccgcgccuccggccgcgucaccgucuccaccaagcgcucccagcagaccgucauccccaacaucggcuuccgccccuggguccgcggccucuccucccgcaucuccaucuacuggaccaucgucaagcccggcgacauccuccucaucaacuccaccggcaaccucaucgccccccgcggcuacuucaagauccgcaacggcaaguccuccaucaugcgcuccgacgcccccaucggcaacugcuccuccgagugcaucacccccaacggcuccauccccaacgacaagcccuuccagaacgucaaccgcaucaccuacggcgccugcccccgcuacgucaagcagaacacccucaagcucgccaccggcaugcgcaacguccccgagaagcagacccgcggcaucuucggcgccaucgccggcuucaucgagaacggcugggagggcauggucgacggcugguacggcuuccgccaccagaacuccgagggcaccggccaggccgccgaccucaaguccacccaggccgccaucgaccagaucaacggcaagcucaaccgccucaucgagaagaccaacgagaaguuccaccagaucgagaaggaguucuccgaggucgagggccgcauccaggaccucgagaaguacgucgaggacaccaagaucgaccucugguccuacaacgccggccuccucgucgcccucgagaaccagcacaccaucgaccucaccgacuccgagaugaacaagcucuucgagcgcacccgcaagcagcuccgcgagaacgccgaggacaugggcaacggcugcuucaagaucuaccacaagugcgacaacgccugcaucggcuccauccgcaacggcaccuacgaccacgacgucuaccgcgacgaggcccucaacaaccgcuuccagaucaagggcgucgagcucaaguccggcuacaaggacuggauccucuggaucuccuucgccaucuccugcuuccuccucugcgucguccuccucggcuucaucaugugggccugccagaagggcaacauccgcugcaacaucugcaucuga

SEQ ID NO: 97137 - RNA, 1701 nt, Artificial Sequence
  derived and/or modified CDS sequence (opt2) from hemagglutinin__InfluenzaA__ABG80139
augaagaccaucaucgcccucuccuacauccucugccucgucuucgcccagaagcuccccggcaacgacaacuccaccgccacccucugccucggccaccacgccguccccaacggcacccucgucaagaccaucaccaacgaccagaucgaggucaccaacgccaccgagcucguccaguccuccuccaccggccgcaucugcgacuccccccaccgcauccucgacggcaagaacugcacccucaucgacgcccuccucggcgacccccacugcgacggcuuccagaacaaggagugggaccucuucgucgagcgcuccaaggccuacuccaacugcuaccccuacgacguccccgacuacgccucccuccgcucccucgucgccuccuccggcacccucgaguucaucaacgaggacuucaacuggaccggcgucgcccaggacggcaaguccuacgccugcaagcgcggcuccgucaacuccuucuucucccgccucaacuggcuccacaagcucgaguacaaguaccccgcccucaacgucaccaugcccaacaacggcaaguucgacaagcucuacaucuggggcguccaccaccccuccaccgacuccgaccagaccucccucuacguccgcgccuccggccgcgucaccgucuccaccaagcgcucccagcagaccgucauccccaacaucggcuuccgccccuggguccgcggccucuccucccgcaucuccaucuacuggaccaucgucaagcccggcgacauccuccucaucaacuccaccggcaaccucaucgccccccgcggcuacuucaagauccgcaacggcaaguccuccaucaugcgcuccgacgcccccaucggcaacugcuccuacgagugcaucacccccaacggcuccauccccaacgacaagcccuuccagaacgucaaccgcaucaccuacggcgccugcccccgcuacgucaagcagaacacccucaagcucgccaccggcaugcgcaacguccccgagaagcagacccgcggcaucuucggcgccaucgccggcuucaucgagaacggcugggagggcauggucgacggcugguacggcuuccgccaccagaacuccgagggcaccggccaggccgccgaccucaaguccacccaggccgccaucgaccagaucaacggcaagcucaaccgccucaucgagaagaccaacgagaaguuccaccagaucgagaaggaguucuccgaggucgagggccgcauccaggaccucgagaaguacgucgaggacaccaagaucgaccucugguccuacaacgccggccuccucgucgcccucgagaaccagcacaccaucgaccucaccgacuccgagaugaacaagcucuucgagcgcacccgcaagcagcuccgcgagaacgccgaggacaugggcaacggcugcuucaagaucuaccacaagugcgacaacaccugcaucggcuccauccgcaacggcaccuacgaccacgacgucuaccgcgacgaggcccucaacaaccgcuuccagaucaagggcgucgagcucaaguccggcuacaaggacuggauccucuggaucuccuucgccaucuccugcuuccuccucugcgucguccuccucggcuucaucaugugggccugccagaagggcaacauccgcugcaacaucugcaucuga

SEQ ID NO: 97138 - RNA, 1701 nt, Artificial Sequence
  derived and/or modified CDS sequence (opt2) from hemagglutinin__InfluenzaA__ABG80150
augaagaccaucaucgcccucuccuacauccucugccucgucuucgcccagaagcuccccggcaacgacaacuccaccgccacccucugccucggccaccacgccguccccaacggcacccucgucaagaccaucaccaacgaccagaucgaggucaccaacgccaccgagcucguccaguccuccuccaccggccgcaucugcgacuccccccaccgcauccucgacggcaagaacugcacccucaucgacgcccuccucggcgacccccacugcgacggcuuccagaacaaggagugggaccucuucgucgagcgcuccaaggccuacuccaacugcuaccccuacgacguccccgacuacgccucccuccgcucccucgucgccuccuccggcacccucgaguucaucaacgagaacuucaacuggaccggcgucgcccaggacggcaaguccuacgccugcaagcgcggcuccgucaacuccuucuucucccgccucaacuggcuccacaagcucgaguacaaguaccccgcccucaacgucaccaugcccaacaacggcaaguucgacaagcucuacaucuggggcguccaccaccccuccaccgacuccgaccagaccucccucuacguccgcgccuccggccgcgucaccgucuccaccaagcgcucccagcagaccgucauccccaacaucggcuuccgccccuggguccgcggccucuccuccggcaucuccaucuacuggaccaucgucaagcccggcgacauccuccucaucaacuccaccggcaaccucaucgccccccgcggcuacuucaagauccgcaacggcaaguccuccaucaugcgcuccgacgcccccaucggcaacugcuccuccgagugcaucacccccaacggcuccauccccaacgacaagcccuuccagaacgucaaccgcaucaccuacggcgccugcccccgcuacgucaagcagaacacccucaagcucgccaccggcaugcgcaacguccccgagaagcagacccgcggcaucuucggcgccaucgccggcuucaucgagaacggcugggagggcauggucgacggcugguacggcuuccgccaccagaacuccgagggcaccggccaggccgccgaccucaaguccacccaggccgccaucgaccagaucaacggcaagcucaaccgccucaucgagaagaccaacgagaaguuccaccagaucgagaaggaguucuccgaggucgagggccgcauccaggaccucgagaaguacgucgaggacaccaagaucgaccucugguccuacaacgccggccuccucgucgcccucgagaaccagcacaccaucgaccucaccgacuccgagaugaacaagcucuucgagcgcacccgcaagcagcuccgcgagaacgccgaggacaugggcaacggcugcuucaagaucuaccacaagugcgacaacgccugcaucggcuccauccgcaacggcaccuacgaccacgacgucuaccgcgacgaggcccucaacaaccgcuuccagaucaagggcgucgagcucaaguccggcuacaaggacuggauccucuggaucuccuucgccaucuccugcuuccuccucugcgucguccuccucggcuucaucaugugggccugccagaagggcaacauccgcugcaacaucugcaucuga

SEQ ID NO: 97139 - RNA, 1701 nt, Artificial Sequence
  derived and/or modified CDS sequence (opt2) from hemagglutinin__InfluenzaA__ABG80161
augaagaccaucaucgcccucuccuacaucuccugccucgucuucgcccagaagcuccccggcaacgacaacuccaccgccacccucugccucggccaccacgccguccccaacggcacccucgucaagaccaucaccaacgaccagaucgaggucaccaacgccaccgagcucguccaguccuccuccaccggccgcaucugcgacuccccccaccgcauccucgacggcaagaacugcacccucaucgacgcccuccucggcgacccccacugcgacggcuuccagaacaaggagugggaccucuucgucgagcgcuccaaggccuacuccaacugcuaccccuacgacguccccgacuacgccucccuccgcucccucgucgccuccuccggcacccucgaguucaucaacgaggacuucaacuggaccggcgucgcccaggacggcaaguccuacgccugcaagcgcggcuccgucaacuccuucuucucccgccucaacuggcuccacaagcucgaguacaaguaccccgcccucaacgucaccaugcccaacaacggcaaguucgacaagcucuacaucuggggcguccaccaccccuccaccgacuccgaccagaccucccucuacguccaggccuccggccgcgucaccgucuccaccaagcgcucccagcagaccgucauccccaacaucggcuuccgccccuggguccgcggccucuccucccgcaucuccaucuacuggaccaucgucaagcccggcgacauccuccucaucaacuccaccggcaaccucaucgccccccgcggcuacuucaagauccgcaacggcaaguccuccaucaugcgcuccgacgcccccaucggcaacugcuccuccgagugcaucacccccaacggcuccauccccaacgacaagcccuuccagaacgucaaccgcaucaccuacggcgccugcccccgcuacgucaagcagaacacccucaagcucgccaccggcaugcgcaacguccccgagaagcagacccgcggcaucuucggcgccaucgccggcuucaucgagaacggcugggagggcauggucgacggcugguacggcuuccgccaccagaacuccgagggcaccggccaggccgccgaccucaaguccacccaggccgccaucgaccagaucaacggcaagcucaaccgccucaucgagaagaccaacgagaaguuccaccagaucgagaaggaguucuccgaggucgagggccgcauccaggaccucgagaaguacgucgaggacaccaagaucgaccucugguccuacaacgccggccuccucgucgcccucgagaaccagcacaccaucgaccucaccgacuccgagaugaacaagcucuucgagcgcacccgcaagcagcuccgcgagaacgccgaggacaugggcaacggcugcuucaagaucuaccacaagugcgacaacgccugcaucggcuccauccgcaacggcaccuacgaccacgacgucuaccgcgacgaggcccucaacaaccgcuuccagaucaagggcgucgagcucaaguccggcuacaaggacuggauccucuggaucuccuucgccaucuccugcuuccuccucugcgucguccuccucggcuucaucaugugggccugccagaagggcaacauccgcugcaacaucugcaucuga

SEQ ID NO: 97140 - RNA, 1698 nt, Artificial Sequence
  derived and/or modified CDS sequence (opt2) from hemagglutinin__InfluenzaA__ABG80172
augaaggucaagcuccucguccuccucugcaccuucaccgccaccuacgccgacaccaucugcaucggcuaccacgccaacaacuccaccgacaccgucgacaccguccucgagaagaacgucaccgucacccacuccgucaaccuccucgaggacucccacaacggcaagcucugccuccucaagggcaucgccccccuccagcucggcaacugcuccgucgccggcuggauccucggcaaccccgagugcgagcuccucaucuccaaggaguccugguccuacaucgucgagacccccaaccccgagaacggcaccugcuaccccggcuacuucgccgacuacgaggagcuccgcgagcagcucuccuccgucuccuccuucgagcgcuucgagaucuuccccaaggaguccuccuggcccaaccacaccgucaccggcgucuccgccuccugcucccacaacggcaaguccuccuucuaccgcaaccuccucuggcucaccggcaagaacggccucuaccccaaccucuccaaguccuacgccaacaacaaggagaaggagguccucguccucuggggcguccaccacccccccaacaucggcgaccagcgcgcccucuaccacaccgagaacgccuacgucuccgucgucuccucccacuacucccgccgcuucacccccgagaucgccaagcgccccaagguccgcgaccaggagggccgcaucaacuacuacuggacccuccucgagcccggcgacaccaucaucuucgaggccaacggcaaccucaucgccccccgcuacgccuucgcccucucccgcggcuucggcuccggcaucaucaccuccaacgcccccauggacgagugcgacgccaagugccagaccccccagggcgccaucaacuccucccuccccuuccagaacguccaccccgucaccaucggcgagugccccaaguacguccgcuccgccaagcuccgcauggucaccggccuccgcaacauccccuccauccagucccgcggccucuucggcgccaucgccggcuucaucgagggcggcuggaccggcauggucgacggcugguacggcuaccaccaccagaacgagcagggcuccggcuacgccgccgaccagaaguccacccagaacgccaucaacggcaucaccaacaaggucaacuccgucaucgagaagaugaacacccaguucaccgccgucggcaaggaguucaacaagcucgagcgccgcauggagaaccucaacaagaaggucgacgacggcuuccucgacaucuggaccuacaacgccgagcuccucguccuccucgagaacgagcgcacccucgacuuccacaacuccaacgucaagaaccucuacgagaaggucaagucccagcucaagaacaacgccaaggagaucggcaacggcugcuucgaguucuaccacaagugcaacaacgagugcauggaguccgucaagaacggcaccuacgacuaccccaaguacuccgaggaguccaagcucaaccgcgagaagaucgacggcgucaagcucgaguccaugggcgucuaccagauccucgccaucuacuccaccgucgccuccucccucguccuccucgucucccucggcgccaucuccuucuggaugugcuccaacggcucccuccagugccgcaucugcaucuga

SEQ ID NO: 97141 - RNA, 1698 nt, Artificial Sequence
  derived and/or modified CDS sequence (opt2) from hemagglutinin__InfluenzaA__ABG80183
augaaggucaagcuccucguccuccucugcaccuucaccgccaccuacgccgacaccaucugcaucggcuaccacgccaacaacuccaccgacaccgucgacaccguccucgagaagaacgucaccgucacccacuccgucaaccuccucgaggacucccacaacggcaagcucugccuccucaagggcaucgccccccuccagcucggcaacugcuccgucgccggcuggauccucggcaaccccgagugcgagcuccucaucuccaaggaguccugguccuacaucgucgagacccccaaccccgagaacggcaccugcuaccccggcuacuucgccgacuacgaggagcuccgcgagcagcucuccuccgucuccuccuucgagcgcuucgagaucuuccccaaggaguccuccuggcccaaccacaccgucaccggcgucuccgccuccugcucccacaacggcaaguccuccuucuaccgcaaccuccucuggcucaccggcaagaacggccucuaccccaaccucuccaaguccuacgccaacaacaaggagaaggagguccucguccucuggggcguccaccacccccccaacaucggcggccagcgcgcccucuaccacaccgagaacgccuacgucuccgucgucuccucccacuacucccgccgcuucacccccgagaucgccaagcgccccaagguccgcgaccaggagggccgcaucaacuacuacuggacccuccucgagcccggcgacaccaucaucuucgaggccaacggcaaccucaucgccccccgcuacgccuucgcccucucccgcggcuucggcuccggcaucaucaccuccaacgcccccauggacgagugcgacgccaagugccagaccccccagggcgccaucaacuccucccuccccuuccagaacguccaccccgucaccaucggcgagugccccaaguacguccgcuccgccaagcuccgcauggucaccggccuccgcaacauccccuccauccagucccgcggccucuucggcgccaucgccggcuucaucgagggcggcuggaccggcauggucgacggcugguacggcuaccaccaccagaacgagcagggcuccggcuacgccgccgaccagaaguccacccagaacgccaucaacggcaucaccaacaaggucaacuccgucaucgagaagaugaacacccaguucaccgccgucggcaaggaguucaacaagcucgagcgccgcauggagaaccucaacaagaaggucgacgacggcuuccucgacaucuggaccuacaacgccgagcuccucguccuccucgagaacgagcgcacccucgacuuccacgacuccaacgucaagaaccucuacgagaaggucaagucccagcucaagaacaacgccaaggagaucggcaacggcugcuucgaguucuaccacaagugcaacaacgagugcauggaguccgucaagaacggcaccuacgacuaccccaaguacuccgaggaguccaagcucaaccgcgagaagaucgacggcgucaagcucgaguccaugggcgucuaccagauccucgccaucuacuccaccgucgccuccucccucguccuccucgucucccucggcgccaucuccuucuggaugugcuccaacggcucccuccagugccgcaucugcaucuga

SEQ ID NO: 97142 - RNA, 1701 nt, Artificial Sequence
  derived and/or modified CDS sequence (opt2) from hemagglutinin__InfluenzaA__ABG80194
augaagaccaucaucgcccucuccuacauccucugccucgucuucgcccagaagcuccccgucaacgacaacuccaccgccacccucugccucggccaccacgccguccccaacggcacccucgucaagaccaucaccaacgaccacaucgaggucaccaacgccaccgagcucguccaguccuccuccaccggccgcaucugcgacuccccccaccagauccucgacggcgagaacugcacccucaucgacgcccuccucggcgacccccacugcgacggcuuccagaacaaggaguggaaccucuucgucgagcgcuccaccgccuacuccaacugcuaccccuacgacguccccgacuacgccucccuccgcucccucgucgccuccuccggcacccucgaguucaacaacgaguccuucaacuggaccggcgucgcccagaacggcaccuccuccgccugcaagcgccgcuccaucaaguccuucuucucccgccucaacuggcuccaccagcucaaguacaaguaccccgcccucaacgucaccaugcccaacaacgagaaguucgacaagcucuacaucuggggcguccaccaccccuccaccgacuccgaccagaucucccucuacgcccaggccuccggccgcgucaccgucuccaccaagcgcucccagcagaccgucauccccaacaucggcucccgccccuggguccgcggcgucuccuccaucaucuccaucuacuggaccaucgucaagcccggcgacauccuccucaucaacuccaccggcaaccucaucgccccccgcggcuacuucaagauccgcuccggcaaguccuccaucaugcgcuccaacgcccccaucggcaagugcaacuccgagugcaucacccccaacggcuccauccccaacgacaagcccuuccagaacgucaaccgcaucaccuacggcgccugcccccgcuacgucaagcagaacacccucaagcucgccaccggcaugcgcaacguccccgagaagcagacccgcggcaucuucggcgccaucgccggcuucaucgagaacggcugggagggcauggucgacggcugguacggcuuccgccaccagaacuccgagggcaccggccaggccgccgaccucaaguccacccaggccgccaucaaccagaucaacggcaagcucaaccgccucaucgagaagaccaacgagaaguuccaccagaucgagaaggaguucuccgaggucgagggccgcauccaggaccucgagaaguacgucgaggacaccaagaucgaccucugguccuacaacgccgagcuccucgucgcccucgagaaccagcacaccaucgaccucaccgacuccgagaugaacaagcucuucgagcgcacccgcaagcagcuccgcgagaacgccgaggacaugggcaacggcugcuucaagaucuaccacaagugcgacaacgccugcaucggcuccauccgcaacggcaccuacgaccacgacgucuaccgcgacgaggcccucaacaaccgcuuccagaucaagggcgucgagcucaaguccggcuacaaggacuggauccucuggaucuccuucgccaucuccugcuuccuccucugcgucguccuccucggcuucaucaugugggccugccagaagggcaacauccgcugcaacaucugcaucuga

SEQ ID NO: 97143 - RNA, 1701 nt, Artificial Sequence
  derived and/or modified CDS sequence (opt2) from hemagglutinin__InfluenzaA__ABG80205
augaagaccaucaucgcccucuccuacauccucugccucgucuucgcccagaagcuccccggcaacgacaacuccaccgccacccucugccucggccaccacgccguccccaacggcacccucgucaagaccaucaccaacgaccagaucgaggucaccaacgccaccgagcucguccaguccuccuccaccggcggcaucugcgacuccccccaccagauccucgacggcgagaacugcacccucaucgacgcccuccucggcgacccccacugcgacggcuuccagaacaaggagugggaccucuucgucgagcgcuccaaggccuacuccaacugcuaccccuacgacguccccgacuacgccucccuccgcucccucgucgccuccuccggcacccucgaguucaacaacgaguccuucaacuggaccggcgucgcccagaacggcaccuccuccgccugcaagcgccgcuccaacaaguccuucuucucccgccucaacuggcuccaccagcucaaguacaaguaccccgcccucaacgucgccaugcccaacaacgagaaguucgacaagcucuacaucuggggcguccaccaccccuccaccgacuccgaccagaucucccucuacgcccaggcccccggccgcgucaccgucuccaccaagcgcucccagcagaccgucauccccaacaucggcucccgccccuggguccgcggcgucuccucccgcaucuccaucuacuggaccaucgucaagcccggcgacauccuccucaucaacugcaccggcaaccucaucgccccccgcggcuacuucaagauccgcuccggcaaguccuccaucaugcgcuccgacgccuccaucggcaagugcaacuccgagugcaucacccccaacggcuccauccccaacgacaagcccuuccagaacgucaaccgcaucaccuacggcgccugcccccgcuacgucaagcagaacacccucaagcucgccaccggcaugcgcaacguccccgagaagcagacccgcggcaucuucggcgccaucgccggcuucaucgagaacggcugggagggcauggucgacggcugguacggcuuccgccaccagaacuccgagggcaccggccaggccgccgaccucaaguccacccaggccgccaucaaccagaucaacggcaagcucaaccgccucaucgagaagaccaacgagaaguuccaccagaucgagaaggaguucuccgaggucgagggccgcauccaggaccucgagaaguacgucgaggacaccaagaucaaccucugguccuacaacgccgagcuccucgucgcccucgagaaccagcacaccaucgaccucaccgacuccgagaugaacaagcucuucgagcgcaccaagaagcagcuccgcgagaacgccgaggacaugggcaacggcugcuucaagaucuaccacaagugcgacaacgccugcaucggcuccauccgcaacggcaccuacgaccacgacgucuaccgcgacgaggcccucaacaaccgcuuccagaucaagggcgucgagcucaaguccggcuacaaggacuggauccucuggaucuccuucgccaucuccugcuuccuccucugcgucguccuccucggcuucaucaugugggccugccagaagggcaacauccgcugcaacaucugcaucuga

SEQ ID NO: 97144 - RNA, 1701 nt, Artificial Sequence
  derived and/or modified CDS sequence (opt2) from hemagglutinin__InfluenzaA__ABG80216
augaagaccaucaucgcccucuccuacauccucugccucgucuucgcccagaagcuccccgucaacgacaacuccaccgccacccucugccucggccaccacgccguccccaacggcacccucgucaagaccaucaccaacgaccacaucgaggucaccaacgccaccgagcucguccaguccucccccaccggccgcaucugcgacuccccccaccagauccucgacggcgagaacugcacccucaucgacgcccuccucggcgacccccacugcgacggcuuccagaacaaggagugggaccucuucgucgagcgcuccaccgccuacuccaacugcuaccccuacgacguccccgacuacgccucccuccgcucccucgucgccuccuccggcacccucgaguucaacaacgaguccuucaacuggaccggcgucgcccagaacggcaccuccuccgccugcaagcgccgcuccaucaaguccuucuucucccgccucaacuggcuccaccagcucaaguacaaguaccccgcccucaacgucaccaugcccaacaacgagaaguucgacaagcucuacaucuggggcguccaccaccccuccaccgacuccgaccagaucucccucuacgcccaggcccccggccgcgucaccgucuccaccaagcgcucccagcagaccgucauccccaacaucggcucccgccccuggguccgcggcgucuccucccgcaucuccaucuacuggaccaucgucaagcccggcgacauccuccucaucaacuccaccggcaaccucaucgccccccgcggcuacuucaagauccgcuccggcaaguccuccaucaugcgcuccaacacccccaucggcaagugcaacuccgagugcaucacccccaacggcuccauccccaacgacaagcccuuccagaacgucaaccgcaucaccuacggcgccugcccccgcuacgucaagcagaacacccucaagcucgccaccggcaugcgcaacguccccgagaagcagacccgcggcaucuucggcgccaucgccggcuucaucgagaacggcugggagggcauggucgacggcugguacggcuuccgccaccagaacuccgagggcaccggccaggccgccgaccucaaguccacccaggccgccaucaaccagaucaacggcaagcucaaccgccucaucgagaagaccaacgagaaguuccaccagaucgagaaggaguucuccgaggucgagggccgcauccaggaccucgagaaguacgucgaggacaccaagaucgaccucugguccuacaacgccgagcuccucgucgcccucgagaaccagcacaccaucgaccucaccgacuccgagaugaacaagcucuucgagcgcacccgcaagcagcuccgcgagaacgccgaggacaugggcaacggcugcuucaagaucuaccacaagugcgacaacgccugcaucggcuccauccgcaacggcaccuacgaccacgacgucuaccgcgacgaggcccucaacaaccgcuuccagaucaagggcgucgagcucaaguccggcuacaaggacuggauccucuggaucuccuucgccaucuccugcuuccuccucugcgucguccuccucggcuucaucaugugggccugccagaagggcaacauccgcugcaacaucugcaucuga

SEQ ID NO: 97145 - RNA, 1701 nt, Artificial Sequence; identical to SEQ ID NO: 96676
  derived and/or modified CDS sequence (opt2) from hemagglutinin__InfluenzaA__ABG80227

SEQ ID NO: 97146 - RNA, 1701 nt, Artificial Sequence; identical to SEQ ID NO: 96552
  derived and/or modified CDS sequence (opt2) from hemagglutinin__InfluenzaA__ABG80238

SEQ ID NO: 97147 - RNA, 1701 nt, Artificial Sequence; identical to SEQ ID NO: 96552
  derived and/or modified CDS sequence (opt2) from hemagglutinin__InfluenzaA__ABG80249

SEQ ID NO: 97148 - RNA, 1701 nt, Artificial Sequence; identical to SEQ ID NO: 96552
  derived and/or modified CDS sequence (opt2) from hemagglutinin__InfluenzaA__ABG80260

SEQ ID NO: 97149 - RNA, 1701 nt, Artificial Sequence
  derived and/or modified CDS sequence (opt2) from hemagglutinin__InfluenzaA__ABG80271
augaagaccaucaucgcccucuccuacauccucugccucgucuucgcccagaagcuccccggcaacgacaacuccaccgccacccucugccucggccaccacgccguccccaacggcaccgucgucaagaccaucaccaacgaccagaucgaggucaccaacgccaccgagcucguccaguccuccuccaccggcggcaucugcgacuccccccaccagauccucgacggcgagaacugcacccucauggacgcccuccucggcgacccccagugcgacggcuuccagaacaagaagugggaccucuucgucgagcgcuccaaggccuacuccaacugcuaccccuacgacguccccgacuacgccucccuccgcucccucgucgccuccuccggcacccucgaguucaacaacgaguccuucaacuggaccggcgucacccagaacggcaccuccuccgccugcaagcgccgcuccaacaacuccuucuucucccgccucaacuggcucacccaccucaaguucaaguaccccgcccucaacgucaccaugcccaacaacgagaaguucgacaagcucuacaucuggggcguccaccaccccggcaccgacaacgaccagaucucccucuacgcccaggccuccggccgcaucaccgucuccaccaagcgcucccagcagaccgucauccccaacaucggcucccgcccccgcguccgcgacauccccucccgcaucuccaucuacuggaccaucgucaagcccggcgacauccuccucaucaacuccaccggcaaccucaucgccccccgcggcuacuucaagauccgcuccggcaaguccuccaucaugcgcuccgacgcccccaucggcaagugcaacuccgagugcaucacccccaacggcuccauccccaacgacaagcccuuccagaacgucaaccgcaucaccuacggcgccugcccccgcuacgucaagcagaacacccucaagcucgccaccggcaugcgcaacguccccgagaagcagacccgcggcaucuucggcgccaucgccggcuucaucgagaacggcugggagggcauggucgacggcugguacggcuuccgccaccagaacuccgagggcaccggccaggccgccgaccucaaguccacccaggccgccaucaaccagaucaacggcaagcucaaccgccucaucggcaagaccaacgagaaguuccaccagaucgagaaggaguucuccgaggucgagggccgcauccaggaccucgagaaguacgucgaggacaccaagaucgaccucugguccuacaacgccgagcuccucgucgcccucgagaaccagcacaccaucgaccucaccgacuccgagaugaacaagcucuucgagcgcaccaagaagcagcuccgcgagaacgccgaggacaugggcaacggcugcuucaagaucuaccacaagugcgacaacgccugcaucggcuccauccgcaacggcaccuacgaccacgacgucuaccgcgacgaggcccucaacaaccgcuuccagaucaagggcgucgagcucaaguccggcuacaaggacuggauccucuggaucuccuucgccaucuccugcuuccuccucugcgucgcccuccucggcuucaucaugugggccugccagaagggcaacauccgcugcaacaucugcaucuga

SEQ ID NO: 97150 - RNA, 1701 nt, Artificial Sequence; identical to SEQ ID NO: 96627
  derived and/or modified CDS sequence (opt2) from hemagglutinin__InfluenzaA__ABG80282

SEQ ID NO: 97151 - RNA, 1701 nt, Artificial Sequence; identical to SEQ ID NO: 96279
  derived and/or modified CDS sequence (opt2) from hemagglutinin__InfluenzaA__ABG80293

SEQ ID NO: 97152 - RNA, 1701 nt, Artificial Sequence
  derived and/or modified CDS sequence (opt2) from hemagglutinin__InfluenzaA__ABG80304
augaagaccaucaucgcccucuccuacauccucugccucgucuucgcccagaagcuccccggcaacgacaacuccaccgccacccucugccucggccaccacgccguccccaacggcaccaucgucaagaccaucaccaacgaccagaucgaggucaccaacgccaccgagcucguccaguccuccuccaccggcggcaucugcgacuccccccaccagauccucgacggcgagaacugcacccucaucgacgcccuccucggcgacccccagugcgacggcuuccagaacaagaagugggaccucuucgucgagcgcuccaaggccuacuccaacugcuaccccuacgacguccccgacuacgccucccuccgcucccucgucgccuccuccggcacccucgaguucaacaacgaguccuucaacuggaccggcgucacccagaacggcaccuccuccgccugcaagcgccgcuccaacaacuccuucuucucccgccucaacuggcucacccaccucaaguucaaguaccccgcccucaacgucaccaugcccaacaacgagaaguucgacaagcucuacaucuggggcguccaccaccccggcaccaacaacgaccagaucaaccucuacgcccaggccuccggccgcaucaccgucuccaccaagcgcucccagcagaccgucauccccaacaucggcucccgcccccgcguccgcgacauccccucccgcaucuccaucuacuggaccaucgucaagcccggcgacauccuccucaucaacuccaccggcaaccucaucgccccccgcggcuacuucaagauccgcuccggcaaguccuccaucaugcgcuccgacgcccccaucggcaagugcaacuccgagugcaucacccccaacggcuccauccccaacgacaagcccuuccagaacgucaaccgcaucaccuacggcgccugcccccgcuacgucaagcagaacacccucaagcucgccaccggcaugcgcaacguccccgagaagcagacccgcggcaucuucggcgccaucgccggcuucaucgagaacggcugggagggcauggucgacggcugguacggcuuccgccaccagaacuccgagggcaucggccaggccgccgaccucaaguccacccaggccgccaucaaccagaucaacggcaagcucaaccgccucaucggcaagaccaacgagaaguuccaccagaucgagaaggaguucuccgaggucgagggccgcauccaggaccucgagaaguacgucgaggacaccaagaucgaccucugguccuacaacgccgagcuccucgucgcccucgagaaccagcacaccaucgaccucaccgacuccgagaugaacaagcucuucgagcgcaccaagaagcagcuccgcgagaacgccgaggacaugggcaacggcugcuucaagaucuaccacaagugcgacaacgccugcaucggcuccauccgcaacggcaccuacgaccacgacgucuaccgcgacgaggcccucaacaaccgcuuccagaucaagggcgucgagcucaaguccggcuacaaggacuggauccucuggaucuccuucgccaucuccugcuuccuccucugcgucgcccuccucggcuucaucaugugggccugccagaagggcaacauccgcugcaacaucugcaucuga

SEQ ID NO: 97153 - RNA, 1701 nt, Artificial Sequence
  derived and/or modified CDS sequence (opt2) from hemagglutinin__InfluenzaA__ABG80315
augaagaccaucaucgcccucuccuacauccucugccucgucuucgcccagaagcuccccggcaacgacaacuccaccgccacccucugccucggccaccacgccguccccaacggcaccaucgucaagaccaucaccaacgaccagaucgaggucaccaacgccaccgagcucauccaguccuccuccaccggcggcaucugcgacuccccccaccagauccucgacggcgagaacugcacccucaucgacgcccuccucggcgacccccagugcgacggcuuccagaacaagaagugggaccucuucgucgagcgcuccaaggccuacuccaacugcuaccccuacgacguccccgacuacgccucccuccgcucccucgucgccuccuccggcacccucgaguucaacaacgaguccuucaacuggaccggcgucacccagaacggcaccuccuccgccugcaagcgccgcuccaacaacuccuucuucucccgccucaacuggcucacccaccucaaguucaaguaccccgcccucaacgucaccaugcccaacaacgagaaguucgacaagcucuacaucuggggcguccaccaccccggcaccgacaacgaccagaucucccucuacgcccaggccuccggccgcaucaccgucuccaccaagcgcucccagcagaccgucauccccaacaucggcucccgcccccgcguccgcgacauccccucccgcaucuccaucuacuggaccaucgucaagcccggcgacaugcuccucaucaacuccaccggcaaccucaucgccccccgcggcuacuucaagauccgcuccggcaaguccuccaucaugcgcuccgacgcccccaucggcaagugcaacuccgagugcaucacccccaacggcuccauccccaacgacaagcccuuccagaacgucaaccgcaucaccuacggcgccugcccccgcuacgucaagcagaacacccucaagcucgccaccggcaugcgcaacguccccgagaagcagacccgcggcaucuucggcgccaucgccggcuucaucgagaacggcugggagggcauggucgacggcugguacggcuuccgccaccagaacuccgagggcaccggccaggccgccgaccucaaguccacccaggccgccaucaaccagaucaacggcaagcucaaccgccucaucggcaagaccaacgagaaguuccaccagaucgagaaggaguucuccgaggucgagggccgcauccaggaccucgagaaguacgucgaggacaccaagaucgaccucugguccuacaacgccgagcuccucgucgcccucgagaaccagcacaccaucgaccucaccgacuccgagaugaacaagcucuucgagcgcaccaagaagcagcuccgcgagaacgccgaggacaugggcaacggcugcuucaagaucuaccacaagugcgacaacgccugcaucggcuccauccgcaacggcaccuacgaccacgacgucuaccgcgacgaggcccucaacaaccgcuuccagaucaagggcgucgagcucaaguccggcuacaaggacuggauccucuggaucuccuucgccaucuccugcuuccuccucugcgucgcccuccucggcuucaucaugugggccugccagaagggcaacauccgcugcaacaucugcaucuga

SEQ ID NO: 97154 - RNA, 1701 nt, Artificial Sequence; identical to SEQ ID NO: 96318
  derived and/or modified CDS sequence (opt2) from hemagglutinin__InfluenzaA__ABG80326

SEQ ID NO: 97155 - RNA, 1701 nt, Artificial Sequence; identical to SEQ ID NO: 96318
  derived and/or modified CDS sequence (opt2) from hemagglutinin__InfluenzaA__ABG80337

SEQ ID NO: 97156 - RNA, 1701 nt, Artificial Sequence
  derived and/or modified CDS sequence (opt2) from hemagglutinin__InfluenzaA__ABG80359
augaagaccaucaucgcccucuccuacauccucugccucgucuucgcccagaagcuccccggcaacgacaacuccaccgccacccucugccucggccaccacgccguccccaacggcacccucgucaagaccaucaccaacgaccagaucgaggucaccaacgccaccgagcucguccaguccuccuccaccggccgcaucugcgacuccccccaccgcauccucgacggcaagaacugcacccucaucgacgcccuccucggcgacccccacugcgacggcuuccagaacaaggagugggaccucuucgucgagcgcuccaaggccuacuccaacugcuaccccuacgacguccccgacuacgccucccuccgcucccucgucgccuccuccggcacccucgaguucaucaacgaggacuucaacuggaccggcgucgcccaggacggcggcuccuacgccugcaagcgcggcuccgucaacuccuucuucucccgccucaacuggcuccacaagcucgaguacaaguaccccgcccucaacgucaccaugcccaacaacggcaaguucgacaagcucuacaucuggggcguccaccaccccuccaccgacuccgaccagaccucccucuacguccgcgccuccggccgcgucaccgucuccaccaagcgcucccagcagaccgucacccccaacaucggcucccgccccuggguccgcggccucuccucccgcaucuccaucuacuggaccaucgucaagcccggcgacauccuccucaucaacuccaccggcaaccucaucgccccccgcggcuacuucaagauccgcaacggcaaguccuccaucaugcgcuccgacgcccccaucggcaacugcuccuccgagugcaucacccccaacggcuccauccccuccgacaagcccuuccagaacgucaaccgcaucaccuacggcgccugcccccgcuacgucaagcagaacacccucaagcucgccaccggcaugcgcaacguccccgagaagcagacccgcggcaucuucggcgccaucgccggcuucaucgagaacggcugggagggcauggucgacggcugguacggcuuccgccaccagaacuccgagggcaccggccaggccgccgaccucaaguccacccaggccgccgucgaccagaucaacggcaagcucaaccgccucaucgagcgcaccaacgagaaguuccaccagaucgagaaggaguucuccgaggucgagggccgcauccaggaccucgagaaguacgucgaggacaccaagaucgaccucugguccuacaacgccgagcuccucgucgcccucgagaaccagcacaccaucgaccucaccgacuccgagaugaacaagcucuucgagaagacccgcaagcagcuccgcgagaacgccgaggacaugggcaacggcugcuucaagaucuaccacaagugcgacaacgccugcaucggcuccauccgcaacggcaccuacgaccacgacgucuaccgcgacgaggcccucaacaaccgcuuccagaucaagggcgucgagcucaaguccggcuacaaggacuggauccucuggaucuccuucgccaucuccugcuuccuccucugcgucguccuccucggcuucaucaugugggccugccagaagggcaacauccgcugcaacaucugcaucuga

SEQ ID NO: 97157 - RNA, 1701 nt, Artificial Sequence
  derived and/or modified CDS sequence (opt2) from hemagglutinin__InfluenzaA__ABG80370
augaagaccaucaucgcccucuccuacauccucugccucgucuucgcccagaagcuccccggcaacgacaacuccaccgccacccucugccucggccaccacgccguccccaacggcacccucgucaagaccaucaccaacgaccagaucgaggucaccaacgccaccgagcucguccaguccuccuccaccggccgcaucugcgacuccccccaccgcauccucgacggcaagaacugcacccucaucgacgcccuccucggcgacccccacugcgacggcuuccagaacaaggagugggaccucuucgucgagcgcuccaaggccuacuccaacugcuaccccuacgacguccccgacuacgccucccuccgcucccucgucgccuccuccggcacccucgaguucaucaacgaggacuucaacuggaccggcgucgcccaggacggcaaguccuacgccugcaagcgcggcuccgucaaguccuucuucucccgccucaacuggcuccacaagcucgaguacaaguaccccgcccucaacgucaccaugcccaacaacggcaaguucgacaagcucuacaucuggggcguccaccaccccuccaccgacuccgaccagaccucccucuacguccgcgccuccggccgcgucaccgucuccaccaagcgcucccagcagaccgucauccccaacaucggcucccgccccuggguccgcggccucuccucccgcaucuccaucuacuggaccaucgucaagcccggcgacauccuccucaucaacuccaccggcaaccucaucgccccccgcggcuacuucaagauccgcaacggcaaguccuccaucaugcgcuccgacgcccccaucggcaacugcuccuccgagugcaucacccccaacggcuccauccccaacgacaagcccuuccagaacgucaaccgcaucaccuacggcgccugcccccgcuacgucaagcagaacacccucaagcucgccaccggcaugcgcaacguccccgagaagcagacccgcggcaucuucggcgccaucgccggcuucaucgagaacggcugggagggcauggucgacggcugguacggcuuccgccaccagaacuccgagggcaccggccaggccgccgaccucaaguccacccaggccgccaucgaccagaucaacggcaagcucaaccgccucaucgagaagaccaacgagaaguuccaccagaucgagaaggaguucuccgaggucgagggccgcauccaggaccucgagaaguacgucgaggacaccaagaucgaccucugguccuacaacgccgagcuccucgucgcccucgagaaccagcacaccaucgaccucaccgacuccgagaugaacaagcucuucgagcgcacccgcaagcagcuccgcgagaacgccgaggacaugggcaacggcugcuucaagaucuaccacaagugcgacaacgccugcaucggcuccauccgcaacggcaccuacgaccacgacgucuaccgcgacgaggcccucaacaaccgcuuccagaucaagggcgucgagcucaaguccggcuacaaggacuggauccucuggaucuccuucgccaucuccugcuuccuccucugcgucguccuccucggcuucaucaugugggccugccagaagggcaacauccgcugcaacaucugcaucuga

SEQ ID NO: 97158 - RNA, 1701 nt, Artificial Sequence; identical to SEQ ID NO: 97089
  derived and/or modified CDS sequence (opt2) from hemagglutinin__InfluenzaA__ABG80392

SEQ ID NO: 97159 - RNA, 1701 nt, Artificial Sequence; identical to SEQ ID NO: 97089
  derived and/or modified CDS sequence (opt2) from hemagglutinin__InfluenzaA__ABG80403

SEQ ID NO: 97160 - RNA, 1701 nt, Artificial Sequence; identical to SEQ ID NO: 97089
  derived and/or modified CDS sequence (opt2) from hemagglutinin__InfluenzaA__ABG80414

SEQ ID NO: 97161 - RNA, 1701 nt, Artificial Sequence; identical to SEQ ID NO: 97089
  derived and/or modified CDS sequence (opt2) from hemagglutinin__InfluenzaA__ABG80425

SEQ ID NO: 97162 - RNA, 1701 nt, Artificial Sequence; identical to SEQ ID NO: 96819
  derived and/or modified CDS sequence (opt2) from hemagglutinin__InfluenzaA__ABG88289

SEQ ID NO: 97163 - RNA, 1701 nt, Artificial Sequence
  derived and/or modified CDS sequence (opt2) from hemagglutinin__InfluenzaA__ABG88300
augaaggccaagcuccucguccuccucugcgccuucaccgccaccuacgccgacaccaucugcaucggcuaccacgccaacaacuccaccgacaccgucgacaccguccucgagaagaacgucaccgucacccacuccgucaaccuccucgaggacucccacaacggcaagcucugccgccucaagggcaccgccccccuccagcucggcaacugcuccgucgccggcuggauccucggcaaccccgagugcgagucccucuucuccaaggaguccugguccuacaucgccgagacccccaaccccgagaacggcaccugcuaccccggcuacuucgccgacuacgaggagcuccgcgagcagcucuccuccgucuccuccuucgagcgcuucgagaucuuccccaaggaguccuccuggcccaaccacaccgucaccaagggcgucaccgccuccugcucccacaacggcaaguccuccuucuacaagaaccuccucuggcucaccgagaagaacggccucuaccccgaccucuccaaguccuacgucaacaacaaggagaaggagguccucguccucuggggcguccaccaccccuccaacaucggcgaccagcgcgccaucuaccacaccgagaacgccuacgucuccgucgucuccucccacuacucccgccgcuucacccccgagaucaccaagcgccccaagguccgcgaccaggagggccgcaucaacuacuacuggacccuccucgagcccggcgacaccaucaucuucgaggccaacggcaaccucaucgcccccugguacgccuucgcccucucccgcggcuucggcuccggcaucaucaccuccaacgccuccaugggcgagugcgacgccaagugccagaccccccagggcgccaucaacuccucccuccccuuccagaacguccaccccgucaccaucggcgagugccccaaguacguccgcuccaccaagcuccgcauggucaccggccuccgcaacauccccuccauccagucccgcggccucuucggcgccaucgccggcuucaucgagggcggcuggaccggcaugaucgacggcugguacggcuaccaccaccagaacgagcagggcuccggcuacgccgccgaccagaaguccacccagaacgccaucgacggcaucaccaacaaggucaacuccgucaucgagaagaugaacacccaguucaccgccgucggcaaggaguucaacaagcucgagcgccgcauggagaaccucaacaagaaggucgacgacggcuuccucgacaucuggaccuacaacgccgagcuccucguccuccucgagaacgagcgcacccucgacuuccacgacuccaacgucaagaaccucuacgagaaggucaagacccagcucaagaacaacgccaaggagaucggcaacggcugcuucgaguucuaccacaagugcaacaacgagugcauggaguccgucaagaacggcaccuacgacuaccccaaguacuccgaggaguccaagcucaaccgcgagaagaucgacggcgucaagcucgaguccaugggcgucuaccagauccucgccaucuacuccaccgucgccuccucccucguccuccucgucucccucggcgccaucuccuucuggaugugcuccaacggcucccuccagugccgcaucugcaucuga

SEQ ID NO: 97164 - RNA, 1701 nt, Artificial Sequence; identical to SEQ ID NO: 96947
  derived and/or modified CDS sequence (opt2) from hemagglutinin__InfluenzaA__ABG88311

SEQ ID NO: 97165 - RNA, 1701 nt, Artificial Sequence
  derived and/or modified CDS sequence (opt2) from hemagglutinin__InfluenzaA__ABG88322
augaaggccaagcuccucguccuccucugcgccuucaccgccaccuacgccgacaccaucugcaucggcuaccacgccaacaacuccaccgacaccgucgacaccguccucgagaagaacgucaccgucacccacuccgucaaccuccucgaggacucccacaacggcaagcucugccgccucaagggcaccgccccccuccagcucggcaacugcuccgucgccggcuggauccucggcaaccccgagugcgagucccucuucuccaaggaguccugguccuacaucgccgagacccccaaccccgagaacggcaccugcuaccccggcuacuucgccgacuacgaggagcuccgcgagcagcucuccuccgucuccuccuucgagcgcuucgagaucuuccccaaggaguccuccuggcccaaccacaccgucaccaagggcgucaccgccuccugcucccacaacggcaaguccuccuucuacaagaaccuccucuggcucaccgagaagaacggccucuaccccauccucuccaaguccuacgucaacaacaaggagaaggagguccucguccucuggggcguccaccaccccuccaacaucggcgaccagcgcgccaucuaccacaccgagaacgccuacgucuccgucgucuccucccacuacucccgccgcuucacccccgagaucgccaagcgccccaagguccgcgaccaggagggccgcaucaacuacuacuggacccuccucgagcccggcgacaccaucaucuucgaggccaacggcaaccucaucgcccccugguacgccuucgcccucucccgcggcuucggcuccggcaucaucaccuccaacgccuccaugggcgagugcgacgccaagugccagaccccccagggcgccaucaacuccucccuccccuuccagaacguccaccccgucaccaucggcgagugccccaaguacguccgcuccaccaagcuccgcauggucaccggccuccgcaacauccccuccauccagucccgcggccucuucggcgccaucgccggcuucaucgagggcggcuggaccggcaugaucgacggcugguacggcuaccaccaccagaacgagcagggcuccggcuacgccgccgaccagaaguccacccagaacgccaucgacggcaucaccaacaaggucaacuccgucaucgagaagaugaacacccaguucaccgccgucggcaaggaguucaacaagcucgagcgccgcauggagaaccucaacaagaaggucgacgacggcuuccucgacaucuggaccuacaacgccgagcuccucguccuccucgagaacgagcgcacccucgacuuccacgacuccaacgucaagaaccucuacgagaaggucaagaaccagcucaagaacaacgccaaggagaucggcaacggcugcuucgaguucuaccacaagugcaacaacgagugcauggaguccgucaagaacggcaccuacgacuaccccaaguacuccgaggaguccaagcucaaccgcgagaagaucgacggcgucaagcucgaguccaugggcgucuaccagauccucgccaucuacuccaccgucgccuccucccucguccuccucgucucccucggcgccaucuccuucuggaugugcuccaacggcucccuccagugccgcaucugcaucuga

SEQ ID NO: 97166 - RNA, 1701 nt, Artificial Sequence
  derived and/or modified CDS sequence (opt2) from hemagglutinin__InfluenzaA__ABG88333
augaaggccaagcuccucguccuccucugcgcccucuccgccaccgacgccgacaccaucugcaucggcuaccacgccaacaacuccaccgacaccgucgacaccguccucgagaagaacgucaccgucacccacuccgucaaccuccucgaggacucccacaacggcaagcucugccgccucaagggcaucgccccccuccagcucggcaagugcuccaucgccggcuggauccucggcaaccccgagugcgagucccucuucuccaagaaguccugguccuacaucgccgagacccccaacuccgagaacggcaccugcuaccccggcuacuucgccgacuacgaggagcuccgcgagcagcucuccuccgucuccuccuucgagcgcuucgagaucuuccccaaggaguccuccuggcccaagcacaacgucacccgcggcgucaccgccuccugcucccacaagggcaaguccuccuucuaccgcaaccuccucuggcucaccgagaagaacggcuccuaccccaaccucuccaaguccuacgucaacaacaaggagaaggagguccucguccucuggggcguccaccaccccuccaacaucgaggaccagaagaccaucuaccgcaaggagaacgccuacgucuccgucgucuccucccacuacaaccgccgcuucacccccgagaucuccaagcgccccaagguccgcggccaggagggccgcaucaacuacuacuggacccuccucgagcccggcgacaccaucaucuucgaggccaacggcaaccucaucgcccccugguacgccuucgcccucucccgcggcuucggcuccggcaucaucaccuccaacgccuccauggacgagugcgacgccaagugccagaccccccagggcgccaucaacuccucccuccccuuccagaacguccaccccgucaccaucggcgagugccccaaguacguccgcuccaccaagcuccgcauggucaccggccuccgcaacauccccuccauccagucccgcggccucuucggcgccaucgccggcuucaucgagggcggcuggaccggcaugaucgacggcugguacggcuaccaccaccagaacgagcagggcuccggcuacgccgccgaccagaaguccacccagaacgccaucaacggcaucaccaacaaggucaacuccgucaucgagaagaugaacacccaguucaccgccgucggcaaggaguucaacaagcucgagaagcgcauggagaaccucaacaagaaggucgacgacggcuuccucgacaucuggaccuacaacgccgagcuccucguccuccucgagaacgagcgcacccucgacuuccacgacuccaacgucaagaaccucuacgagaaggucaagucccagcucaagaacaacgccaaggagaucggcaacggcugcuucgaguucuaccacaagugcaacaacgagugcauggaguccgucaagaacggcaccuacgacuaccccaaguacuccgaggaguccaagcucaaccgcgagaagaucgacggcgucaagcucgaguccaugggcgucuaccagauccucgccaucuacuccaccgucgccuccucccucguccuccucgucucccucggcgccaucuccuucuggaugugcuccaacggcucccuccagugccgcaucugcaucuga

SEQ ID NO: 97167 - RNA, 1701 nt, Artificial Sequence
  derived and/or modified CDS sequence (opt2) from hemagglutinin__InfluenzaA__ABG88344
augaaggccaagcuccucguccuccucugcgcccucuccgccaccgacgccgacaccaucugcaucggcuaccacgccaacaacuccaccgacaccgucgacaccguccucgagaagaacgucaccgucacccacuccgucaaccuccucgaggacucccacaacggcaagcucugccgccucaagggcaucgccccccuccagcucggcaagugcuccaucgccggcuggauccucggcaaccccgagugcgagucccucuucuccaagaaguccugguccuacaucgccgagacccccaacuccgagaacggcaccugcuaccccggcuacuucgccgacuacgaggagcuccgcgagcagcucuccuccgucuccuccuucgagcgcuucgagaucuuccccaaggaguccuccuggcccaagcacaacgucacccgcggcgucaccgccuccugcucccacaagggcaaguccuccuucuaccgcaaccuccucuggcucaccgagaagaacggcuccuaccccaaccucuccaaguccuacgucaacaacaaggagaaggagguccucguccucuggggcguccaccaccccuccaacaucgaggaccagaagaccaucuaccgcaaggagaacgccuacgucuccgucgucuccucccacuacaaccgccgcuucacccccgagaucuccaagcgccccaagguccgcaaccaggagggccgcaucaacuacuacuggacccuccucgagcccggcgacaccaucaucuucgaggccaacggcaaccucaucgcccccugguacgccuucgcccucucccgcggcuucggcuccggcaucaucaccuccaacgccuccauggacgagugcgacgccaagugccagaccccccagggcgccaucaacuccucccuccccuuccagaacguccaccccgucaccaucggcgagugccccaaguacguccgcuccaccaagcuccgcauggucaccggccuccgcaacauccccuccauccagucccgcggccucuucggcgccaucgccggcuucaucgagggcggcuggaccggcaugaucgacggcugguacggcuaccaccaccagaacgagcagggcuccggcuacgccgccgaccagaaguccacccagaacgccaucaacggcaucaccaacaaggucaacuccgucaucgagaagaugaacacccaguucaccgccgucggcaaggaguucaacaagcucgagaagcgcauggagaaccucaacaagaaggucgacgacggcuuccucgacaucuggaccuacaacgccgagcuccucguccuccucgagaacgagcgcacccucgacuuccacgacuccaacgucaagaaccucuacgagaaggucaagucccagcucaagaacaacgccaaggagaucggcaacggcugcuucgaguucuaccacaagugcaacaacgagugcauggaguccgucaagaacggcaccuacgacuaccccaaguacuccgaggaguccaagcucaaccgcgagaagaucgacggcgucaagcucgaguccaugggcgucuaccagauccucgccaucuacuccaccgucgccuccucccucguccuccucgucucccucggcgccaucuccuucuggaugugcuccaacggcucccuccagugccgcaucugcaucuga

SEQ ID NO: 97168 - RNA, 1701 nt, Artificial Sequence
  derived and/or modified CDS sequence (opt2) from hemagglutinin__InfluenzaA__ABG88355
augaagaccaucaucgcccucuccuacauccucugccucgucuucgcccagaagcuccccggcaacgacaacuccaccgccacccucugccucggccaccacgccguccccaacggcacccucgucaagaccaucaccaacgaccagaucgaggucaccaacgccaccgagcucguccaguccucccccaccggccgcaucugcgacuccccccaccgcauccucgacggcaagaacugcacccucaucgacgcccuccucggcgacccccacugcgacggcuuccagaacaaggagugggaccucuucgucgagcgcuccaaggccuacuccaacugcuaccccuacgacguccccgacuacgccucccuccgcucccucgucgccuccuccggcacccucgaguucaccaacgagaacuucaacuggaccggcgucgcccaggacggcaaguccuacgccugcaagcgcggcuccgucaacuccuucuucucccgccucaacuggcuccacaagcucgaguacaaguaccccgcccucaacgucaccaugcccaacaacggcaaguucgacaagcucuacaucuggggcguccaccaccccuccaccgacuccgaccagaccucccucuacguccgcgccuccggcaaggucaccgucuccaccaagcgcucccagcagaccgucauccccgacaucggcuaccgccccuggguccgcggccucuccucccgcaucuccaucuacuggaccaucgucaagcccggcgacauccuccucaucaacuccaccggcaaccucaucgccccccgcggcuacuucaagauccgcaacggcgaguccuccaucaugcgcuccgacgcccccaucggcaacugcuccuccgagugcaucacccccaacggcuccauccccaacgacaagcccuuccagaacgucaaccgcaucaccuacggcgccugcccccgcuacgucaagcagaacacccucaagcucgccaccggcaugcgcaacguccccgagaagcagacccgcggcaucuucggcgccaucgccggcuucaucgagaacggcugggagggcauggucgacggcugguacggcuuccgccaccagaacuccgagggcaccggccaggccgccgaccucaaguccacccaggccgccaucgaccagaucaacggcaagcucaaccgccucgucgagaagaccaacgagaaguuccaccagaucgagaaggaguucuccgaggucgagggccgcauccaggaccucgagaaguacgucgaggacaccaagaucgaccucugguccuacaacgccgagcuccucgucgcccucgagaaccagcacaccaucgaccucaccgacuccgagaugaacaagcucuucgagcgcacccgcaagcagcuccgcgagaacgccgaggacaugggcaacggcugcuucaagaucuaccacaagugcgacaacgccugcaucggcuccauccgcaacggcaccuacgaccacgacgucuaccgcgacgaggcccucaacaaccgcuuccagaucaagggcgucgagcucaaguccggcuacaaggacuggauccucuggaucuccuucgccaucuccugcuuccuccucugcgucguccuccucggcuucaucaugugggccugccagaagggcaacauccgcugcaacaucugcaucuga

SEQ ID NO: 97169 - RNA, 1701 nt, Artificial Sequence
  derived and/or modified CDS sequence (opt2) from hemagglutinin__InfluenzaA__ABG88366
augaagaccaucaucgcccucuccuacuuccucugccucgucuucgcccagaagcuccccggcaacgacaacuccaccgccacccucugccucggccaccacgccguccccaacggcacccucgucaagaccaucaccaacgaccagaucgaggucaccaacgccaccgagcucguccagaacucccccaccggccgcaucugcgacuccccccaccgcauccucgacggcaagaacugcacccucaucgacgcccuccucggcgacccccacugcgacggcuuccagaacaaggagugggaccucuucgucgagcgcuccaaggccuacuccaacugcuaccccuacgacguccccgacuacgccucccuccgcucccucgucgccuccuccggcacccucgaguucaccaacgagaacuucaacuggaccggcgucgcccaggacggcaaguccuacgccugcaagcgcggcuccgucaacuccuucuucucccgccucaacuggcuccacaagcucgaguacaaguaccccgcccucaacgucaccaugcccaacaacggcaaguucgacaagcucuacaucuggggcguccaccaccccuccaccgacuccgaccagaccucccucuacguccgcgccuccggcaaggucaccgucuccaccaagcgcucccagcagaccgucauccccgacaucggcuaccgccccuggguccgcggccucuccucccgcaucuccaucuacuggaccaucgucaagcccggcgacauccuccucaucaacuccaccggcaaccucaucgccccccgcggcuacuucaagauccgcaacggcaaguccuccaucaugcgcuccgacgcccccaucggcaacugcuccuccgagugcaucacccccaacggcuccauccccaacgacaagcccuuccagaacgucaaccgcaucaccuacggcgccugcccccgcuacgucaagcagaacacccucaagcucgccaccggcaugcgcaacguccccgagaagcagacccgcggcaucuucggcgccaucgccggcuucaucgagaacggcugggagggcauggucgacggcugguacggcuuccgccaccagaacuccgagggcaccggccaggccgccgaccucaaguccacccaggccgccaucgaccagaucaacggcaagcucaaccgccucgucgagaagaccaacgagaaguuccaccagaucgagaaggaguucuccgaggucgagggccgcauccaggaccucgagaaguacgucgaggacaccaagaucgaccucugguccuacaacgccgagcuccucgucgcccucgagaaccagcacaccaucgaccucaccgacuccgagaugaacaagcucuucgagcgcacccgcaagcagcuccgcgagaacgccgaggacaugggcaacggcugcuucaagaucuaccacaagugcgacaacgccugcaucggcuccauccgcaacggcaccuacgaccacgacgucuaccgcgacgaggcccucaacaaccgcuuccagaucaagggcgucgagcucaaguccggcuacaaggacuggauccucuggaucuccuucgccaucuccugcuuccuccucugcgucguccuccucggcuucaucaugugggccugccagaagggcaacauccgcugcaacaucugcaucuga

SEQ ID NO: 97170 - RNA, 1701 nt, Artificial Sequence; identical to SEQ ID NO: 97020
  derived and/or modified CDS sequence (opt2) from hemagglutinin__InfluenzaA__ABG88377

SEQ ID NO: 97171 - RNA, 1701 nt, Artificial Sequence; identical to SEQ ID NO: 97020
  derived and/or modified CDS sequence (opt2) from hemagglutinin__InfluenzaA__ABG88388

SEQ ID NO: 97172 - RNA, 1701 nt, Artificial Sequence
  derived and/or modified CDS sequence (opt2) from hemagglutinin__InfluenzaA__ABG88399
augaagaccaucaucgcccucuccuacauccucugccucgucuucgcccagaagcuccccggcaacgacaacuccaccgccacccucugccucggccaccacgccguccccaacggcacccucgucaagaccaucaccaacgaccagaucgaggucaccaacgccaccgagcucguccaguccuccuccaccggccgcaucugcgacuccccccaccgcauccucgacggcaagaacugcacccucaucgacgcccuccucggcgacccccacugcgacggcuuccagaacaaggagugggaccucuucgucgagcgcuccaaggccuacuccaacugcuaccccuacgacguccccgacuacgccucccuccgcucccucgucgccuccuccggcacccucgaguucaccaaggaguccuucaacuggaccggcgucgcccaggacggcaaguccuacgccugcaagcgcggcuccgucaacuccuucuucucccgccucaacuggcuccacaagcucgaguacaaguaccccgcccucaacgucaccaugcccaacaacgacaaguucgacaagcucuacaucuggggcguccaccaccccuccaccgacuccgaccagaccucccucuacguccaggccuccggccgcgucaccgucuccaccaagcgcucccagcagaccgucauccccaacaucggcucccgccccuggguccgcggcaucuccucccgcaucuccaucuacuggaccaucgucaagcccggcgacauccuccucaucaacuccaccggcaaccucaucgccccccgcggcuacuucaagauccgcaacggcaaguccuccaucaugcgcuccgacgcccccaucggcaacugcaacuccgagugcaucacccccaacggcuccauccccaacgacaagcccuuccagaacgucaaccgcaucaccuacggcgccugcccccgcuacgucaagcagaacacccucaagcucgccaccggcaugcgcaacguccccgagaagcagacccgcggcaucuucggcgccaucgccggcuucaucgagaacggcugggagggcauggucgacggcugguacggcuuccgccaccagaacuccgagggcaccggccaggccgccgaccucaaguccacccaggccgccaucgaccagaucaacggcaagcucaaccgccucaucgagaagaccaacgagaaguuccaccagaucgagaaggaguucuccgaggucgagggccgcauccaggaccucgagaaguacgucgaggacaccaagaucgaccucugguccuacaacgccgagcuccucgucgcccucgagaaccagcacaccaucgaccucaccgacuccgagaugaacaagcucuucgagcgcacccgcaagcagcuccgcgagaacgccgaggacaugggcaacggcugcuucaagaucuaccacaagugcgacaacgccugcaucggcuccauccgcaacggcaccuacgaccacgacgucuaccgcgacgaggcccucaacaaccgcuuccagaucaagggcgucgagcucaaguccggcuacaaggacuggauccucuggaucuccuucgccaucuccugcuuccuccucugcgucguccuccucggcuucaucaugugggccugccagaagggcaacauccgcugcaacaucugcaucuga

SEQ ID NO: 97173 - RNA, 1701 nt, Artificial Sequence; identical to SEQ ID NO: 97060
  derived and/or modified CDS sequence (opt2) from hemagglutinin__InfluenzaA__ABG88410

SEQ ID NO: 97174 - RNA, 1701 nt, Artificial Sequence; identical to SEQ ID NO: 97060
  derived and/or modified CDS sequence (opt2) from hemagglutinin__InfluenzaA__ABG88421

SEQ ID NO: 97175 - RNA, 1701 nt, Artificial Sequence
  derived and/or modified CDS sequence (opt2) from hemagglutinin__InfluenzaA__ABG88432
augaagaccaucaucgcccucuccuacauccucugccucgucuucgcccagaagcuccccggcaacgacaacuccaccgccacccucugccucggccaccacgccguccccaacggcacccucgucaagaccaucaccaacgaccagaucgaggucaccaacgccaccgagcucguccaguccuccuccaccggccgcaucugcgacuccccccaccgcauccucgacggcaagaacugcacccucaucgacgcccuccucggcgacccccacugcgacggcuuccagaacaaggagugggaccucuucgucgagcgcuccaaggccuacuccaacugcuaccccuacgacguccccgacuacgccucccuccgcucccucgucgccuccuccggcacccucgaguucaucaacgaggacuucaacuggaccggcgucgcccaggacggcaaguccuacgccugcaagcgcggcuccgucaacuccuucuucucccgccucaacuggcuccacaagcucgaguacaaguaccccgcccucaacgucaccaugcccaacaacggcaaguucgacaagcucuacaucuggggcguccaccaccccuccaccgacuccgaccagaccucccucuacguccgcgccuccggccgcgucaccgucuccaccaagcgcucccagcagaccgucauccccaacaucggcuuccgccccuggguccgcggccucuccucccgcaucuccaucuacuggaccaucgucaagcccggcgacauccuccucaucaacuccaccggcaaccucaucgccccccgcggcuacuucaagaugcgcaacggcaaguccuccaucaugcgcuccgacgcccccaucggcaacugcuccuccgagugcaucacccccaacggcuccauccccaacgacaagcccuuccagaacgucaaccgcaucaccuacggcgccugcccccgcuacgucaagcagaacacccucaagcucgccaccggcaugcgcaacguccccgagaagcagacccgcggcaucuucggcgccaucgccggcuucaucgagaacggcugggagggcauggucgacggcugguacggcuuccgccaccagaacuccgagggcaccggccaggccgccgaccucaaguccacccaggccgccaucgaccagaucaacggcaagcucaaccgccucaucgagaagaccaacgagaaguuccaccagaucgagaaggaguucuccgaggucgagggccgcauccaggaccucgagaaguacgucgaggacaccaagaucgaccucugguccuacaacgccggccuccucgucgcccucgagaaccagcacaccaucgaccucaccgacuccgagaugaacaagcucuucgagcgcacccgcaagcagcuccgcgagaacgccgaggacaugggcaacggcugcuucaagaucuaccacaagugcgacaacgccugcaucggcuccauccgcaacggcaccuacgaccacgacgucuaccgcgacgaggcccucaacaaccgcuuccagaucaagggcgucgagcucaaguccggcuacaaggacuggauccucuggaucuccuucgccaucuccugcuuccuccucugcgucguccuccucggcuucaucaugugggccugccagaagggcaacauccgcugcaacaucugcaucuga

SEQ ID NO: 97176 - RNA, 1701 nt, Artificial Sequence; identical to SEQ ID NO: 97060
  derived and/or modified CDS sequence (opt2) from hemagglutinin__InfluenzaA__ABG88443

SEQ ID NO: 97177 - RNA, 1701 nt, Artificial Sequence
  derived and/or modified CDS sequence (opt2) from hemagglutinin__InfluenzaA__ABG88454
augaagaccaucaucgcccucuccuacauccucugccucgucuucgcccagaagcuccccggcaacgacaacuccaccgccacccucugccucggccaccacgccguccccaacggcacccucgucaagaccaucaccaacgaccagaucgaggucaccaacgccaccgagcucguccaguccuccuccaccggccgcaucugcgacuccccccaccgcauccucgacggcaagaacugcacccucaucgacgcccuccucggcgacccccacugcgacggcuuccagaacaaggagugggaccucuucgucgagcgcuccaaggccuacuccaacugcuaccccuacgacguccccgacuacgccucccuccgcucccucgucgccuccuccggcacccucgaguucaucaacgaggacuucaacuggaccggcgucgcccaggacggcaaguccuacgccugcaagcgcggcuccgccaacuccuucuucucccgccucaacuggcuccacaagcucgaguacaaguaccccgcccucaacgucaccaugcccaacaacggcaaguucgacaagcucuacaucuggggcguccaccaccccuccaccgacuccgaccagaccucccucuacguccgcgccuccggcggcgucaccgucuccaccaagcgcucccagcagaccgucauccccaacaucggcucccgccccuggguccgcggccucuccucccgcaucuccaucuacuggaccaucgucaagcccggcgacauccuccucaucaacuccaccggcaaccucaucgccccccgcggcuacuucaagauccgcuccggcaaguccuccaucaugcgcuccgacgccuccaucggcaacugcuccuccgagugcaucacccccaacggcuccauccccaacgacaagcccuuccagaacgucaaccgcaucaccuacggcgccugcccccgcuacgucaagcagaacacccucaagcucgccaccggcaugcgcaacguccccgagaagcagacccgcggcaucuucggcgccaucgccggcuucaucgagaacggcugggagggcauggucgacggcugguacggcuuccgccaccagaacuccgagggcaccggccaggccgccgaccucaaguccacccaggccgccaucgaccagaucaacggcaagcucaaccgccucaucggcaagaccaacgacaaguuccaccagaucgagaaggaguucuccgaggucgagggccgcauccaggaccucgagaaguacgucgaggacaccaagaucgaccucugguccuacaacgccgagcuccucgucgcccucgagaaccagcacaccaucgaccucaccgacuccgagaugaacaagcucuucgagcgcacccgcaagcagcuccgcgagaacgccgaggacaugggcaacggcugcuucaagaucuaccacaagugcgacaacgccugcaucggcuccauccgcaacggcaccuacgaccacgacgucuaccgcgacgaggcccucaacaaccgcuuccagaucaagggcgucgagcucaaguccggcuacaaggacuggauccucuggaucuccuucgccaucuccugcuuccuccucugcgucguccuccucggcuucaucaugugggccugccagaagggcaacauccgcugcaacaucugcaucuga

SEQ ID NO: 97178 - RNA, 1701 nt, Artificial Sequence
  derived and/or modified CDS sequence (opt2) from hemagglutinin__InfluenzaA__ABG88465
augaagaccaucaucgcccucuccuacauccucugccucgucuucgcccagaagcuccccggcaacgacaacuccaccgccacccucugccucggccaccacgccguccccaacggcacccucgucaagaccaucaccaacgaccagaucgaggucaccaacgccaccgagcucguccaguccuccuccaccggccgcaucugcgacuccccccaccgcauccucgacggcaagaacugcacccucaucgacgcccuccucggcgacccccacugcgacggcuuccagaacaaggagugggaccucuucgucgagcgcuccaaggccuacuccaacugcuaccccuacgacguccccgacuacgccucccuccgcucccucgucgccuccuccggcacccucgaguucaucaacgaggacuucaacuggaccggcgucgcccaggacggcaaguccuacgccugcaagcgcggcuccgucaacuccuucuucucccgccucaacuggcuccacaagcucgaguacaaguaccccgcccucaacgucaccaugcccaacaacggcaaguucgacaagcucuacaucuggggcguccaccaccccuccaccgacuccgaccagaccucccucuacguccgcgccuccggccgcgucaccgucuccaccaagcgcucccagcagaccgucauccccaacaucggcuuccgccccuggguccgcggccucuccucccgcaucuccaucuacuggaccaucgucaagcccggcgacauccuccucaucaacuccaccggcaaccucaucgccccccgcggcuacuucaagauccgcaacggcaaguccuccaucaugcgcuccgacgcccccaucggcaacugcuccuccgagugcaucacccccaacggcuccauccccaacgacaagcccuuccagaacgucaaccgcaucaccuacggcgccugcccccgcuacgucaagcagaacacccucaagcucgccaccggcaugcgcaacauccccgagaagcagacccgcggcaucuucggcgccaucgccggcuucaucgagaacggcugggagggcauggucgacggcugguacggcuuccgccaccagaacuccgagggcaccggccaggccgccgaccucaaguccacccaggccgccaucgaccagaucaacggcaagcucaaccgccucaucgagaagaccaacgagaaguuccaccagaucgagaaggaguucuccgaggucgagggccgcauccaggaccucgagaaguacgucgaggacaccaagaucgaccucugguccuacaacgccggccuccucgucgcccucgagaaccagcacaccaucgaccucaccgacuccgagaugaacaagcucuucgagcgcacccgcaagcagcuccgcgagaacgccgaggacaugggcaacggcugcuucaagaucuaccacaagugcgacaacgccugcaucggcuccauccgcaacggcaccuacgaccacgacgucuaccgcgacgaggcccucaacaaccgcuuccagaucaagggcgucgagcucaaguccggcuacaaggacuggauccucuggaucuccuucgccaucuccugcuuccuccucugcgucguccuccucggcuucaucaugugggccugccagaagggcaacauccgcugcaacaucugcaucuga

SEQ ID NO: 97179 - RNA, 1701 nt, Artificial Sequence; identical to SEQ ID NO: 97060
  derived and/or modified CDS sequence (opt2) from hemagglutinin__InfluenzaA__ABG88476

SEQ ID NO: 97180 - RNA, 1701 nt, Artificial Sequence; identical to SEQ ID NO: 97060
  derived and/or modified CDS sequence (opt2) from hemagglutinin__InfluenzaA__ABG88487

SEQ ID NO: 97181 - RNA, 1701 nt, Artificial Sequence; identical to SEQ ID NO: 97060
  derived and/or modified CDS sequence (opt2) from hemagglutinin__InfluenzaA__ABG88498

SEQ ID NO: 97182 - RNA, 1701 nt, Artificial Sequence; identical to SEQ ID NO: 97060
  derived and/or modified CDS sequence (opt2) from hemagglutinin__InfluenzaA__ABG88509

SEQ ID NO: 97183 - RNA, 1701 nt, Artificial Sequence
  derived and/or modified CDS sequence (opt2) from hemagglutinin__InfluenzaA__ABG88520
augaagaccaucaucgcccucuccuacaucuccugccucgucuucgcccagaagcuccccggcaacgacaacuccaccgccacccucugccucggccaccacgccguccccaacggcacccucgucaagaccaucaccaacgaccagaucgaggucaccaacgccaccgagcucguccaguccuccuccaccggccgcaucugcgacuccccccaccgcauccucgacggcaagaacugcacccucaucgacgcccuccucggcgacccccacugcgacggcuuccagaacaaggagugggaccucuucgucgagcgcuccaaggccuacuccaacugcuaccccuacgacguccccgacuacgccucccuccgcucccucgucgccuccuccggcacccucgaguucaucaacgaggacuucaacuggaccggcgucgcccaggacggcaaguccuacgccugcaagcgcggcuccgucaacuccuucuucucccgccucaacuggcuccacaagcucgaguacaaguaccccgcccucaacgucaccaugcccaacaacggcaaguucgacaagcucuacaucuggggcguccaccaccccuccaccgacuccgaccagaccucccucuacguccgcgccuccggccgcgucaccgucuccaccaagcgcucccagcagaccgucauccccaacaucggcuuccgccccuggguccgcggccucuccucccgcaucuccaucuacuggaccaucgucaagcccggcgacauccuccucaucaacuccaccggcaaccucaucgccccccgcggcuacuucaagauccgcaacggcaaguccuccaucaugcgcuccgacgcccccaucggcaacugcuccuccgagugcaucacccccaacggcuccauccccaacgacaagcccuuccagaacgucaaccgcaucaccuacggcgccugcccccgcuacgucaagcagaacacccucaagcucgccaccggcaugcgcaacguccccgagaagcagacccgcggcaucuucggcgccaucgccggcuucaucgagaacggcugggagggcauggucgacggcugguacggcuuccgccaccagaacuccgagggcaccggccaggccgccgaccucaaguccacccaggccgccaucgaccagaucaacggcaagcucaaccgccucaucgagaagaccaacgagaaguuccaccagaucgagaaggaguucuccgaggucgagggccgcauccaggaccucgagaaguacgucgaggacaccaagaucgaccucugguccuacaacgccggccuccucgucgcccucgagaaccagcacaccaucgaccucaccgacuccgagaugaacaagcucuucgagcgcacccgcaagcagcuccgcgagaacgccgaggacaugggcaacggcugcuucaagaucuaccacaagugcgacaacgccugcaucggcuccauccgcaacggcaccuacgaccacgacgucuaccgcgacgaggcccucaacaaccgcuuccagaucaagggcgucgagcucaaguccggcuacaaggacuggauccucuggaucuccuucgccaucuccugcuuccuccucugcgucguccuccucggcuucaccaugugggccugccagaagggcaacauccgcugcaacaucugcaucuga

SEQ ID NO: 97184 - RNA, 1701 nt, Artificial Sequence
  derived and/or modified CDS sequence (opt2) from hemagglutinin__InfluenzaA__ABG88531
augaagaccaucaucgcccucuccuacauccucugccucgucuucgcccagaagcuccccggcaacgacaacuccaccgccacccucugccucggccaccacgccguccccaacggcacccucgucaagaccaucaccaacgaccagaucgaggucaccaacgccaccgagcucguccaguccuccuccaccggccgcaucugcgacuccccccaccgcauccucgacggcaagaacugcacccucaucgacgcccuccucggcgacccccacugcgacggcuuccagaacaaggagugggaccucuucgucgagcgcuccaaggccuacuccaacugcuaccccuacgacguccccgacuacgccucccuccgcucccucgucgccuccuccggcacccucgaguucaucaacgaggacuucaacuggaccggcgucgcccaggacggcaaguccuacgccugcaagcgcggcuccgucaacuccuucuucucccgccucaacuggcuccacaagcucgaguacaaguaccccgcccucaacgucaccaugcccaacaacggcaaguucgacaagcucuacaucuggggcguccaccaccccuccaccgacuccguccagaccucccucuacguccgcgccuccggccgcgucaccgucuccaccaagcgcucccagcagaccgucauccccaacaucggcuuccgccccuggguccgcggccucuccucccgcaucuccaucuacuggaccaucgucaagcccggcgacauccuccucaucaacuccaccggcaaccucaucgccccccgcggcuacuucaagauccgcaacggcaaguccuccaucaugcgcuccgacgcccccaucggcaacugcuccuccgagugcaucacccccaacggcuccauccccaacgacaagcccuuccagaacgucaaccgcaucaccuacggcgccugcccccgcuacgucaagcagaacacccucaagcucgccaccggcaugcgcaacguccccgagaagcagacccgcggcaucuucggcgccaucgccggcuucaucgagaacggcugggagggcauggucgacggcugguacggcuuccgccaccagaacuccgagggcaccggccaggccgccgaccucaaguccacccaggccgccaucgaccagaucaacggcaagcucaaccgccucaucgagaagaccaacgagaaguuccaccagaucgagaaggaguucuccgaggucgagggccgcauccaggaccucgagaaguacgucgaggacaccaagaucgaccucugguccuacaacgccggccuccucgucgcccucgagaaccagcacaccaucgaccucaccgacuccgagaugaacaagcucuucgagcgcacccgcaagcagcuccgcgagaacgccgaggacaugggcaacggcugcuucaagaucuaccacaagugcgacaacgccugcaucggcuccauccgcaacggcaccuacgaccacgacgucuaccgcgacgaggcccucaacaaccgcuuccagaucaagggcgucgagcucaaguccggcuacaaggacuggauccucuggaucuccuucgccaucuccugcuuccuccucugcgucguccuccucggcuucaucaugugggccugccagaagggcaacauccgcugcaacaucugcaucuga

SEQ ID NO: 97185 - RNA, 1698 nt, Artificial Sequence; identical to SEQ ID NO: 97071
  derived and/or modified CDS sequence (opt2) from hemagglutinin__InfluenzaA__ABG88553

SEQ ID NO: 97186 - RNA, 1701 nt, Artificial Sequence; identical to SEQ ID NO: 96746
  derived and/or modified CDS sequence (opt2) from hemagglutinin__InfluenzaA__ABG88564

SEQ ID NO: 97187 - RNA, 1701 nt, Artificial Sequence; identical to SEQ ID NO: 96776
  derived and/or modified CDS sequence (opt2) from hemagglutinin__InfluenzaA__ABG88575

SEQ ID NO: 97188 - RNA, 1701 nt, Artificial Sequence; identical to SEQ ID NO: 96686
  derived and/or modified CDS sequence (opt2) from hemagglutinin__InfluenzaA__ABG88586

SEQ ID NO: 97189 - RNA, 1701 nt, Artificial Sequence
  derived and/or modified CDS sequence (opt2) from hemagglutinin__InfluenzaA__ABG88597
augaagaccaucaucgcccucuccuacauccucugccucgucuucgcccagaagcuccccgccaacgacaacuccaccgccacccucugccucggccaccacgccguccccaacggcacccucgucaagaccaucaccaacgacaacaucgaggucaccaacgccaccgagcucguccaguccuccuccaccggccgcaucugcgacuccccccaccagauccucgacggcgagaacugcacccucaucgacgcccuccucggcgacccccacugcgacggcuuccagaacaaggagugggaccucuucgucgagcgcuccaccgccuacuccaacugcuaccccuacgacguccccgacuacgccucccuccgcucccucgucgccuccuccggcacccucgaguucaacaacgaguccuucaacuggaccggcgucgaccagaacggcaccuccuccgccugcaagcgccgcuccaacaaguccuucuucucccgccucaacuggcuccaccagcucaaguacaaguaccccgcccucaacgucaccaugcccaacaacgagaaguucgacaagcucuacaucuggggcguccaccaccccuccaccgacuccgaccagaucucccucuacgcccaggccuccggccgcgucaccgucuccaccaagcgcucccagcagaccgucauccccaacaucggcucccgccccuggguccgcggcgucuccucccgcaucuccaucuacuggaccaucgucaagcccggcgacauccuccucaucaacuccaccggcaaccucaucgccccccgcggcuacuucaagauccgcuccggcaaguccuccaucaugcgcuccaacgcccccaucggcaagugcaacuccgagugcaucacccccaacggcuccauccccaacgacaagcccuuccagaacgucaaccgcaucaccuacggcgccugcccccgcuacgucaagcagaacacccucaagcucgccaccggcaugcgcaacguccccgagaagcagacccgcggcaucuucggcgccaucgccggcuucaucgagaacggcugggagggcauggucgacggcugguacggcuuccgccaccagaacuccgagggcaccggccaggccgccgaccucaaguccacccaggccgccaucaaccagaucaacggcaagcucaaccgccucaucgagaagaccaacgagaaguuccaccagaucgagaaggaguucuccgaggucgagggccgcauccaggaccucgagaaguacgucgaggacaccaagaucgaccucugguccuacaacgccgagcuccucgucgcccucgagaaccagcacaccaucgaccucaccgacuccgagaugaacaagcucuucgagcgcacccgcaagcagcuccgcgagaacgccgaggacaugggcaacggcugcuucaagaucuaccacaagugcgacaacgccugcaucggcuccauccgcaacggcaccuacgaccacgacgucuaccgcgacgaggcccucaacaaccgcuuccagaucaagggcgucgagcucaaguccggcuacaaggacuggauccucuggaucuccuucgccaucuccugcuuccuccucugcgucguccuccucggcuucaucaugugggccugccagaagggcaacauccgcugcaacaucugcaucuga

SEQ ID NO: 97190 - RNA, 1701 nt, Artificial Sequence
  derived and/or modified CDS sequence (opt2) from hemagglutinin__InfluenzaA__ABG88608
augaagaccaucaucgcccucuccuacauccucugccucgucuucgcccagaagcuccccggcaacgacaacuccaccgccacccucugccucggccaccacgccguccccaacggcacccucgucaagaccaucaccaacgaccagaucgaggucaccaacgccaccgagcucguccaguccuccuccaccggccgcaucugcgacuccccccaccagauccucgacggcgagaacugcacccucaucgacgcccuccucggcgacccccacugcgacggcuuccagaacaaggagugggaccucuucgucgagcgcucccgcgccuacuccaacugcuaccccuacgacguccccgacuacgucucccuccgcucccucgucgccuccuccggcacccucgaguucaacaacgaguccuucaacuggaccggcgucgcccagaacggcaccuccuccgccugcaagcgccgcuccgacaaguccuucuucucccgccucaacuggcuccaccagcucaaguacaaguaccccgcccucaacgucaccaugcccaacaacgagaaguucgacaagcucuacaucuggggcguccaccaccccggcaccgacuccgaccagaucucccucuacgcccaggccuccggccgcgucaccgucuccaccaagcgcucccagcagaccgucauccccaacaucggcucccgccccuggguccgcggcgucuccucccgcaucuccaucuacuggaccaucgucaagcccggcgacauccuccucaucaacuccaccggcaaccucaucgccccccgcggcuacuucaagauccgcuccggcaaguccuccaucaugcgcuccgacgcccccaucggcaagugcaacuccgagugcaucacccccaacggcuccauccccaacgacaagcccuuccagaacgucaaccgcaucaccuacggccccugcccccgcuacgucaagcagaacacccucaagcucgccaccggcaugcgcaacguccccgagaagcagacccgcggcaucuucggcgccaucgccggcuucaucgagaacggcugggagggcaugauggacggcugguacggcuuccgccaccagaacuccgagggcaccggccaggccgccgaccucaaguccacccaggccgccaucaaccagaucaacggcaagcucaaccgccucaucgagaagaccaacgagaaguuccaccagaucgagaaggaguucuccgaggucgagggccgcauccaggaccucgagaaguacgucgaggacaccaagaucgaccucugguccuacaacgccgagcuccucgucgcccucgagaaccagcacaccaucgaccucaccgacuccgagaugaacaagcucuucgagcgcaccaagaagcagcuccgcgagaacgccgaggacaugggcaacggcugcuucaagaucuaccacaagugcgacaacgccugcaucggcuccauccgcaacggcaccuacgaccacgacgucuaccgcgacgaggcccucaacacccgcuuccagaucaagggcgucgagcucaaguccggcuacaaggacuggauccucuggaucuccuucgccaucuccugcuuccuccucugcaucguccuccucggcuucaucaugugggccugccagaagggcaacauccgcugcaacaucugcaucuga

SEQ ID NO: 97191 - RNA, 1701 nt, Artificial Sequence; identical to SEQ ID NO: 96598
  derived and/or modified CDS sequence (opt2) from hemagglutinin__InfluenzaA__ABG88619

SEQ ID NO: 97192 - RNA, 1701 nt, Artificial Sequence
  derived and/or modified CDS sequence (opt2) from hemagglutinin__InfluenzaA__ABG88630
augaagaccaucaucgcccucuccuacauccucugccucgucuucgcccagaagcuccccggcaacgacaacuccaccgccacccucugccucggccaccacgccguccccaacggcacccucgucaagaccaucaccaacgaccagaucgaggucaccaacgccaccgagcucguccaguccuccuccaccggccgcaucugcgacuccccccaccagguccucgacggcgagaacugcacccucaucgacgcccuccucggcgacccccacugcgacggcuuccagaacaaggagugggaccucuucgucgagcgcuccaaggccuacuccaacugcuaccccuacgacguccccgacuacgucucccuccgcucccucgucgccuccuccggcacccucgaguucaacaacgaguccuucaacuggaccggcgucgcccagaacggcaccuccuccgccugcaagcgccgcuccgacaaguccuucuucucccgccucaacuggcuccaccagcucaaguacaaguaccccgcccucaacgucaccaugcccaacaacgagaaguucgacaagcucuacaucuggggcguccaccaccccggcaccgacuccgaccagaucucccucuacgcccaggccuccggccgcgucaccgucuccaccaagcgcucccagcagaccgucauccccaacaucggcucccgccccuggguccgcggcgucuccucccgcaucuccaucuacuggaccaucgucaagcccggcgacauccuccucaucaacuccaccggcaaccucaucgccccccgcggcuacuucaagauccgcuccggcaaguccuccaucaugcgcuccgacgcccccaucggcaagugcaacuccgagugcaucacccccaacggcuccauccccaacgacaagcccuuccagaacgucaaccgcaucaccuacggcgccugcccccgcuacgucaagcagaagacccucaagcucgccaccggcaugcgcaacguccccgagaagcagacccgcggcaucuucggcgccaucgccggcuucaucgagaacggcugggagggcaugauggacggcugguacggcuuccgccaccagaacuccgagggcaccggccaggccgccgaccucaaguccacccaggccgccaucaaccagaucaacggcaagcucaaccgccucaucgagaagaccaacgagaaguuccaccagaucgagaaggaguucuccgaggucgagggccgcauccaggaccucgagaaguacgucgaggacaccaagaucgaccucugguccuacaacgccgagcuccucgucgcccucgagaaccagcacaccaucgaccucaccgacuccgagaugaacaagcucuucgagcgcaccaagaagcagcuccgcgagaacgccgaggacaugggcaacggcugcuucaagaucuaccacaagugcgacaacgccugcaucggcuccauccgcaacggcaccuacgaccacgacgucuaccgcgacgaggcccucaacaaccgcuuccagaucaagggcgucgagcucaaguccggcuacaaggacuggauccucuggaucuccuucgccaucuccugcuuccuccucugcaucguccuccucggcuucaucaugugggccugccagaagggcaacauccgcugcaacaucugcaucuga

SEQ ID NO: 97193 - RNA, 1701 nt, Artificial Sequence
  derived and/or modified CDS sequence (opt2) from hemagglutinin__InfluenzaA__ABG88641
augaagaccaucaucgcccucuccuacauccucugccucgucuucgcccagaagcuccccggcaacgacaacuccaccgccacccucugccucggccaccacgccguccccaacggcacccucgucaagaccaucaccaacgaccagaucgaggucaccaacgccaccgagcucguccaguccuccuccaccucccgcaucugcgacuccccccaccagauccucgacggcgagaacugcacccucaucgacgcccuccucggcgacccccacugcgacggcuuccagaacaaggagugggaccucuucgucgagcgcuccaaggccuacuccaacugcuaccccuacgacguccccgacuacgucucccuccgcucccucgucgccuccuccggcacccucgaguucaacaacgaguccuucaacuggaccggcgucgcccagaacggcaccuccuccgccugcaagcgccgcuccgacaaguccuucuucucccgccucaacuggcuccaccagcucaaguacaaguaccccgcccucaacgucaccaugcccaacaacgagaaguucgacaagcucuacaucuggggcguccaccaccccggcaccgacuccgaccagaucucccucuacgcccaggccuccggccgcgucaccgucuccaccaagcgcucccagcagaccgucauccccaacaucggcuccggccccuggguccgcggcgucuccucccgcaucuccaucuacuggaccaucgucaagcccggcgacauccuccucaucaacuccaccggcaaccucaucgccccccgcggcuacuucaagauccgcuccggcaaguccuccaucaugcgcuccgacgcccccaucggcaagugcaacuccgagugcaucacccccaacggcuccauccccaacggcaagcccuuccagaacgucaaccgcaucaccuacggcgccugcccccgcuacgucaagcagaacacccucaagcucgccaccggcaugcgcaacguccccgagaagcagacccgcggcaucuucggcgccaucgccggcuucaucgagaacggcugggagggcaugauggacggcugguacggcuuccgccaccagaacuccgagggcaccggccaggccgccgaccucaaguccacccaggccgccaucaaccagaucaacggcaagcucaaccgccucaucgagaagaccaacgagaaguuccaccagaucgagaaggaguucuccgaggucgagggccgcauccaggaccucgagaaguacgucgaggacaccaagaucgaccucugguccuacaacgccgagcuccucgucgcccucgagaaccagcacaccaucgaccucaccgacuccgagaugaacaagcucuucgagcgcaccaagaagcagcuccgcgagaacgccgaggacaugggcaacggcugcuucaagaucuaccacaagugcgacaacgccugcaucggcuccauccgcaacggcaccuacgaccacgacgucuaccgcgacgaggcccucaacaaccgcuuccagaucaagggcgucgagcucaaguccggcuacaaggacuggauccucuggaucuccuucgccaccuccugcuuccuccucugcaucguccuccucggcuucaucaugugggccugccagaagggcaacauccgcugcaacaucugcaucuga

SEQ ID NO: 97194 - RNA, 1701 nt, Artificial Sequence; identical to SEQ ID NO: 96552
  derived and/or modified CDS sequence (opt2) from hemagglutinin__InfluenzaA__ABG88652

SEQ ID NO: 97195 - RNA, 1701 nt, Artificial Sequence; identical to SEQ ID NO: 96552
  derived and/or modified CDS sequence (opt2) from hemagglutinin__InfluenzaA__ABG88663

SEQ ID NO: 97196 - RNA, 1701 nt, Artificial Sequence; identical to SEQ ID NO: 96552
  derived and/or modified CDS sequence (opt2) from hemagglutinin__InfluenzaA__ABG88674

SEQ ID NO: 97197 - RNA, 1701 nt, Artificial Sequence; identical to SEQ ID NO: 96552
  derived and/or modified CDS sequence (opt2) from hemagglutinin__InfluenzaA__ABG88685

SEQ ID NO: 97198 - RNA, 1701 nt, Artificial Sequence; identical to SEQ ID NO: 96552
  derived and/or modified CDS sequence (opt2) from hemagglutinin__InfluenzaA__ABG88696

SEQ ID NO: 97199 - RNA, 1701 nt, Artificial Sequence; identical to SEQ ID NO: 96318
  derived and/or modified CDS sequence (opt2) from hemagglutinin__InfluenzaA__ABG88707

SEQ ID NO: 97200 - RNA, 1701 nt, Artificial Sequence; identical to SEQ ID NO: 96318
  derived and/or modified CDS sequence (opt2) from hemagglutinin__InfluenzaA__ABG88718

SEQ ID NO: 97201 - RNA, 1701 nt, Artificial Sequence
  derived and/or modified CDS sequence (opt2) from hemagglutinin__InfluenzaA__ABG88729
augaagaccaucaucgcccucuccuacauccucugccucgucuucgcccagaagcuccccggcaacgacaacuccaccgccacccucugccucggccaccacgccguccccaacggcacccucgucaagaccaucaccaacgaccagaucgaggucaccaacgccaccgagcucguccaguccuccuccaccggccgcaucugcgacuccccccaccgcauccucgacggcaagaacugcacccucaucgacgcccuccucggcgacccccacugcgacggcuuccagaacaaggagugggaccucuucgucgagcgcuccaaggccuacuccaacugcuaccccuacgacguccccgacuacgccucccuccgcucccucgucgccuccuccggcacccucgaguucaucaacgaggacuucaacuggaccggcgucgcccaggacggcggcuccuacgccugcaagcgcggcuccgucaacuccuucuucucccgccucaacuggcuccacaagcucgaguacaaguaccccgcccucaacgucaccaugcccaacuccggcaaguucgacaagcucuacaucuggggcguccaccaccccuccaccgacuccgaccagaccucccucuacguccgcgccuccggccgcgucaccgucuccaccaagcgcucccagcagaccgucacccccaacaucggcucccgccccuggguccgcggccucuccucccgcaucuccaucuacuggaccaucgucaagcccggcgacauccuccucaucaacuccaccggcaaccucaucgccccccgcggcuacuucaagauccgcaacggcaaguccuccaucaugcgcuccgacgcccccaucggcaacugcuccuccgagugcaucacccccaacggcuccauccccaacgacaagcccuuccagaacgucaaccgcaucaccuacggcgccugcccccgcuacgucaagcagaacacccucaagcucgccaccggcaugcgcaacguccccgagaagcagacccgcggcaucuucggcgccaucgccggcuucaucgagaacggcugggagggcauggucgacggcugguacggcuuccgccaccagaacuccgagggcaccggccaggccgccgaccucaaguccacccaggccgccaucgaccagaucaacggcaagcucaaccgccucaucgagaagaccaacgagaaguuccaccagaucgagaaggaguucuccgaggucgagggccgcauccaggaccucgagaaguacgucgaggacaccaagaucgaccucugguccuacaacgccgagcuccucgucgcccucgagaaccagcacaccaucgaccucaccgacuccgagaugaacaagcucuucgagaagacccgcaagcagcuccgcgagaacgccgaggacaugggcaacggcugcuucaagaucuaccacaagugcgacaacgccugcaucggcuccauccgcaacggcaccuacgaccacgacgucuaccgcgacgaggcccucaacaaccgcuuccagaucaagggcgucgagcucaaguccggcuacaaggacuggauccucuggaucuccuucgccaucuccugcuuccuccucugcgucguccuccucggcuucaucaugugggccugccagaagggcaacauccgcugcaacaucugcaucuga

SEQ ID NO: 97202 - RNA, 1701 nt, Artificial Sequence
  derived and/or modified CDS sequence (opt2) from hemagglutinin__InfluenzaA__ABG88740
augaagaccaucaucgcccucuccuacauccucugccucgucuucgcccagaagcuccccggcaacgacaacuccaccgccacccucugccucggccaccacgccguccccaacggcacccucgucaagaccaucaccaacgaccagaucgaggucaccaacgccaccgagcucguccaguccuccuccaccggccgcaucugcgacuccccccaccgcauccucgacggcaagaacugcacccucaucgacgcccuccucggcgacccccacugcgacggcuuccagaacaaggagugggaccucuucgucgagcgcuccaaggccuacuccaacugcuaccccuacgacguccccgacuacgccucccuccgcucccucgucgccuccuccggcacccucgaguucaucaacgaggacuucaacuggaccggcgucgcccaggacggcaaguccuacgccugcaagcgcggcuccgucaacuccuucuucucccgccucaacuggcuccacaagcucgaguacaaguaccccgcccucaacgucaccaugcccaacaacggcaaguucgacaagcucuacaucuggggcguccaccaccccuccaccgacuccgaccagaccucccucuacguccgcgccuccggccgcgucaccgucuccaccaagcgcucccagcagaccgucauccccaacaucggcucccgccccuggguccgcggccucuccucccgcaucuccaucuacuggaccaucgucaagcccggcgacauccuccucaucaacuccaccggcaaccucaucgccccccgcggcuacuucaagauccgcaacggcaaguccuccaucaugcgcuccgacgcccccaucggcaacugcuccuccgagugcaucacccccaacggcuccauccccaacgacaagcccuuccagaacgucaaccgcaucaccuacggcgccugcccccgcuacaucaagcagaacacccucaagcucgccaccggcaugcgcaacguccccgagaagcagacccgcggcaucuucggcgccaucgccggcuucaucgagaacggcugggagggcauggucgacggcugguacggcuuccgccaccagaacuccgagggcaccggccaggccgccgaccucaaguccacccaggccgccaucgaccagaucaacggcaagcucaaccgccucaucgagaagaccaacgagaaguuccaccagaucgagaaggaguucuccgaggucgagggccgcauccaggaccucgagaaguacgucgaggacaccaagaucgaccucugguccuacaacgccgagcuccucgucgcccucgagaaccagcacaccaucgaccucaccgacuccgagaugaacaagcucuucgagcgcacccgcaagcagcuccgcgagaacgccgaggacaugggcaacggcugcuucaagaucuaccacaagugcgacaacgccugcaucggcuccauccgcaacggcaccuacgaccacgacgucuaccgcgacgaggcccucaacaaccgcuuccagaucaagggcgucgagcucaaguccggcuacaaggacuggauccucuggaucuccuucgccaucuccugcuuccuccucugcgucguccuccucggcuucaucaugugggccugccagaagggcaacauccgcugcaacaucugcaucuga

SEQ ID NO: 97203 - RNA, 1701 nt, Artificial Sequence; identical to SEQ ID NO: 97089
  derived and/or modified CDS sequence (opt2) from hemagglutinin__InfluenzaA__ABG88751

SEQ ID NO: 97204 - RNA, 1701 nt, Artificial Sequence
  derived and/or modified CDS sequence (opt2) from hemagglutinin__InfluenzaA__ABG88762
augaagaccaucaucgcccucuccuacauccucugccucgucuucacccagaagcuccccggcaacgacaacuccaccgccacccucugccucggccaccacgccguccccaacggcacccucgucaagaccaucaccaacgaccagaucgaggucaccaacgccaccgagcucguccaguccuccuccaccggccgcaucugcgacuccccccaccgcauccucgacggcaagaacugcacccucaucgacgcccuccucggcgacccccacugcgacggcuuccagaacaaggagugggaccucuucgucgagcgcuccaaggccuacuccaacugcuaccccuacgacguccccgacuacgccucccuccgcucccucgucgccuccuccggcacccucgaguucaucaacgaggacuucaacuggaccggcgucgcccaggacggcggcuccuacgccugcaagcgcggcuccgucaacuccuucuucucccgccucaacuggcuccacaagcucgaguacaaguaccccgcccucaacgucaccaugcccaacaacggcaaguucgacaagcucuacaucuggggcguccaccaccccuccaccgacuccgaccagaccucccucuacguccgcgccuccggccgcgucaccgucuccaccaagcgcucccagcagaccgucauccccaacaucggcucccgccccuggguccgcggccucuccucccgcaucuccaucuacuggaccaucgucaagcccggcgacauccuccucaucaacuccaccggcaaccucaucgccccccgcggcuacuucaagauccgcaacggcaaguccuccaucaugcgcuccgacgccuccaucggcaacugcuccuccgagugcaucacccccaacggcuccauccccaacgacaagcccuuccagaacgucaaccgcaucaccuacggcgccugcccccgcuacgucaagcagaacacccucaagcucgccaccggcaugcgcaacguccccgagaagcagacccgcggcaucuucggcgccaucgccggcuucaucgagaacggcugggagggcauggucgacggcugguacggcuuccgccaccagaacuccgagggcaccggccaggccgccgaccucaaguccacccaggccgccaucgaccagaucaacggcaagcucaaccgccucaucgagaagaccaacgagaaguuccaccagaucgagaaggaggucuccgaggucgagggccgcauccaggaccucgagaaguacgucgaggacaccaagaucgaccucugguccuacaacgccgagcuccucgucgcccucgagaaccagcacaccaucgaccucaccgacuccgagaugaacaagcucuucgagcgcacccgcaagcagcuccgcgagaacgccgaggacaugggcaacggcugcuucaagaucuaccacaagugcgacaacgccugcaucggcuccauccgcaacggcaccuacgaccacgacgucuaccgcgacgaggcccucaacaaccgcuuccagaucaaguccgucgagcucaaguccggcuacaaggacuggauccucuggaucuccuucgccaucuccugcuuccuccucugcgucguccuccucggcuucaucaugugggccugccagaagggcaacauccgcugcaacaucugcaucuga

SEQ ID NO: 97205 - RNA, 1701 nt, Artificial Sequence
  derived and/or modified CDS sequence (opt2) from hemagglutinin__InfluenzaA__ABG88773
augaagaccaucaucgcccucuccuacauccucugccucgucuucgcccagaagcuccccggcaacgacaacuccaccgccacccucugccucggccaccacgccguccccaacggcacccucgucaagaccaucaccaacgaccagaucgaggucaccaacgccaccgagcucguccaguccuccuccgccggccgcaucugcgacuccccccaccgcauccucgacggcaagaacugcacccucaucgacgcccuccucggcgacccccacugcgacggcuuccagaacaaggagugggaccucuucgucgagcgcuccaaggccuacuccaacugcuaccccuacgacguccccgacuacgccucccuccgcucccucgucgccuccuccggcacccucgaguucaucaacgaggacuucaacuggaccggcgucgcccaggacggcaaguccuacgccugcaagcgcggcuccgucaacuccuucuucucccgccucaacuggcuccacaagcucgaguacaaguaccccgcccucaacgucaccaugcccaacaacggcaaguucgacaagcucuacaucuggggcguccaccaccccuccaccgacuccgaccagaccucccucuacguccgcgccuccggccgcgucaccgucuccaccaagcgcucccagcagaccgucauccccaacaucggcucccgccccuggguccgcggccucuccucccgcaucuccaucuacuggaccaucgucaagcccggcgacauccuccucaucaacuccaccggcaaccucaucgccccccgcggcuacuucaagauccgcaacggcaaguccuccaucaugcgcuccgacgcccccaucggcaacugcuccuccgagugcaucacccccaacggcuccauccccaacgacaagcccuuccagaacgucaaccgcaucaccuacggcgccugcccccgcuacgucaagcagaacacccucaagcucgccaccggcaugcgcaacguccccgagaagcagacccgcggcaucuucggcgccaucgccggcuucaucgagaacggcugggagggcauggucgacggcugguacggcuuccgccaccagaacuccgagggcaccggccaggccgccgaccucaaguccacccaggccgccaccgaccagaucaacggcaagcucaaccgccucaucgagaagaccaacgagaaguuccaccagaucgagaaggaguucuccgaggucgagggccgcauccaggaccucgagaaguacgucgaggacaccaagaucgaccucugguccuacaacgccgagcuccucgucgcccucgagaaccagcacaccaucgaccucaccgacuccgagaugaacaagcucuucgagcgcacccgcaagcagcuccgcgagaacgccgaggacaugggcaacggcugcuucaagaucuaccacaagugcgacaacgccugcaucggcuccauccgcaacggcaccuacgaccacgacgucuaccgcgacgaggcccucaacaaccgcuuccagaucaagggcgucgagcucaaguccggcuacaaggacuggauccucuggaucuccuucgccaucuccugcuuccuccucugcgucguccuccucggcuucaucaugugggccugccagaagggcaacauccgcugcaacaucugcaucuga

SEQ ID NO: 97206 - RNA, 1701 nt, Artificial Sequence
  derived and/or modified CDS sequence (opt2) from hemagglutinin__InfluenzaA__ABG88784
augaagaccaucaucgcccucuccuacauccucugccucgucuucgcccagaagcuccccggcaacgacaacuccaccgccacccucugccucggccaccacgccguccccaacggcacccucgucaagaccaucaccaacgaccagaucgaggucaccaacgccaccgagcucguccaguccuccuccaccggccgcaucugcgacuccccccaccgcauccucgacggcaagaacugcacccucaucgacgcccuccucggcgacccccacugcgacggcuuccagaacaaggagugggaccucuucgucgagcgcuccaaggccuacuccaacugcuaccccuacgacguccccgacuacgccucccuccgcucccucgucgccuccuccggcacccucgaguucaucaacgaggacuucaacuggaccggcgucgcccaggacggcaaguccuacgccugcaagcgcggcuccgucaacuccuucuucucccgccucaacuggcuccacaagcucgaguacaaguaccccgcccucaacgucaccaugcccaacaacggcaaguucgacaagcucuacaucuggggcguccaccaccccuccaccgacuccgaccagaccucccucuacguccgcgccuccggccgcgucaccgucuccaccaagcgcucccagcagaccgucauccccaacaucggcucccgccccuggguccgcggccucuccucccgcaucuccaucuacuggaccaucgucaagcccggcgacauccuccucaucaacuccaccggcaaccucaucgccccccgcggcuacuucaagauccgcaacggcaaguccuccaucaugcgcuccgacgcccccaucggcaacugcuccuccgagugcaucacccccaacggcuccauccccaacgacaagcccuuccagaacgucaaccgcaucaccuacggcgccugcccccgcuacgucaagcagaacacccucaagcucgccaccggcaugcgcaacguccccgagaagcagacccgcggcaucuucggcgccaucgccggcuucaucgagaacggcugggagggcauggucgacggcugguacggcuuccgccaccagaacuccgagggcaccggccaggccgccgaccucaaguccacccaggccgccaucgaccagaucaacggcaagcucaaccgccucaucaagaagaccaacgagaaguuccaccagaucgagaaggaguucuccgaggucgagggccgcauccaggaccucgagaaguacgucgaggacaccaagaucgaccucugguccuacaacgccgagcuccucgucgcccucgagaaccagcacaccaucgaccucaccgacuccgagaugaacaagcucuucgagcgcacccgcaagcagcuccgcgagaacgccgaggacaugggcaacggcugcuucaagaucuaccacaagugcgacaacgccugcaucggcuccauccgcaacggcaccuacgaccacgacgucuaccgcgacgaggcccucaacaaccgcuuccagaucaagggcgucgagcucaaguccggcuacaaggacuggauccucuggaucuccuucgccaucuccugcuuccuccucugcgucguccuccucggcuucaucaugugggccugccagaagggcaacauccgcugcaacaucugcaucuga

SEQ ID NO: 97207 - RNA, 1701 nt, Artificial Sequence
  derived and/or modified CDS sequence (opt2) from hemagglutinin__InfluenzaA__ABG88806
augaagaccaucaucgcccucuccuacauccucugccucgucuucgcccagaagcuccccggcaacgacaacuccaccgccacccucugccucggccaccacgccguccccaacggcacccucgucaagaccaucaccaacgaccagaucgaggucaccaacgccaccgagcucguccaguccuccuccaccggccgcaucugcgacuccccccaccagauccucgacggcgagaacugcacccucaucgacgcccuccucggcgacccccacugcgacggcuuccagaacaaggagugggaccucuucgucgagcgcuccaaggccuacuccaacugcuaccccuacgacguccccgacuacgucucccuccgcucccucgucgccuccuccggcacccucgaguucaacaacgaguccuucaacuggaccggcgucgcccagaacggcaccuccuccgccugcaagcgccgcuccgacaaguccuucuucucccgccucaacuggcuccaccagcucaaguacaaguaccccgcccucaacgucaccguccccaacaacgagaaguucgacaagcucuacaucuggggcguccaccaccccggcaccgacuccgaccagaucucccucuacgcccaggccuccggccgcgucaccgucuccaccaagcgcucccagcagaccgucauccccaacaucggcucccgccccuggguccgcggcgucuccucccgcaucuccaucuacuggaccaucgucaagcccggcgacauccuccucaucaacuccaccggcaaccucaucgccccccgcggcuacuucaagauccgcuccggcaaguccuccaucaugcgcuccgacgcccccaucggcaagugcaacuccgagugcaucacccccaacggcuccauccccaacgacaagcccuuccagaacgucaaccgcaucaccuacggcgccugcccccgcuacgucaagcagaacacccucaagcucgccaccggcaugcgcaacguccccgagaagcagacccgcggcaucuucggcgccaucgccggcuucaucgagaacggcugggagggcaugauggacggcugguacggcuuccgccaccagaacuccgagggcaccggccaggccgccgaccucaaguccacccaggccgccaucaaccagaucaacggcaagcucaaccgccucaucgagaagaccaacgagaaguuccaccagaucgagaaggaguucuccgaggucgagggccgcauccaggaccucgagaaguacgucgaggacaccaagaucgaccucugguccuacaacgccgagcuccucgucgcccucgagaaccagcacaccaucgaccucaccgacuccgagaugaacaagcucuucgagcgcaccaagaagcagcuccgcgagaacgccgaggacaugggcaacggcugcuucaagaucuaccacaagugcgacaacgccugcaucggcuccauccgcaacggcaccuacgaccacgacgucuaccgcgacgaggcccucaacaaccgcuuccagaucaagggcgucgagcucaaguccggcuacaaggacuggauccucuggaucuccuucgccaucuccugcuuccuccucugcaucguccuccucggcuucaucaugugggccugccagaagggcaacauccgcugcaacaucugcaucuga

SEQ ID NO: 97208 - RNA, 1704 nt, Artificial Sequence
  derived and/or modified CDS sequence (opt2) from hemagglutinin__InfluenzaA__ABI16504
auggagaagaucguccuccuccucgccaucgucucccucgucaaguccgaccagaucugcaucggcuaccacgccaacaacuccaccgagcaggucgacaccaucauggagaagaacgucaccgucacccacgcccaggacauccucgagaagacccacaacggcaagcucugcgaccucgacggcgucaagccccucauccuccgcgacugcuccgucgccggcuggcuccucggcaaccccaugugcgacgaguucaucaacguccccgagugguccuacaucgucgagaaggccaaccccgccaacgaccucugcuaccccggcaacuucaacgacuacgaggagcucaagcaccuccucucccgcaucaaccacuucgagaagauccagaucaucuccaaguccuccugguccgaccacgaggccuccuccggcgucuccuccgccugccccuaccagggcacccccuccuucuuccgcaacgucgucuggcucaucaagaagaacaacaccuaccccaccaucaagcgcuccuacaacaacaccaaccaggaggaccuccucauccucuggggcauccaccacuccaacaacgccgccgagcagaccaagcucuaccagaaccccaccaccuacaucuccgucggcaccuccacccucaaccuccgccucguccccaagaucgccacccgcuccaaggucaacggccaguccggccgcauggacuucuucuggaccauccucaagcccaacgacgccaucaacuucgaguccaacggcaacuucaucgcccccgaguacgccuacaagaucgucaagaagggcgacuccgccaucaugaaguccgaggucgaguacggcaacugcaacaccaagugccagacccccaucggcgccaucaacuccuccaugcccuuccacaacauccacccccucaccaucggcgagugccccaaguacgucaaguccaacaagcucguccucgccaccggccuccgcaacuccccccuccgcgagcgccgccgcaagcgcggccucuucggcgccaucgccggcuucaucgagggcggcuggcagggcauggucgacggcugguacggcuaccaccacuccaacgagcagggcuccggcuacgccgccgacaaggaguccacccagaaggccaucgacggcgucaccaacaaggucaacuccaucaucgacaagaugaacacccaguucgaggccgucggccgcgaguucaacaaccucgagcgccgcaucgagaaccucaacaagaagauggaggacggcuuccucgacgucuggaccuacaacgccgagcuccucguccucauggagaacgagcgcacccucgacuuccacgacuccaacgucaagaaccucuacgacaagguccgccuccagcuccgcgacaacgccaaggagcucggcaacggcugcuucgaguucuaccacaagugcgacaacgagugcauggaguccguccgcaacggcaccuacgacuacccccaguacuccgaggaggcccgccucaagcgcgaggagaucuccggcgucaagcucgaguccaucggcaccuaccagauccucuccaucuacuccaccgucgccuccucccucgcccucgccaucauggucgccggccucucccucuggaugugcuccaacggcucccuccagugccgcaucugcaucuga

SEQ ID NO: 97209 - RNA, 1701 nt, Artificial Sequence; identical to SEQ ID NO: 96669
  derived and/or modified CDS sequence (opt2) from hemagglutinin__InfluenzaA__ABI20793

SEQ ID NO: 97210 - RNA, 1701 nt, Artificial Sequence
  derived and/or modified CDS sequence (opt2) from hemagglutinin__InfluenzaA__ABI20837
augaaggccaagcuccucguccuccucugcgccuucaccgccaccuacgccgacaccaucugcaucggcuaccacgccaacaacuccaccgacaccgucgacaccguccucgagaagaacgucaccgucacccacuccgucaaccuccucgaggacucccacaacggcaagcucugccgccucaagggcaccgccccccuccagcucggcaacugcuccgucgccggcuggauccucggcaaccccgagugcgagucccucuucuccaaggaguccugguccuacaucgccgagacccccaaccccgagaacggcaccugcuaccccggcuacuucgccgacuacgaggagcuccgcgagcagcucuccuccgucuccuccuucgagcgcuucgagaucuuccccaaggaguccuccuggcccaaccacaccgucaccaagggcgucaccgccuccugcucccacaacggcaaguccuccuucuacaagaaccuccucuggcucaccgagaagaacggccucuaccccaaccucuccaaguccuacgucaacaacaaggagaaggagguccucguccucuggggcguccaccaccccuccaacaucggcgaccagcgcgccaucuaccacaccgagaacgccuacgucuccgucgucuccucccacuacucccgccgcuucacccccgagaucgccaagcgccccaagguccgcgaccaggagggccgcaucaacuacuacuggacccuccucgagcccggcgacaccaucaucuucgaggccaacggcaaccucaucgcccccugguacgccuucgcccucucccgcggcuucggcuccggcaucaucaccuccaacgccuccaugggcgagugcgacgccaagugccagaccccccagggcgccaucaacuccucccuccccuuccagaacguccaccccgucaccaucggcgagugccccaaguacguccgcuccaccaagcuccgcauggucaccggccuccgcaacauccccuccauccagucccgcggccucuucggcgccaucgccggcuucaucgagggcggcuggaccggcaugaucgacggcugguacggcuaccaccaccagaacgagcagggcuccggcuacgccgccgaccagaaguccacccagaacgccaucaacggcaucaccaacaaggucaacuccgucaucgagaagaugaacacccaguucaccgccgucggcaaggaguucaacaagcucgagcgccgcauggagaaccucaacaagaaggucgacgacggcuuccucgacaucuggaccuacaacgccgagcuccucguccuccucgagaacgagcgcacccucgacuuccacgacuccaacgucaagaaccucuacgagaaggucaagacccagcucaagaacaacgccaaggagaucggcaacggcugcuucgaguucuaccacaagugcaacaacgagugcauggaguccgucaagaacggcaccuacgacuaccccaaguacuccgaggaguccaagcucaaccgcgagaagaucgacggcgucaagcucgaguccaugggcgucuaccagauccucgccaucuacuccaccgucgccuccucccucguccuccucgucucccucggcgccaucuccuucuggaugugcuccaacggcucccuccagugccgcaucugcaucuga

SEQ ID NO: 97211 - RNA, 1701 nt, Artificial Sequence
  derived and/or modified CDS sequence (opt2) from hemagglutinin__InfluenzaA__ABI20848
augaaggccaagcuccucguccuccucugcgccuucaccgccaccuacgccgacaccaucugcaucggcuaccacgccaacaacuccaccgacaccgucgacaccguccucgagaagaacgucaccgucacccacuccgucaaccuccucgaggacucccacaacggcaagcucugccgccucaagggcaccgccccccuccagcucggcaacugcuccgucgccggcuggauccucggcaaccccgagugcgagucccucuucuccaaggaguccugguccuacaucgccgagacccccaaccccgagaacggcaccugcuaccccggcuacuucgccgacuacgaggagcucaaggagcagcucuccuccgucuccuccuucgagcgcuucgagaucuuccccaaggaguccuccuggcccaaccacaccgucaccaagggcgucaccgccuccugcucccacaacggcaaguccuccuucuacaagaaccuccucuggcucaccgagaagaacggccucuaccccaaccucuccaaguccuacgucaacaacaaggagaaggagguccucguccucuggggcguccaccaccccuccaacaucggcgaccagcgcgccaucuaccacaccgagaacgcccacgucuccgucgucuccucccacuacucccgccgcuucacccccgagaucgccaagcgccccaagguccgcgaccaggagggccgcaucaacuacuacuggacccuccucgagcccggcgacaccaucaucuucgaggccaacggcaaccucaucgcccccugguacgccuucgcccucucccgcggcuucggcuccggcaucaucaccuccaacgccuccaugggcgagugcgacgccaagugccagaccccccagggcgccaucaacuccucccuccccuuccagaacguccaccccgucaccaucggcgagugccccaaguacguccgcuccaccaagcuccgcauggucaccggccuccgcaacauccccuccauccagucccgcggccucuucggcgccaucgccggcuucaucgagggcggcuggaccggcaugaucgacggcugguacggcuaccaccaccagaacgagcagggcuccggcuacgccgccgacaagaaguccacccagaacgccaucgacggcaucaccaacaaggucaacuccgucaucgagaagaugaacacccaguucaccgccgucggcaaggaguucaacaagcucgagcgccgcauggagaaccucaacaagaaggucgacgacggcuuccucgacaucuggaccuacaacgccgagcuccucguccuccucgagaacgagcgcacccucgacuuccacgacuccaacgucaagaaccucuacgagaaggucaagaaccagcucaagaacaacgccaaggagaucggcaacggcugcuucgaguucuaccacaagugcaacaacgagugcauggaguccgucaagaacggcaccuacgacuaccccaaguacuccgaggaguccaagcucaagcgcgagaagaucgacggcgucaagcucgaguccaugggcgucuaccagauccucgccaucuacuccaccgucgccuccucccucguccuccucgucucccucggcgccaucuccuucuggaugugcuccaacggcucccuccagugccgcaucugcaucuga

SEQ ID NO: 97212 - RNA, 1701 nt, Artificial Sequence; identical to SEQ ID NO: 96957
  derived and/or modified CDS sequence (opt2) from hemagglutinin__InfluenzaA__ABI20859

SEQ ID NO: 97213 - RNA, 1701 nt, Artificial Sequence
  derived and/or modified CDS sequence (opt2) from hemagglutinin__InfluenzaA__ABI20870
augaaggccaagcuccucguccuccucugcgccuucaccgccaccuacgccgacaccaucugcaucggcuaccacgccaacaacuccaccgacaccgucgacaccguccucgagaagaacgucaccgucacccacuccgucaaccuccucgaggacucccacaacggcaagcucugccgccucaagggcaucgccccccuccagcucggcaacugcuccgucgccggcuggauccucggcaaccccgagugcgagucccucuucuccaaggaguccugguccuacaucgccgagacccccaaccccgagaacggcaccugcuaccccggcaacuucgccgacuacgaggagcuccgcgagcagcucuccuccgucuccuccuucgagcgcuucgagaucuuccccaaggaguccuccuggcccaaccacaccgucaccaagggcgucaccgucuccugcucccacaacggcaaguccuccuucuaccgcaaccuccucuggcucaccgagaagaacggccucuaccccaaccucuccaaguccuacgucaacaacaaggagaaggagguccucguccucuggggcguccaccaccccuccaacaugcgcgaccagcgcgccaucuaccacaccgagaacgccuacgucuccgucgucuccucccacuacucccgccgcuucacccccgagaucgccaagcgccccaagguccgcgaccaggagggccgcaucaacuacuacuggacccuccucgagcccggcgacaccaucaucuucgaggccaacggcaaccucaucgccccccgcuacgccuucgcccucucccgcggcuucggcuccggcaucaucaccuccaacgccuccauggacgagugcgacgccaagugccagaccccccagggcgccaucaacuccucccuccccuuccagaacguccaccccgucaccaucggcgagugccccaaguacguccgcuccaccaagcuccgcauggucaccggccuccgcaacauccccuccauccagucccgcggccucuucggcgccaucgccggcuucaucgagggcggcuggaccggcaugaucgacggcugguacggcuaccaccaccagaacgagcagggcuccggcuacgccgccgaccagaaguccacccagaacgccaucaacggcaucaccaacaaggucaacuccgucaucgagaagaugaacacccaguucaccgccgucggcaaggaguucaacaagcucgagcgccgcauggagaaccucaacaagaaggucgacgacggcuuccucgacaucuggaccuacaacgccgagcuccucguccuccucgagaacgagcgcacccucgacuuccacgacuccaacgucaagaaccucuacgagaaggucaagucccagcucaagaacaacgccaaggagaucggcaacggcugcuucgaguucuaccacaagugcaacaacgagugcauggaguccgucaagaacggcaccuacgacuaccccaaguacuccgaggaguccaagcucaaccgcgagaagaucgacggcgucaagcucgaguccaugggcgucuaccagauccucgccaucuacuccaccgucgccuccucccucguccuccucgucucccucggcgccaucuccuucuggaugugcuccaacggcucccuccagugccgcaucugcaucuga

SEQ ID NO: 97214 - RNA, 1701 nt, Artificial Sequence; identical to SEQ ID NO: 97025
  derived and/or modified CDS sequence (opt2) from hemagglutinin__InfluenzaA__ABI20881

SEQ ID NO: 97215 - RNA, 1701 nt, Artificial Sequence
  derived and/or modified CDS sequence (opt2) from hemagglutinin__InfluenzaA__ABI20892
augaagaccaucaucgcccucuccuacauccucugccucgucuucgcccagaagcuccccggcaacgacaacuccaccgccacccucugccucggccaccacgccguccccaacggcacccucgucaagaccaucaccaacgaccagaucgaggucaccaacgccaccgagcucguccaguccuccuccaccggccgcaucugcgacuccccccaccgcauccucgacggcaagaacugcacccucaucgacgcccuccucggcgacccccacugcgacggcuuccagaacaaggagugggaccucuucgucgagcgcuccaaggccuacuccaacugcuaccccuacgacguccccgacuacgccucccuccgcucccucgucgccuccuccggcacccucgaguucaccaaggagggcuucaacuggaccggcgucgcccaggacggcaaguccuacgccugcaagcgcggcuccgucaacuccuucuucucccgccucaacuggcuccacaagcucgaguacaaguaccccgcccucaacgucaccaugcccaacaacgacaaguucgacaagcucuacaucuggggcguccaccaccccuccaccgacuccgaccagaccucccucuacguccaggccuccggccgcgucaccgucuccaccaagcgcucccagcagaccgucauccccaacaucggcucccgccccuggguccgcggcaucuccucccgcaucuccauccacuggaccaucgucaagcccggcgacauccuccucaucaccuccaccggcaaccucaucgccccccgcggcuacuucaagauccgcaacggcaaguccuccaucaugcgcuccgacgcccccaucggcaacugcaacuccgagugcaucacccccaacggcuccauccccaacgacaagcccuuccagaacgucaaccgcaucaccuacggcgccugcccccgcuacgucaagcagaacacccucaagcucgccaccggcaugcgcaacguccccgagaagcagacccgcggcaucuucggcgccaucgccggcuucaucgagaacggcugggagggcauggucgacggcugguacggcuuccgccaccagaacuccgagggcaccggccaggccgccgaccucaaguccacccaggccgccaucgaccagaucaacggcaagcucaaccgccucaucgagaagaccaacgagaaguuccaccagaucgagaaggaguucuccgaggucgagggccgcauccaggaccucgagaaguacgucgaggacaccaagaucgaccucugguccuacaacgccgagcuccucgucgcccucgagaaccagcacaccaucgaccucaccgacuccgagaugaacaagcucuucgagcgcacccgcaagcagcuccgcgagaacgccgaggacaugggcaacggcugcuucaagaucuaccacaagugcgacaacgccugcaucggcuccauccgcaacggcaccuacgaccacgacgucuaccgcgacgaggcccucaacaaccgcuuccagaucaagggcgucgagcucaaguccggcuacaaggacuggauccucuggaucuccuucgccaucuccugcuuccuccucugcgucguccuccucggcuucaucaugugggccugccagaagggcaacauccgcugcaacaucugcaucuga

SEQ ID NO: 97216 - RNA, 1701 nt, Artificial Sequence
  derived and/or modified CDS sequence (opt2) from hemagglutinin__InfluenzaA__ABI20903
augaagaccaucaucgcccucuccuacauccucugccucgucuucgcccagaagcuccccggcaacgacaacuccaccgccacccucugccucggccaccacgccguccccaacggcacccucgucaagaccaucaccaacgaccagaucgaggucaccaacgccaccgagcucguccagaacucccccaccggccgcaucugcgacuccccccaccgcauccucgacggcaagaacugcacccucaucgacgcccuccucggcgacccccacugcgacggcuuccagaacaaggagugggaccucuucgucgagcgcuccaaggccuacuccaacugcuaccccuacgacguccccgacuacgccucccuccgcucccucgucgccuccuccggcacccucgaguucaccaacgagaacuucaacuggaccggcgucgcccaggacggcaaguccuacgccugcaagcgcggcuccgucaacuccuucuucucccgccucaacuggcuccacaagcucgaguacaaguaccccgcccucaacgucaccaugcccaacaacggcaaguucgacaagcucuacaucuggggcguccaccaccccuccaccgacuccgaccagaccucccucuacguccgcgccuccggcaaggucaccgucuccaccaagcgcucccagcagaccgucauccccgacaucggcuaccgccccuggguccgcggccucuccucccgcaucuccaucuacuggaccaucgucaagcccggcgacauccuccucauccacuccaccggcaaccucaucgccccccgcggcuacuucaagauccgcaacggcaaguccuccaucaugcgcuccgacgcccccaucggcaacugcuccuccgagugcaucacccccaacggcuccauccccaacgacaagcccuuccagaacgucaaccgcaucaccuacggcgccugcccccgcuacgucaagcagaacacccucaagcucgccaccggcaugcgcaacguccccgagaagcagacccgcggcaucuucggcgccaucgccggcuucaucgagaacggcugggagggcauggucgacggcugguacggcuuccgccaccagaacuccgagggcaccggccaggccgccgaccucaaguccacccaggccgccaucgaccagaucaacggcaagcucaaccgccucgucgagaagaccaacgagaaguuccaccagaucgagaaggaguucuccgaggucgagggccgcauccaggaccucgagaaguacgucgaggacaccaagaucgaccucugguccuacaacgccgagcuccucgucgcccucgagaaccagcacaccaucgaccucaccgacuccgagaugaacaagcucuucgagcgcacccgcaagcagcuccgcgagaacgccgaggacaugggcaacggcugcuucaagaucuaccacaagugcgacaacgccugcaucggcuccauccgcaacggcaccuacgaccacgacgucuaccgcgacgaggcccucaacaaccgcuuccagaucaagggcgucgagcucaaguccggcuacaaggacuggauccucuggaucuccuucgccaucuccugcuuccuccucugcgucguccuccucggcuucaucaugugggccugccagaagggcaacauccgcugcaacaucugcaucuga

SEQ ID NO: 97217 - RNA, 1701 nt, Artificial Sequence
  derived and/or modified CDS sequence (opt2) from hemagglutinin__InfluenzaA__ABI20914
augaagaccaucaucgcccucuccuacauccucugccucgucuucgcccagaagcuccccggcaacgacaacuccaccgccacccucugccucggccaccacgccguccccaacggcacccucgucaagaccaucaccaacgaccagaucgaggucaccaacgccaccgagcucguccaguccuccuccaccggccgcaucugcgacuccccccaccgcauccucgacggcaagaacugcacccucaucgacgcccuccucggcgacccccacugcgacggcuuccagaacaaggagugggaccucuucgucgagcgcuccaaggccuacuccaacugcuaccccuacgacguccccgacuacgccucccuccgcucccucgucgccuccuccggcacccucgaguucaucaacgaggacuucaacuggaccggcgucgcccaggacggcaaguccuacgccugcaagcgcggcuccgucaacuccuucuucucccgccucaacuggcuccacaagcucgaguacaaguaccccgcccucaacgucaccaugcccaacaacggcaaguucgacaagcucuacaucuggggcguccaccaccccuccaccgacuccgaccagaccucccucuacguccgcgccuccggccgcgucaccgucuccaccaagcgcucccagcagaccgucauccccaacaucggcuuccgccccuggguccgcggccucuccucccgcaucuccaucuacuggaccaucgucaagcccggcgacauccuccucaucaacuccaccggcaaccucaucgccccccgcggcuacuucaagauccgcaacggcaaguccuccaucaugcgcuccgacgcccccaucggcaacugcuccuccgagugcaucacccccaacggcuccauccccaacgacaagcccuuccagaacgucaaccgcaucaccuacggcgccugcccccgcuacgucaagcagaacacccucaagcucgccaccggcaugcgcaacguccccgagaagcagacccgcggcaucuucggcgccaucgccggcuucaucgagaacggcugggagggcauggucgacggcugguacggcuuccgccaccagaacuccgagggcaccggccaggccgccgaccucaaguccacccaggccgccaucgaccagaucaacggcaagcucaaccgccucaucgagaagaccaacgagaaguuccaccagaucgagaaggaguucuccgaggucgagggccgcauccaggaccucgagaaguacgucgaggacaccaagaucgaccucugguccuacaacgccggccuccucgucgcccucgagaaccagcacaccaucgaccucaccgacuccgagaugaacaagcucuucgagcgcacccgcaagcagcuccgcgagaacgccgaggacaugggcaacggcugcuucaagaucuaccacaagugcgacaacgccugcaucggcuccauccgcaacggcaccuacgaccacgacgucuaccgcgacgaggcccucaacaaccgcuuccagaucaagggcgucgagcucaaguccggcuacaaggacuggauccucuggaucuccuucgccaucuccugcuuccuccucugcgucgucucccucggcuucaucaugugggccugccagaagggcaacauccgcugcaacaucugcaucuga

SEQ ID NO: 97218 - RNA, 1701 nt, Artificial Sequence; identical to SEQ ID NO: 97102
  derived and/or modified CDS sequence (opt2) from hemagglutinin__InfluenzaA__ABI20925

SEQ ID NO: 97219 - RNA, 1701 nt, Artificial Sequence; identical to SEQ ID NO: 97102
  derived and/or modified CDS sequence (opt2) from hemagglutinin__InfluenzaA__ABI20936

SEQ ID NO: 97220 - RNA, 1701 nt, Artificial Sequence
  derived and/or modified CDS sequence (opt2) from hemagglutinin__InfluenzaA__ABI20947
augaagaccaucaucgcccucuccuacauccucugccucgucuucgcccagaagcuccccggcaacgacaacuccaccgccacccucugccucggccaccacgccguccccaacggcacccucgucaagaccaucaccaacgaccagaucgaggucaccaacgccaccgagcucguccaguccuccuccaccggccgcaucugcgacuccccccaccgcauccucgacggcaagaacugcacccucaucgacgcccuccucggcgacccccacugcgacggcuuccagaacaaggagugggaccucuucgucgagcgcuccaaggccuacuccaacugcuaccccuacgacguccccgacuacgccucccuccgcucccucgucgccuccuccggcacccucgaguucaucaacgaggacuucaacuggaccggcgucgcccaggacggcaaguccuacgccugcaagcgcggcuccgucaacuccuucuucucccgccucaacuggcuccacaagcucgaguacaaguaccccgcccucaacgucaccaugcccaacaacggcaaguucgacaagcucuacaucuggggcguccaccaccccuccaccgacuccgaccagaccucccucuacguccgcgccuccggccgcgucaccgucuccaccaagcgcucccagcagaccgucauccccaacaucggcuuccgccccuggguccgcggccucuccucccgcaucuccaucuacuggaccaucgucaagcccggcgacauccuccucaucaacuccaccggcaaccucaucgccccccgcggcuacuucaagauccgcaacggcaaguccuccaucaugcgcuccgacgcccccaucggcaacugcuccuccgagugcaucacccccaacggcuccauccccaacgacaagcccuuccagaacgucaaccgcaucaccuacggcgccugcccccgcuacgucaagcagaacacccucaagcucgccaccggcaugcgcaacguccccgagaagcagacccgcggcaucuucggcgccaucgccggcuucaucgagaacggcugggagggcauggucgacggcugguacggcuuccgccaccagaacuccgagggcaccggccaggccgccgaccucaaguccacccaggccgccaucgaccagaucaacggcaagcucaaccgccucaucgagaagaccaacgagaaguuccaccagaucgagcaggaguucuccgaggucgagggccgcauccaggaccucgagaaguacgucgaggacaccaagaucgaccucugguccuacaacgccggccuccucgucgcccucgagaaccagcacaccaucgaccucaccgacuccgagaugaacaagcucuucgagcgcacccgcaagcagcuccgcgagaacgccgaggacaugggcaacggcugcuucaagaucuaccacaagugcgacaacgccugcaucggcuccauccgcaacggcaccuacgaccacgacgucuaccgcgacgaggcccucaacaaccgcuuccagaucaagggcgucgagcucaaguccggcuacaaggacuggauccucuggaucuccuucgccaucuccugcuuccuccucugcgucguccuccucggcuucaucaugugggccugccagaagggcaacauccgcugcaacaucugcaucuga

SEQ ID NO: 97221 - RNA, 1701 nt, Artificial Sequence
  derived and/or modified CDS sequence (opt2) from hemagglutinin__InfluenzaA__ABI20958
augaagaccaucaucgcccucuccuacauccucugccucgucuucgcccagaagcuccccggcaacgacaacuccaccgccacccucugccucggccaccacgccguccccaacggcacccucgucaagaccaucaccaacgaccagaucgaggucaccaacgccaccgagcucguccaguccuccuccaccggccgcaucugcgacuccccccaccgcauccucgacggcaagaacugcacccucaucgacgcccuccucggcgacccccacugcgacggcuuccagaacaaggagugggaccucuucgucgagcgcuccaaggccuacuccaacugcuaccccuacgacguccccgacuacgccucccuccgcucccucgucgccuccuccggcacccucgaguucaucaacgaggacuucaacuggaccggcgucgcccaggacggcaaguccuacgccugcaagcgcggcuccgucaacuccuucuucucccgccucaacuggcucuacaagcucgaguacaaguaccccgcccucaacgucaccaugcccaacaacggcaaguucgacaagcucuacaucuggggcguccaccaccccuccaccgacuccgaccagaccucccucuacguccgcgccuccggccgcgucaccgucuccaccaagcgcucccagcagaccgucauccccaacaucggcuuccgccccuggguccgcggccucuccucccgcaucuccaucuacuggaccaucgucaagcccggcgacauccuccucaucaacuccaccggcaaccucaucgccccccgcggcuacuucaagauccgcaacggcaaguccuccaucaugcgcuccgacgcccccaucggcaacugcuccuccgagugcaucacccccaacggcuccauccccaacgacaagcccuuccagaacgucaaccgcaucaccuacggcgccugcccccgcuacgucaagcagaacacccucaagcucgccaccggcaugcgcaacguccccgagaagcagacccgcggcaucuucggcgccaucgccggcuucaucgagaacggcugggagggcauggucgacggcugguacggcuuccgccaccagaacuccgagggcaccggccaggccgccgaccucaaguccacccaggccgccaucgaccagaucaacggcaagcucaaccgccucaucgagaagaccaacgagaaguuccaccagaucgagaaggaguucuccgaggucgagggccgcauccaggaccucgagaaguacgucgaggacaccaagaucgaccucugguccuacaacgccggccuccucgucgcccucgagaaccagcacaccaucgaccucaccgacuccgagaugaacaagcucuucgagcgcacccgcaagcagcuccgcgagaacgccgaggacaugggcaacggcugcuucaagaucuaccacaagugcgacaacgccugcaucggcuccauccgcaacggcaccuacgaccacgacgucuaccgcgacgaggcccucaacaaccgcuuccagaucaagggcgucgagcucaaguccggcuacaaggacuggauccucuggaucuccuucgccaucuccugcuuccuccucugcgucguccuccucggcuucaucaugugggccugccagaagggcaacauccgcugcaacaucugcaucuga

SEQ ID NO: 97222 - RNA, 1701 nt, Artificial Sequence
  derived and/or modified CDS sequence (opt2) from hemagglutinin__InfluenzaA__ABI20969
augaagaccaucaucgcccucuccuacauccucugccucgucuucgcccagaagcuccccgucaacgacaacuccaccgccacccucugccucggccaccacgccguccccaacggcacccucgucaagaccaucaccaacgaccacaucgaggucaccaacgccaccgagcucguccaguccuccuccaccggccgcaucugcgacuccccccaccagauccucgacggcgagaacugcacccucaucgacgcccuccucggcgacccccacugcgacggcuuccagaacaaggaguggaaccucuucgucgagcgcuccaccgccuacuccaacugcuaccccuacgacguccccgacuacgccucccuccgcucccucgucgccuccuccggcacccucgaguucaacaacgaguccuucaacuggaccggcgucgcccagaacggcaccuccuccgccugcaagcgccgcuccaucaaguccuucuucucccgccucaacuggcuccaccagcucaaguacaaguaccccgcccucaacgucaccaugcccaacaacgagaaguucgacaagcucuacaucuggggcguccaccaccccuccaccgacuccgaccagaucucccucuacgcccaggccuccggccgcgucaccgucuccaccaagcgcucccagcagaccgucauccccaacaucggcucccgccccuggguccgcggcgucuccucccgcaucuccaucuacuggaccaucgucaagcccggcgacauccuccucaucaacuccaccggcaaccucaucgccccccgcggcuacuucaagauccgcuccggcaaguccuccaucaugcgcuccaacgcccccaucggcaagugcaacuccgagugcaucacccccaacggcuccauccccaacgacaagcccuuccagaacgucaaccgcaucaccuacggcgccugcccccgcuacgucaagcagaacacccucaagcucgccaccggcaugcgcaacguccccgagaagcagacccgcggcaucuucggcgccaucgccggcuucaucgagaacggcugggagggcauggucgacggcugguacggcuuccgccaccagaacuccgagggcaccggccaggccgccgaccucaaguccacccaggccgccaucaaccagaucaacggcaagcucaaccgccucaucgagaagaccaacgagaaguuccaccagaucgagaaggaguucuccgaggucgagggccgcauccaggaccucgagaaguacgucgaggacaccaagaucgaccucugguccuacaacgccgagcuccucgucgcccucgagaaccagcacaccaucgaccucaccgacuccgagaugaacaagcucuucgagcgcacccgcaagcagcuccgcgagaacgccgaggacaugggcaacggcugcuucaagaucuaccacaagugcgacaacgccugcaucggcuccauccgcaacggcaccuacgaccacgacgucuaccgcgacgaggcccucaacaaccgcuuccagaucaagggcgucgagcucaaguccggcuacaaggacuggauccucuggaucuccuucgccaucuccugcuuccuccucugcgucguccuccucggcuucaucaugugggccugccagaagggcaacauccgcugcaacaucugcaucuga

SEQ ID NO: 97223 - RNA, 1701 nt, Artificial Sequence
  derived and/or modified CDS sequence (opt2) from hemagglutinin__InfluenzaA__ABI20980
augaagaccaucaucgcccucuccuacauccucugccucgucuucgcccagaagcuccccgucaacgacaacuccaccgccacccucugccucggccaccacgccguccccaacggcacccucgucaagaccaucaccaacgaccacaucgaggucaccaacgccaccgagcucguccaguccuccuccaccggccgcaucugcgacuccccccaccagauccucgacggcgagaacugcacccucaucgacgcccuccucggcgacccccacugcgacggcuuccagaacaaggagugggaccucuucgucgagcgcuccaccgccuacuccaacugcuaccccuacgacguccccgacuacgccucccuccgcucccucgucgccuccuccggcacccucgaguucaacaacgaguccuucaacuggaccggcgucgaccagaacggcaccuccuccgccugcaagcgccgcuccaccaaguccuucuucucccgccucaacuggcuccaccagcucaaguacaaguaccccgcccucaacgucaccaugcccaacaacgagaaguucgacaagcucuacaucuggggcguccaccaccccuccaccgacuccgaccagaucucccucuacgcccaggccuccggccgcgucaccgucuccaccaagcgcucccagcagaccgucacccccaacaucggcucccgccccuggguccgcggcgucuccucccgcaucuccaucuacuggaccaucgucaagcccggcgacauccuccucaucaacuccaccggcaaccucaucgccccccgcggcuacuucaagauccgcuccggcaaguccuccaucaugcgcuccaacgcccucaucggcaagugcaacuccgagugcaucacccccaacggcuccauccccaacgacaagcccuuccagaacgucaaccgcaucaccuacggcgccugcccccgcuacgucaagcagaacacccucaagcucgccaccggcaugcgcaacguccccgagaagcagacccgcggcaucuucggcgccaucgccggcuucaucgagaacggcugggagggcauggucgacggcugguacggcuuccgccaccagaacuccgagggcaccggccaggccgccgaccucaaguccacccaggccgccaucaaccagaucaacggcaagcucaaccgccucaucgagaagaccaacgagaaguuccaccagaucgagaaggaguucuccgaggucgagggccgcauccaggaccucgagaaguacgucgaggacaccaagaucgaccucugguccuacaacgccgagauccucgucgcccucgagaaccagcacaccaucgaccucaccgacuccgagaugaacaagcucuucgagcgcacccgcaagcagcuccgcgagaacgccgaggacaugggcaacggcugcuucaagaucuaccacaagugcgacaacgccugcaucggcuccauccgcaacggcaccuacgaccacgacgucuaccgcgacgaggcccucaacaaccgcuuccagaucaagggcgucgagcucaaguccggcuacaaggacuggauccucuggaucuccuucgccaucuccugcuuccuccucugcgucguccuccucggcuucaucaugugggccugccagaagggcaacauccgcugcaacaucugcaucuga

SEQ ID NO: 97224 - RNA, 1701 nt, Artificial Sequence
  derived and/or modified CDS sequence (opt2) from hemagglutinin__InfluenzaA__ABI20991
augaagaccaucaucgcccucuccuacauccucugccucgucuucgcccagaagcuccccggcaacgacaacuccaccgccacccucugccucggccaccacgccguccccaacggcacccucgucaagaccaucaccaacgaccagaucgaggucaccaacgccaccgagcucguccaguccuccuccaccggcggcaucugcgacuccccccaccagauccucgacggcgagaacugcacccucaucgacgcccuccucggcgacccccacugcgacggcuuccagaacaaggagugggaccucuucgucgagcgcuccaaggccuacuccaacugcuaccccuacgacguccccgacuacgccucccuccgcucccucgucgccuccuccggcacccucgaguucaacaacgaguccuucaacuggaccggcgucgcccagaacggcaccuccuccgccugcaagcgccgcuccaacaaguccuucuucucccgccucaacuggcuccaccagcucaaguacaaguaccccgcccucaacgucaccaugcccaacaacgagaaguucgacaagcucuacaucuggggcguccaccaccccuccaccgacuccgaccagaucucccucuacgcccaggcccccggccgcgucaccgucuccaccaagcgcucccagcagaccgucauccccaacaucggcucccgccccuggguccgcggcgucuccucccgcaucuccaucuacuggaccaucgucaagcccggcgacauccuccucaucaacugcaccggcaaccucaucgccccccgcggcuacuucaagauccgcuccggcaaguccuccaucaugcgcuccgacgccuccaucggcaagugcaacuccgagugcaucacccccaacggcuccauccccaacgacaagcccuuccagaacgucaaccgcaucaccuacggcgccugcccccgcuacgucaagcagaacacccucaagcucgccaccggcaugcgcaacguccccgagaagcagacccgcggcaucuucggcgccaucgccggcuucaucgagaacggcugggagggcauggucgacggcugguacggcuuccgccaccagaacuccgagggcaccggccaggccgccgaccucaaguccacccaggccgccaucaaccagaucaacggcaagcucaaccgccucaucgagaagaccaacgagaaguuccaccagaucgagaaggaguucuccgaggucgagggccgcauccaggaccucgagaaguacgucgaggacaccaagaucgaccucugguccuacaacgccgagcuccucgucgcccucgagaaccagcacaccaucgaccucaccgacuccgagaucaacaagcucuucgagcgcaccaagaagcagcuccgcgagaacgccgaggacaugggcaacggcugcuucaagaucuaccacaagugcgacaacgccugcaucggcuccauccgcaacggcaccuacgaccacgacgucuaccgcgacgaggcccucaacaaccgcuuccagaucaagggcgucgagcucaaguccggcuacaaggacuggauccucuggaucuccuucgccaucuccugcuuccuccucugcgucguccuccucggcuucaucaugugggccugccagaagggcaacauccgcugcaacaucugcaucuga

SEQ ID NO: 97225 - RNA, 1701 nt, Artificial Sequence; identical to SEQ ID NO: 96746
  derived and/or modified CDS sequence (opt2) from hemagglutinin__InfluenzaA__ABI21002

SEQ ID NO: 97226 - RNA, 1701 nt, Artificial Sequence; identical to SEQ ID NO: 97190
  derived and/or modified CDS sequence (opt2) from hemagglutinin__InfluenzaA__ABI21013

SEQ ID NO: 97227 - RNA, 1701 nt, Artificial Sequence; identical to SEQ ID NO: 96676
  derived and/or modified CDS sequence (opt2) from hemagglutinin__InfluenzaA__ABI21024

SEQ ID NO: 97228 - RNA, 1701 nt, Artificial Sequence; identical to SEQ ID NO: 96552
  derived and/or modified CDS sequence (opt2) from hemagglutinin__InfluenzaA__ABI21035

SEQ ID NO: 97229 - RNA, 1701 nt, Artificial Sequence
  derived and/or modified CDS sequence (opt2) from hemagglutinin__InfluenzaA__ABI21046
augaagaccaucaucgcccucuccuacauccucugccucgucuucgcccagaagcuccccggcaacgacaacuccaccgccacccucugccucggccaccacgccguccccaacggcaccaucgucaagaccaucaccaacgaccagaucgaggucaccaacgccaccgagcucguccaguccuccuccaccggcggcaucugcgacuccccccaccagauccucgacggcgagaacugcacccucaucgacgcccuccucggcgacccccagugcgacggcuuccagaacaagaagugggaccucuucgucgagcgcuccaaggccuacuccaacugcuaccccuacgacguccccgaccacgccucccuccgcucccucgucgccuccuccggcacccucgaguucaacaacgaguccuucgacuggaccggcgucacccagaacggcaccuccuccgccugcaagcgccgcuccaacaaguccuucuucucccgccucaacuggcucacccaccucaaguacaaguaccccgcccucaacgucaccaugcccaacaacgagaaguucgacaagcucuacaucuggggcguccaccaccccggcaccgacaacgaccagaucucccucuacgcccaggccuccggccgcaucaccgucuccaccaagcgcucccagcagaccgucauccccaacaucggcucccgcccccgcguccgcgacgucuccucccgcaucuccaucuacuggaccaucgucaagcccggcgacauccuccucaucaacuccaccggcaaccucaucgccccccgcggcuacuucaagauccgcuccggcaaguccuccaucaugcgcuccgacgcccccaucggcaagugcaacuccgagugcaucacccccaacggcuccauccccaacgacaagcccuuccagaacgucaaccgcaucaccuacggcgccugcccccgcuacgucaagcagaacacccucaagcucgccaccggcaugcgcaacguccccgagaagcagacccgcggcaucuucggcgccaucgccggcuucaucgagaacggcugggagggcauggucgacggcugguacggcuuccgccaccagaacuccgagggcaccggccaggccgccgaccucaaguccacccaggccgccaucaaccagaucaacggcaagcucaaccgccucaucggcaagaccaacgagaaguuccaccagaucgagaaggaguucuccgaggucgagggccgcauccaggaccucgagaaguacgucgaggacaccaagaucgaccucugguccuacaacgccgagcuccucgucgcccucgagaaccagcacaccaucgaccucaccgacuccgagaugaacaagcucuucgagcgcaccaagaagcagcuccgcgagaacgccgaggacaugggcaacggcugcuucaagaucuaccacaagugcgacaacgccugcaucggcuccauccgcaacggcaccuacgaccacgacgucuaccgcgacgaggcccucaacaaccgcuuccagaucaagggcgucgagcucaaguccggcuacaaggacuggauccucuggaucuccuucgccaucuccugcuuccuccucugcgucgcccuccucggcuucaucaugugggccugccagaagggcaacauccgcugcaacaucugcaucuga

SEQ ID NO: 97230 - RNA, 1701 nt, Artificial Sequence
  derived and/or modified CDS sequence (opt2) from hemagglutinin__InfluenzaA__ABI21057
augaagaccaucaucgcccucuccuacauccucugccucgucuucgcccagaagcuccccggcaacgacaacuccaccgccacccucugccucggccaccacgccguccccaacggcaccaucgucaagaccaucaccaacgaccagaucgaggucaccaacgccaccgagcucguccagaacuccuccaccggcggcaucugcgacuccccccaccagauccucgacggcgagaacugcacccucaucgacgcccuccucggcgacccccagugcgacggcuuccagaacaagaagugggaccucuucgucgagcgcuccaaggccuacuccaacugcuaccccuacgacguccccgaccacgccucccuccgcucccucgucgccuccuccggcacccucgaguucaacaacgaguccuucgacuggaccggcgucacccagaacggcaccuccuccgccugcaagcgccgcuccaacaaguccuucuucucccgccucaacuggcucacccaccucaaguacaaguaccccgcccucaacgucaccaugcccaacaacgagaaguucgacaagcucuacaucuggggcguccaccaccccggcaccgacuccgaccagaucucccucuacgcccaggccuccggccgcaucaccgucuccaccaagcgcucccagcagaccgucauccccaacaucggcucccgcccccgcguccgcgacgucuccucccgcaucuccaucuacuggaccaucgucaagcccggcgacauccuccucaucaacuccaccggcaaccucaucgccccccgcggcuacuucaagauccgcuccggcaaguccuccaucaugcgcuccgacgcccccaucggcaagugcaacuccgagugcaucacccccaacggcuccauccccaacgacaagcccuuccagaacgucaaccgcaucaccuacggcgccugcccccgcuacgucaagcagaacacccucaagcucgccaccggcaugcgcaacguccccgagaagcagacccgcggcaucuucggcgccaucgccggcuucaucgagaacggcugggagggcauggucgacggcugguacggcuuccgccaccagaacuccgagggcaccggccaggccgccgaccucaaguccacccaggccgccaucaaccagaucaacggcaagcucaaccgccucaucggcaagaccaacgagaaguuccaccagaucgagaaggaguucuccgaggucgagggccgcauccaggaccucgagaaguacgucgaggacaccaagaucgaccucugguccuacaacgccgagcuccucgucgcccucgagaaccagcacaccaucgaccucaccgacuccgagaugaacaagcucuucgagcgcaccaagaagcagcuccgcgagaacgccgaggacaugggcaacggcugcuucaagaucuaccacaagugcgacaacgccugcaucggcuccauccgcaacggcaccuacgaccacgacgucuaccgcgacgaggcccucaacaaccgcuuccagaucaagggcgucgagcucaaguccggcuacaaggacuggauccucuggaucuccuucgccaucuccugcuuccuccucugcgucgcccuccucggcuucaucaugugggccugccagaagggcaacauccgcugcaacaucugcaucuga

SEQ ID NO: 97231 - RNA, 1701 nt, Artificial Sequence; identical to SEQ ID NO: 96279
  derived and/or modified CDS sequence (opt2) from hemagglutinin__InfluenzaA__ABI21068

SEQ ID NO: 97232 - RNA, 1701 nt, Artificial Sequence; identical to SEQ ID NO: 96318
  derived and/or modified CDS sequence (opt2) from hemagglutinin__InfluenzaA__ABI21079

SEQ ID NO: 97233 - RNA, 1701 nt, Artificial Sequence; identical to SEQ ID NO: 97149
  derived and/or modified CDS sequence (opt2) from hemagglutinin__InfluenzaA__ABI21090

SEQ ID NO: 97234 - RNA, 1701 nt, Artificial Sequence; identical to SEQ ID NO: 97149
  derived and/or modified CDS sequence (opt2) from hemagglutinin__InfluenzaA__ABI21101

SEQ ID NO: 97235 - RNA, 1701 nt, Artificial Sequence
  derived and/or modified CDS sequence (opt2) from hemagglutinin__InfluenzaA__ABI21123
augaagaccaucaucgcccucuccuacauccucugccucgucuucgcccagaagcuccccggcaacgacaacuccaccgccacccucugccucggccaccacgccguccccaacggcaccaucgucaagaccaucaccaacgaccagaucgaggucaccaacgccaccgagcucguccaguccuccuccaccggcggcaucugcgacuccccccaccagauccucgacggcgagaacugcacccucaucgacgcccuccucggcgacccccagugcgacggcuuccagaacaagaagugggaccucuucgucgagcgcuccaaggccuacuccaacugcuaccccuacgacguccccgacuacgccucccuccgcucccucgucgccuccuccggcacccucgaguucaacaacgaguccuucaacuggaccggcgucacccagaacggcaccuccuccgccugcaagcgccgcuccaacaacuccuucuucucccgccucaacuggcucacccaccucaaguucaaguaccccgcccucaacgucaccaugcccaacaacgagaaguucgacaagcucuacaucuggggcguccaccaccccggcaccaacaacgaccagaucucccucuacgcccaggccuccggccgcaucaccgucuccaccaagcgcucccagcagaccgucauccccaacaucggcucccgcccccgcguccgcgacauccccucccgcaucuccaucuacuggaccaucgucaagcccggcgacauccuccucaucaacuccaccggcaaccucaucgccccccgcggcuacuucaagauccgcuccggcaaguccuccaucaugcgcuccgacgcccccaucggcaagugcaacuccgagugcaucacccccaacggcuccauccccaacgacaagcccuuccagaacgucaaccgcaucaccuacggcgccugcccccgcuacgucaagcagaacacccucaagcucgccaccggcaugcgcaacguccccgagaagcagacccgcggcaucuucggcgccaucgccggcuucaucgagaacggcugggagggcauggucgacggcugguacggcuuccgccaccagaacuccgagggcaucggccaggccgccgaccucaaguccacccaggccgccaucaaccagaucaacggcaagcucaaccgccucaucggcaagaccaacgagaaguuccaccagaucgagaaggaguucuccgaggucgagggccgcauccaggaccucgagaagcacgucgaggacaccaagaucgaccucugguccuacaacgccgagcuccucgucgcccucgagaaccagcacaccaucgaccucaccgacuccgagaugaacaagcucuucgagcgcaccaagaagcagcuccgcgagaacgccgaggacaugggcaacggcugcuucaagaucuaccacaagugcgacaacgccugcaucggcuccauccgcaacggcaccuacgaccacgacgucuaccgcgacgaggcccucaacaaccgcuuccagaucaagggcgucgagcucaaguccggcuacaaggacuggauccucuggaucuccuucgccaucuccugcuuccuccucugcgucgcccuccucggcuucaucaugugggccugccagaagggcaacauccgcugcaacaucugcaucuga

SEQ ID NO: 97236 - RNA, 1701 nt, Artificial Sequence
  derived and/or modified CDS sequence (opt2) from hemagglutinin__InfluenzaA__ABI21134
augaagaccaucaucgcccucuccuacauccucugccucgucuucgcccagaagcuccccggcaacgacaacuccaccgccacccucugccucggccaccacgccguccccaacggcaccgucgucaagaccaucaccaacgaccagaucgaggucaccaacgccaccgagcucguccaguccuccuccaccggcggcaucugcgacuccccccaccagauccucgacggcgagaacugcacccucauggacgcccuccucggcgacccccagugcgacggcuuccagaacaagaagugggaccucuucgucgagcgcuccaaggccuacuccaacugcuaccccuacgacguccccgacuacgccucccuccgcucccucgucgccuccuccggcacccucgaguucaacaacgaguccuucaacuggaccggcgucacccagaacggcaccuccuccgccugcaagcgccgcuccaacaacuccuucuucucccgccucaacuggcucacccaccucaaguucaaguaccccgcccucaacgucaccaugcccaacaacgagaaguucgacaagcucuacaucuggggcguccaccaccccggcaccgacaacgaccagaucucccucuacgcccaggccuccggccgcaucaccgucuccaccaagcgcucccagcagaccgucauccccaacaucggcucccgcucccgcguccgcgacauccccucccgcaucuccaucuacuggaccaucgucaagcccggcgacauccuccucaucaacuccaccggcaaccucaucgccccccgcggcuacuucaagauccgcuccggcaaguccuccaucaugcgcuccgacgcccccaucggcaagugcaacuccgagugcaucacccccaacggcuccauccccaacgacaagcccuuccagaacgucaaccgcaucaccuacggcgccugcccccgcuacgucaagcagaacacccucaagcucgccaccggcaugcgcaacguccccgagaagcagacccgcggcaucuucggcgccaucgccggcuucaucgagaacggcugggagggcauggucgacggcugguacggcuuccgccaccagaacuccgagggcaccggccaggccgccgaccucaaguccacccaggccgccaucaaccagaucaacggcaagcucaaccgccucaucggcaagaccaacgagaaguuccaccagaucgagaaggaguucuccgaggucgagggccgcauccaggaccucgagaaguacgucgaggacaccaagaucgaccucugguccuacaacgccgagcuccucgucgcccucgagaaccagcacaccaucgaccucaccgacuccgagaugaacaagcucuucgagcgcaccaagaagcagcuccgcgagaacgccgaggacaugggcaacggcugcuucaagaucuaccacaagugcgacaacgccugcaucggcuccauccgcaacggcaccuacgaccacgacgucuaccgcgacgaggcccucaacaaccgcuuccagaucaagggcgucgagcucaaguccggcuacaaggacuggauccucuggaucuccuucgccaucuccugcuuccuccucugcgucgcccuccucggcuucaucaugugggccugccagaagggcaacauccgcugcaacaucugcaucuga

SEQ ID NO: 97237 - RNA, 1701 nt, Artificial Sequence; identical to SEQ ID NO: 96318
  derived and/or modified CDS sequence (opt2) from hemagglutinin__InfluenzaA__ABI21156

SEQ ID NO: 97238 - RNA, 1701 nt, Artificial Sequence
  derived and/or modified CDS sequence (opt2) from hemagglutinin__InfluenzaA__ABI21167
augaagaccaucaucgcccucggcuacauccucugccucgucuucgcccagaagcuccccggcaacgacaacuccaccgccacccucugccucggccaccacgccguccccaacggcaccaucgucaagaccaucaccaacgaccagaucgaggucaccaacgccaccgagcucguccaguccuccuccaccggcggcaucugcgacuccccccaccagauccucgacggcgagaacugcacccucaucgacgcccuccucggcgacccccagugcgacggcuuccagaacaagaagugggaccucuucgucgagcgcuccaaggccuacuccaacugcuaccccuacgacguccccgacuacgccucccuccgcucccucgucgccuccuccggcacccucgaguucaacaacgaguccuucaacuggaccggcgucacccagaacggcaccuccuccgccugcaagcgccgcuccaacaacuccuucuucucccgccucaacuggcucacccaccucaaguucaaguaccccgcccucaacgucaccaugcccaacaacgagaaguucgacaagcucuacaucuggggcguccaccaccccggcaccaacaacgaccagaucucccucuacgcccaggccuccggccgcaucaccgucuccaccaagcgcucccagcagaccgucauccccaacaucggcucccgcccccgcguccgcgacauccccucccgcaucuccaucuacuggaccaucgucaagcccggcgacauccuccucaucaacuccaccggcaaccucaucgccccccgcggcuacuucaagauccgcuccggcaaguccuccaucaugcgcuccgacgcccccaucggcaagugcaacuccgagugcaucacccccaacggcuccauccccaacgacaagcccuuccagaacgucaaccgcaucaccuacggcgccugcccccgcuacgucaagcagaacacccucaagcucgccaccggcaugcgcaacguccccgagaagcagacccgcggcaucuucggcgccaucgccggcuucaucgagaacggcugggagggcauggucgacggcugguacggcuuccgccaccagaacuccgagggcaucggccaggccgccgaccucaaguccacccaggccgccaucaaccagaucaacggcaagcucaaccgccucaucggcaagaccaacgagaaguuccaccagaucgagaaggaguucuccgaggucgagggccgcauccaggaccucgagaaguacgucgaggacaccaagaucgaccucugguccuacaacgccgagcuccucgucgcccucgagaaccagcacaccaucgaccucaccgacuccgagaugaacaagcucuucgagcgcaccaagaagcagcuccgcgagaacgccgaggacaugggcaacggcugcuucaagaucuaccacaagugcgacaacgccugcaucggcuccauccgcaacggcaccuacgaccacgaggucuaccgcgacgaggcccucaacaaccgcuuccagaucaagggcgucgagcucaaguccggcuacaaggacuggauccucuggaucuccuucgccaucuccugcuuccuccucugcgucgcccuccucggcuucaucaugugggccugccagaagggcaacauccgcugcaacaucugcaucuga

SEQ ID NO: 97239 - RNA, 1701 nt, Artificial Sequence
  derived and/or modified CDS sequence (opt2) from hemagglutinin__InfluenzaA__ABI21178
augaagaccaucaucgcccucuccuacauccucugccucgucuucgcccagaagcuccccggcaacgacaacuccaccgccacccucugccucggccaccacgccguccccaacggcaccaucgucaagaccaucaccaacgaccagaucgaggucaccaacgccaccgagcucguccaguccuccuccaccggcggcaucugcgacuccccccaccagauccucgacggcgagaacugcacccucaucgacgcccuccucggcgacccccagugcgacggcuuccagaacaagaagugggaccucuucgucgagcgcuccaaggccuacuccuccugcuaccccuacgacguccccgacuacgccucccuccgcucccucgucgccuccuccggcacccucgaguucaacaacgaguccuucaacuggaccggcgucacccagaacggcaccuccuccgccugcaagcgccgcuccaacaacuccuucuucucccgccucaacuggcucacccaccucaaguucaaguaccccgcccucaacgucaccaugcccaacaacgagaaguucgacaagcucuacaucuggggcguccaccaccccggcaccaacaacgaccagaucucccucuacgcccaggccuccggccgcaucaccgucuccaccaagcgcucccagcagaccgucauccccaacaucggcucccgcccccgcguccgcgacauccccucccgcaucuccaucuacuggaccaucgucaagcccggcgacauccuccucaucaacuccaccggcaaccucaucgccccccgcggcuacuucaagauccgcuccggcaaguccuccaucaugcgcuccgacgcccccaucggcaagugcaacuccgagugcaucacccccaacggcuccauccccaacgacaagcccuuccagaacgucaaccgcaucaccuacggcgccugcccccgcuacgucaagcagaacacccucaagcucgccaccggcaugcgcaacguccccgagaagcagacccgcggcaucuucggcgccaucgccggcuucaucgagaacggcugggagggcauggucgacggcugguacggcuuccgccaccagaacuccgagggcaucggccaggccgccgaccucaaguccacccaggccgccaucaaccagaucaacggcaagcucaaccgccucaucggcaagaccaacgagaaguuccaccagaucgagaaggaguucuccgaggucgagggccgcauccaggaccucgagaaguacgucgaggacaccaagaucgaccucugguccuacaacgccgagcuccucgucgcccucgagaaccagcacaccaucgaccucaccgacuccgagaugaacaagcucuucgagcgcaccaagaagcagcuccgcgagaacgccgaggacaugggcaacggcugcuucaagaucuaccacaagugcgacaacgccugcaucggcuccauccgcaacggcaccuacgaccacgacgucuaccgcgacgaggcccucaacaaccgcuuccagaucaagggcgucgagcucaaguccggcuacaaggacuggauccucuggaucuccuucgccaucuccugcuuccuccucugcgucgcccuccucggcuucaucaugugggccugccagaagggcaacauccgcugcaacaucugcaucuga

SEQ ID NO: 97240 - RNA, 1698 nt, Artificial Sequence
  derived and/or modified CDS sequence (opt2) from hemagglutinin__InfluenzaA__ABI21200
augaaggucaagcuccucguccuccucugcaccuucaccgccaccuacgccgacaccaucugcaucggcuaccacgccaacaacuccaccgacaccgucgacaccguccucgagaagaacgucaccgucacccacuccgucaaccuccucgaggacucccacaacggcaagcucugccuccucaagggcaucgccccccuccagcucggcaacugcuccgucgccggcuggauccucggcaaccccgagugcgagcuccucaucuccaaggaguccugguccuacaucgucgagacccccaaccccgagaacggcaccugcuaccccggcuacuucgccgacuacgaggagcuccgcgagcagcucuccuccgucuccuccuucgagcgcuucgagaucuuccccaaggaguccuccuggcccaaccacaccgucaccggcgucuccgccuccugcucccacaacggcaaguccuccuucuaccgcaaccuccucuggcucaccggcaagaacggccucuaccccaaccucuccaaguccuacgccaacaacaaggagaaggagguccucguccucuggggcguccaccacccccccaacaucggcgaccagcgcgcccucuaccacaccgagaacgccuacgucuccgucgucuccucccacuacucccgccgcuucacccccgagaucgccaagcgccccaagguccgcgaccaggagggccgcaucaacuacuacuggacccuccucgagcccggcgacaccaucaucuucgaggccaacggcaaccucaucgccccccgcuucgccuucgcccucucccgcggcuucggcuccggcaucaucaccuccaacgcccccauggacgagugcgacgccaagugccagaccccccagggcgccaucaacuccucccuccccuuccagaacguccaccccgucaccaucggcgagugccccaaguacguccgcuccgccaagcuccgcauggucaccggccuccgcaacauccccuccauccagucccgcggccucuucggcgccaucgccggcuucaucgagggcggcuggaccggcauggucgacggcugguacggcuaccaccaccagaacgagcagggcuccggcuacgccgccgaccagaaguccacccagaacgccaucaacggcaucaccaacaaggucaacuccgucaucgagaagaugaacacccaguucaccgccgucggcaaggaguucaacaagcucgagcgccgcauggagaaccucaacaagaaggucgacgacggcuuccucgacaucuggaccuacaacgccgagcuccucguccuccucgagaacgagcgcacccucgacuuccacgacuccaacgucaagaaccucuacgagaaggucaagucccagcucaagaacaacgccaaggagaucggcaacggcugcuucgaguucuaccacaagugcaacgacgagugcauggaguccgucaagaacggcaccuacgacuaccccaaguacuccgaggaguccaagcucaaccgcgagcgcaucgacggcgucaagcucgaguccaugggcgucuaccagauccucgccaucuacuccaccgucgccuccucccucguccuccucgucucccucggcgccaucuccuucuggaugugcuccaacggcucccuccagugccgcaucugcaucuga

SEQ ID NO: 97241 - RNA, 1698 nt, Artificial Sequence; identical to SEQ ID NO: 97240
  derived and/or modified CDS sequence (opt2) from hemagglutinin__InfluenzaA__ABI21211

SEQ ID NO: 97242 - RNA, 1698 nt, Artificial Sequence
  derived and/or modified CDS sequence (opt2) from hemagglutinin__InfluenzaA__ABI21233
augaaggucaagcuccucguccuccucugcaccuucaccgccaccuacgccgacaccaucugcaucggcuaccacgccaacaacuccaccgacaccgucgacaccguccucgagaagaacgucaccgucacccacuccgucaaccuccucgaggacucccacaacggcaagcucugccuccucaagggcaucgccccccuccagcucggcaacugcuccgucgccggcuggauccucggcaaccccgagugcgagcuccucaucuccaaggaguccugguccuacaucgucgagacccccaaccccgagaacggcaccugcuaccccggcuacuucgccgacuacgaggagcuccgcgagcagcucaacuccgucuccuccuucgagcgcuucgagaucuuccccaaggaguccuccuggcccaaccacaccgucaccggcgucuccgccuccugcucccacaacggcaaguccuccuucuaccgcaaccuccucuggcucaccggcaagaacggccucuaccccaaccucuccaaguccuacgccaacaacaaggagaaggagguccucguccucuggggcguccaccacccccccaacaucggcgaccagcgcgcccucuaccacaccgagaacgccuacgucuccgucgucuccucccacuacucccgccgcuucacccccgagaucgccaagcgccccaagguccgcgaccaggagggccgcaucaacuacuacuggacccuccucgagcccggcgacaccaucaucuucgaggccaacggcaaccucaucgccccccgcuucgccuucgcccucucccgcggcuucggcuccggcaucaucaccuccaacgcccccauggacgagugcgacgccaagugccagaccccccagggcgccaucaacuccucccuccccuuccagaacguccaccccgucaccaucggcgagugccccaaguacguccgcuccgccaagcuccgcauggucaccggccuccgcaacauccccuccauccagucccgcggccucuucggcgccaucgccggcuucaucgagggcggcuggaccggcauggucgacggcugguacggcuaccaccaccagaacgagcagggcuccggcuacgccgccgaccagaaguccacccagaacgccaucaacggcaucaccaacaaggucaacuccgucaucgagaagaugaacacccaguucaccgccgucggcaaggaguucaacaagcucgagcgccgcauggagaaccucaacaagaaggucgacgacggcuuccucgacaucuggaccuacaacgccgagcuccucguccuccucgagaacgagcgcacccucgacuuccacgacuccaacgucaagaaccucuacgagaaggucaagucccagcucaagaacaacgccaaggagaucggcaacggcugcuucgaguucuaccacaagugcaacgacgagugcauggaguccgucaagaacggcaccuacgacuaccccaaguacuccgaggaguccaagcucaaccgcgagcgcaucgacggcgucaagcucgaguccaugggcgucuaccagauccucgccaucuacuccaccgucgccuccucccucguccuccucgucucccucggcgccaucuccuucuggaugugcuccaacggcucccuccagugccgcaucugcaucuga

SEQ ID NO: 97243 - RNA, 1701 nt, Artificial Sequence
  derived and/or modified CDS sequence (opt2) from hemagglutinin__InfluenzaA__ABI21244
augaagaccaucaucgcccucuccuacauccucugccucgucuucgcccagaagcuccccggcaacgacaacuccaccgccacccucugccucggccaccacgccguccccaacggcacccucgucaagaccaucaccaacgaccagaucgaggucaccaacgccaccgagcucguccaguccuccuccaccggccgcaucugcgacuccccccaccgcauccucgacggcaagaacugcacccucaucgacgcccuccucggcgacccccacugcgacggcuuccagaacaaggagugggaccucuucgucgagcgcuccaaggccuacuccaacugcuaccccuacgacguccccgacuacgccucccuccgcucccucgucgccuccuccggcacccucaaguucaucaacgaggacuucaacuggaccggcgucgcccaggacggcaaguccuacgccugcaagcgcggcuccgucaacuccuucuucucccgccucaacuggcuccacaagcucgaguacaaguaccccgcccucaacgucaccaugcccaacaacggcaaguucgacaagcucuacaucuggggcguccaccaccccuccaccgacuccgaccagaccucccucuacguccgcgccuccggccgcgucaccgucuccaccaagcgcucccagcagaccgucauccccaacaucggcucccgccccuggguccgcggccucuccucccgcaucuccaucuacuggaccaucgucaagcccggcgacauccuccucaucaacuccaccggcaaccucaucgccccccgcggcuacuucaagauccgcuccggcaaguccuccaucaugcgcuccgacgcccccaucggcaacugcuccuccgagugcaucacccccaacggcuccauccccaacgacaagcccuuccagaacgucaaccgcaucaccuacggcgccugcccccgcuacgucaagcagaacacccucaagcucgccaccggcaugcgcaacguccccgagaagcagacccgcggcaucuucggcgccaucgccggcuucaucgagaacggcugggagggcauggucgacggcugguacggcuuccgccaccagaacuccgagggcaccggccaggccgccgaccucaaguccacccaggccgccaucgaccagaucaacggcaagcucaaccgccucaucgagaagaccaacgagaaguuccaccagaucgagaaggaguucuccgaggucgagggccgcauccaggaccucgagaaguacgucgaggacaccaagaucgaccucugguccuacaacgccgagcuccucgucgcccucgagaaccagcacaccaucgaccucaccgacuccgagaugaacaagcucuucgagcgcacccgcaagcagcuccgcgagaacgccgaggacaugggcaacggcugcuucaagaucuaccacaagugcgacaacgccugcaucggcuccauccgcaacggcaccuacgaccacgacgucuaccgcgacgaggcccucaacaaccgcuuccagaucaagggcgucgagcucaaguccggcuacaaggacuggauccucuggaucuccuucgccaucuccugcuuccuccucugcgucguccuccucggcuucaucaugugggccugccagaagggcaacauccgcugcaacaucugcaucuga

SEQ ID NO: 97244 - RNA, 1701 nt, Artificial Sequence; identical to SEQ ID NO: 97089
  derived and/or modified CDS sequence (opt2) from hemagglutinin__InfluenzaA__ABI21255

SEQ ID NO: 97245 - RNA, 1701 nt, Artificial Sequence; identical to SEQ ID NO: 97089
  derived and/or modified CDS sequence (opt2) from hemagglutinin__InfluenzaA__ABI21266

SEQ ID NO: 97246 - RNA, 1701 nt, Artificial Sequence; identical to SEQ ID NO: 97089
  derived and/or modified CDS sequence (opt2) from hemagglutinin__InfluenzaA__ABI21277

SEQ ID NO: 97247 - RNA, 1701 nt, Artificial Sequence
  derived and/or modified CDS sequence (opt2) from hemagglutinin__InfluenzaA__ABI21299
augaagaccaucaucgcccucuccuacauccucugccucgucuucgcccagaagcuccccggcaacgacaacuccaccgccacccucugccucggccaccacgccguccccaacggcacccucgucaagaccaucaccaacgaccagaucgaggucaccaacgccaccgagcucguccaguccuccuccaccggccgcaucugcgacuccccccaccgcauccucgacggcaagaacugcacccucaucgacgcccuccucggcgacccccacugcgacggcuuccagaacaaggagugggaccucuucgucgagcgcuccaaggccuacuccaacugcuaccccuacgacguccccgacuacgccucccuccgcucccucgucgccuccuccggcacccucgaguucaucaacgaggacuucaacuggaccggcgucgcccaggacggcaaguccuacgccugcaagcgcggcuccgucaacuccuucuucucccgccucaacuggcuccacaagcucgaguacaaguaccccgcccucaacgucaccaugcccaacaacgacaaguucgacaagcucuacaucuggggcguccaccaccccuccaccgacuccgaccagaccucccucuacguccgcgccuccggccgcgucaccgucuccaccaagcgcucccagcagaccgucauccccaacaucggcucccgccccuggguccgcggccucuccucccgcaucuccaucuacuggaccaucgucaagcccggcgacauccuccucaucaacuccaccggcaaccucaucgccccccgcggcuacuucaagauccgcaacggcaaguccuccaucaugcgcuccgacgcccccaucggcaacugcuccuccgagugcaucacccccaacggcuccauccccaacgacaagcccuuccagaacgucaaccgcaucaccuacggcgccugcccccgcuacgucaagcagaacacccucaagcucgccaccggcaugcgcaacguccccgagaagcagacccgcggcaucuucggcgccaucgccggcuucaucgagaacggcugggagggcauggucgacggcugguacggcuuccgccaccagaacuccgagggcaccggccaggccgccgaccucaaguccacccaggccgccaucgaccagaucaacggcaagcucaaccgccucaucgagaagaccaacgagaaguuccaccagaucgagaaggaguucuccgaggucgagggccgcauccaggaccucgagaaguacgucgaggacaccaagaucgaccucugguccuacaacgccgagcuccucgucgcccucgagaaccagcacaccaucgaccucaccgacuccgagaugaacaagcucuucgagcgcacccgcaagcagcuccgcgagaacgccgaggacaugggcaacggcugcuucaagaucuaccacaagugcgacaacgccugcaucggcuccauccgcaacggcaccuacgaccacgacgucuaccgcgacgaggcccucaacaaccgcuuccagaucaagggcgucgagcucaaguccggcuacaaggacuggauccucuggaucuccuucgccaucuccugcuuccuccucugcgucguccuccucggcuucaucaugugggccugccagaagggcaacauccgcugcaacaucugcaucuga

SEQ ID NO: 97248 - RNA, 1701 nt, Artificial Sequence; identical to SEQ ID NO: 97089
  derived and/or modified CDS sequence (opt2) from hemagglutinin__InfluenzaA__ABI21310

SEQ ID NO: 97249 - RNA, 1701 nt, Artificial Sequence
  derived and/or modified CDS sequence (opt2) from hemagglutinin__InfluenzaA__ABI21321
augaagaccaucaucgcccucuccuacauccucugccucgucuucgcccagaagcuccccggcaacgacaacuccaccgccacccucugccucggccaccacgccguccccaacggcacccucgucaagaccaucaccaacgaccagaucgaggucaccaacgccaccgagcucguccaguccuccuccaccggccgcaucugcgacuccccccaccgcauccucgacggcaagaacugcacccucaucgacgcccuccucggcgacccccacugcgacggcuuccagaacaaggagugggaccucuucgucgagcgcuccaaggccuacuccaacugcuaccccuacgacguccccgacuacgccucccuccgcucccucgucgccuccuccggcacccucgaguucaucaacgaggacuucaacuggaccggcgucgcccaggacggcaaguccuacgccugcaagcgcggcuccgucaacuccuucuucucccgccucaacuggcuccacaagcucgaguacaaguaccccgcccucaacgucaccaugcccaacaacggcaaguucgacaagcucuacaucuggggcguccaccaccccuccaccgacuccgaccagaccucccucuacguccgcgccuccggccgcgucaccgucuccaccaagcgcucccagcagaccgucauccccaacaucggcucccgccccuggguccgcggccucuccucccgcaucuccaucuacuggaccaucgucaagcccggcgacauccuccucaucaacuccaccggcaaccucaucgccccccgcggcuacuucaagauccgcaacggcaaguccuccaucaugcgcuccgacgcccccaucggcaacugcuccuccgagugcaucacccccaacggcuccauccccaacgacaagcccuuccagaacgucaaccgcaucaccuacggcgccugcccccgcuacgucaagcagaacacccucaagcucgccaccggcaugcgcaacguccccgagaagcagacccgcggcaucuucggcgccaucgccggcuucaucgagaacggcugggagggcauggucgacggcugguacggcuuccgccaccagaacuccgagggcaccggccaggccgccgaccucaaguccacccaggccgccaucgaccagaucaacggcaagcucaaccgccucaucgagaagaccaacgagaaguuccaccagaucgagaaggaguucuccgaggucgagggccgcauccaggaccucgagaaguacgucgaggacaccaagaucgaccucugguccuacaacgccgagcuccucgucgcccucgagaaccagcacaccaucgaccucaccgacuccgagaugaacaagcucuucgagaagacccgcaagcagcuccgcgagaacgccgaggacaugggcaacggcugcuucaagaucuaccacaagugcgacaacgccugcaucggcuccauccgcaacggcaccuacgaccacgacgucuaccgcgacgaggcccucaacaaccgcuuccagaucaagggcgucgagcucaaguccggcuacaaggacuggauccucuggaucuccuucgccaucuccugcuuccuccucugcgucguccuccucggcuucaucaugugggccugccagaagggcaacauccgcugcaacaucugcaucuga

SEQ ID NO: 97250 - RNA, 1701 nt, Artificial Sequence
  derived and/or modified CDS sequence (opt2) from hemagglutinin__InfluenzaA__ABI21332
augaagaccaucaucgcccucuccuacauccucugccucgucuucgcccagaagcuccccggcaacgacaacuccaccgccacccucugccucggccaccacgccguccccaacggcacccucgucaagaccaucaccaacgaccagaucgaggucaccaacgccaccgagcucguccaguccuccuccaccggccgcaucugcgacuccccccaccgcauccucgacggcaagaacugcacccucaucgacgcccuccucggcgacccccacugcgacggcuuccagaacaaggagugggaccucuucgucgagcgcuccaaggccuacuccaacugcuaccccuacgacguccccgacuacgccucccuccgcucccucgucgccuccuccggcacccucgaguucaucaacgaggacuucaacuggaccggcgucgcccaggacggcaaguccuacgccugcaagcgcggcuccgucaacuccuucuucucccgccucaacuggcuccacaagcucgaguacaaguaccccgcccucaacgucaccaugcccaacaacggcaaguucgacaagcucuacaucuggggcguccaccaccccuccaccgacuccgaccagaccucccucuacguccaggccuccggccgcgucaccgucuccaccaagcgcucccagcagaccgucauccccaacaucggcucccgccccuggguccgcggccucuccucccgcaucuccaucuacuggaccaucgucaagcccggcgacauccuccucaucaacuccaccggcaaccucaucgccccccgcggcuacuucaagauccgcaacggcaaguccuccaucaugcgcuccgacgcccccaucggcaacugcuccuccgagugcaucacccccaacggcuccauccccaacgacaagcccuuccagaacgucaaccgcaucaccuacggcgccugcccccgcuacgucaagcagaacacccucaagcucgccaccggcaugcgcaacguccccgagaagcagacccgcggcaucuucggcgccaucgccggcuucaucgagaacggcugggagggcauggucgacggcugguacggcuuccgccaccagaacuccgagggcaccggccaggccgccgaccucaaguccacccaggccgccaucgaccagaucaacggcaagcucaaccgccucaucgagaagaccaacgagaaguuccaccagaucgagaaggaguucuccgaggucgagggccgcauccaggaccucgagaaguacgucgaggacaccaagaucgaccucugguccuacaacgccgagcuccucgucgcccucgagaaccagcacaccaucgaccucaccgacuccgagaugaacaagcucuucgagcgcacccgcaagcagcuccgcgagaacgccgaggacaugggcaacggcugcuucaagaucuaccacaagugcgacaacgccugcaucggcuccauccgcaacggcaccuacgaccacgacgucuaccgcgacgaggcccucaacaaccgcuuccagaucaagggcgucgagcucaaguccggcuacaaggacuggauccucuggaucuccuucgccaucuccugcuuccuccucugcgucguccuccucggcuucaucaugugggccugccagaagggcaacauccgcugcaacaucugcaucuga

SEQ ID NO: 97251 - RNA, 1701 nt, Artificial Sequence; identical to SEQ ID NO: 97089
  derived and/or modified CDS sequence (opt2) from hemagglutinin__InfluenzaA__ABI21343

SEQ ID NO: 97252 - RNA, 1701 nt, Artificial Sequence
  derived and/or modified CDS sequence (opt2) from hemagglutinin__InfluenzaA__ABI21354
augaagaccaucaucgcccucuccuacaucuccugccucgucuucgcccagaagcuccccggcaacgacaacuccaccgccacccucugccucggccaccacgccguccccaacggcacccucgucaagaccaucaccaacgaccagaucgaggucaccaacgccaccgagcucguccaguccuccuccaccggccgcaucugcgacuccccccaccgcauccucgacggcaagaacugcacccucaucgacgcccuccucggcgacccccacugcgacggcuuccagaacaaggagugggaccucuucgucgagcgcuccaaggccuacuccaacugcuaccccuacgacguccccgacuacgccucccuccgcucccucgucgccuccuccggcacccucgaguucaucaacgaggacuucaacuggaccggcgucgcccaggacggcaaguccuacgccugcaagcgcggcuccgucaacuccuucuucucccgccucaacuggcuccacaagcucgaguacaaguaccccgcccucaacgucaccaugcccaacaacggcaaguucgacaagcucuacaucuggggcguccaccaccccuccaccgacuccgaccagaccucccucuacguccgcgccuccggccgcgucaccgucuccaccaagcgcucccagcagaccgucauccccaacaucggcucccgccccuggguccgcggccucuccucccgcaucuccaucuacuggaccaucgucaagcccggcgacauccuccucaucaacuccaccggcaaccucaucgccccccgcggcuacuucaagauccgcaacggcaaguccuccaucaugcgcuccgacgcccccaucggcaacugcuccuccgagugcaucacccccaacggcuccauccccaacgacaagcccuuccagaacgucaaccgcaucaccuacggcgccugcccccgcuacgucaagcagaacacccucaagcucgccaccggcaugcgcaacguccccgagaagcagacccgcggcaucuucggcgccaucgccggcuucaucgagaacggcugggagggcauggucgacggcugguacggcuuccgccaccagaacuccgagggcaccggccaggccgccgaccucaaguccacccaggccgccaucgaccagaucaacggcaagcucaaccgccucaucgagaagaccaacgagaaguuccaccagaucgagaaggaguucuccgaggucgagggccgcauccaggaccucgagaaguacgucgaggacaccaagaucgaccucugguccuacaacgccgagcuccucgucgcccucgagaaccagcacaccaucgaccucaccgacuccgagaugaacaagcucuucgagcgcacccgcaagcagcuccgcgagaacgccgaggacaugggcaacggcugcuucaagaucuaccacaagugcgacaacgccugcaucggcuccauccgcaacggcaccuacgaccacgacgucuaccgcgacgaggcccucaacaaccgcuuccagaucaagggcgucgagcucaaguccggcuacaaggacuggauccucuggaucuccuucgccaucuccugcuuccuccucugcgucguccuccucggcuucaucaugugggccugccagaagggcaacauccgcugcaacaucugcaucuga

SEQ ID NO: 97253 - RNA, 1701 nt, Artificial Sequence
  derived and/or modified CDS sequence (opt2) from hemagglutinin__InfluenzaA__ABI21365
augaagaccaucaucgcccucuccuacauccucugccucgucuucgcccagaagcuccccggcaacgacaacuccaccgccacccucugccucggccaccacgccguccccaacggcacccucgucaagaccaucaccaacgaccagaucgaggucaccaacgccaccgagcucguccaguccuccuccaccggccgcaucugcgacuccccccaccgcauccucgacggcaagaacugcacccucaucgacgcccuccucggcgacccccacugcgacggcuuccagaacaaggagugggaccucuucgucgagcgcuccaaggccuacuccaacugcuaccccuacgacguccccgacuacgccucccuccgcucccucgucgccuccuccggcacccucgaguucaucaacgaggacuucaacuggaccggcgucgcccaggacggcaaguccuacgccugcaagcgcggcuccgucaacuccuucuucucccgccucaacuggcuccacaagcucgaguacaaguaccccgcccucaacgucaccaugcccaacaacggcaaguucgacaagcucuacaucuggggcguccaccaccccuccaccgacuccgaccagaccucccucuacguccgcgccuccggccgcgucaccgucuccaccaagcgcucccagcagaccgucauccccaacaucggcucccgccccuggguccgcggccucuccucccgcaucuccaucuacuggaccaucgucaagcccggcgacauccuccucaucaacuccaccggcaaccucaucgccccccgcggcuacuucaagauccgcaacggcaaguccuccaucaugcgcuccgacgcccccaucggcaacugcuccuccgagugcaucacccccaacggcuccauccccaacgacaagcccuuccagaacgucaaccgcaucaccuacggcgccugcccccgcuacgucaagcagaacacccucaagcucgccaccggcaugcgcaacguccccgagaagcagacccgcggcaucuucggcgccaucgccggcuucaucgagaacggcugggagggcauggucgacggcugguacggcuuccgccaccagaacuccgagggcaccggccaggccgccgaccucaaguccacccaggccgccaucgaccagaucaacggcaagcucaaccgccucaucgagaagaccaacgagaaguuccaccagaucgagaaggaguucuccgaggucgagggccgcauccaggaccucgagaaguacgucgaggacaccaagaucgaccucugguccuacaacgccgagcuccucgucgcccucgagaaccagcacaccaucgaccucaccgacuccgagauggacaagcucuucgagcgcacccgcaagcagcuccgcgagaacgccgaggacaugggcaacggcugcuucaagaucuaccacaagugcgacaacgccugcaucggcuccauccgcaacggcaccuacgaccacgacgucuaccgcgacgaggcccucaacaaccgcuuccagaucaagggcgucgagcucaaguccggcuacaaggacuggauccucuggaucuccuucgccaucuccugcuuccuccucugcgucguccuccucggcuucaucaugugggccugccagaagggcaacauccgcugcaacaucugcaucuga

SEQ ID NO: 97254 - RNA, 1701 nt, Artificial Sequence
  derived and/or modified CDS sequence (opt2) from hemagglutinin__InfluenzaA__ABI21376
augaagaccaucaucgcccucuccuacauccucugccucgucuucgcccagaagcuccccggcaacgacaacuccaccgccacccucugccucggccaccacgccguccccaacggcacccucgucaagaccaucaccaacgaccagaucgaggucaccaacgccaccgagcucguccaguccuccuccaccggccgcaucugcgacuccccccaccgcauccucgacggcaagaacugcacccucaucgacgcccuccucggcgacccccacugcgacggcuuccagaacaaggagugggaccucuucgucgagcgcuccaaggccuacuccaacugcuaccccuacgacguccccgacuacgccucccuccgcucccucgucgccuccuccggcacccucgaguucaucaacgaggacuucaacuggaccggcgucgcccaggacggcaaguccuacuccugcaagcgcggcuccgucaacuccuucuucucccgccucaacuggcuccacaagcucgaguacaaguaccccgcccucaacgucaccaugcccaacaacgacaaguucgacaagcucuacaucuggggcguccaccaccccuccaccgacuccgaccagaccucccucuacguccgcgccuccggccgcgucaccgucuccaccaagcgcucccagcagaccgucauccccaacaucggcucccgccccuggguccgcggccucuccucccgcaucuccaucuacuggaccaucgucaagcccggcgacauccuccucaucaacuccaccggcaaccucaucgccccccgcggcuacuucaagauccgcaacggcaaguccuccaucaugcgcuccgacgcccccaucggcaacugcuccuccgagugcaucacccccaacggcuccauccccaacgacaagcccuuccagaacgucaaccgcaucaccuacggcgccugcccccgcuacgucaagcagaacacccucaagcucgccaccggcaugcgcaacguccccgagaagcagacccgcggcaucuucggcgccaucgccggcuucaucgagaacggcugggagggcauggucgacggcugguacggcuuccgccaccagaacuccgagggcaccggccaggccgccgaccucaaguccacccaggccgccaucgaccagaucaacggcaagcucaaccgccucaucgagaagaccaacgagaaguuccaccagaucgagaaggaguucuccgaggucgagggccgcauccaggaccucgagaaguacgucgaggacaccaagaucgaccucugguccuacaacgccgagcuccucgucgcccucgagaaccagcacaccaucgaccucaccgacuccgagaugaacaagcucuucgagcgcacccgcaagcagcuccgcgagaacgccgaggacaugggcaacggcugcuucaagaucuaccacaagugcgacaacgccugcaucggcuccauccgcaacggcaccuacgaccacgacgucuaccgcgacgaggcccucaacaaccgcuuccagaucaagggcgucgagcucaaguccggcuacaaggacuggauccucuggaucuccuucgccaucuccugcuuccuccucugcgucguccuccucggcuucaucaugugggccugccagaagggcaacauccgcugcaacaucugcaucuga

SEQ ID NO: 97255 - RNA, 1701 nt, Artificial Sequence; identical to SEQ ID NO: 97089
  derived and/or modified CDS sequence (opt2) from hemagglutinin__InfluenzaA__ABI21387

SEQ ID NO: 97256 - RNA, 1701 nt, Artificial Sequence
  derived and/or modified CDS sequence (opt2) from hemagglutinin__InfluenzaA__ABI21398
augaagaccaucaucgcccucuccuacauccucugccucgucuucgcccagaagcuccccggcaacgacaacuccaccgccacccucugccucggccaccacgccguccccaacggcacccucgucaagaccaucaccaacgaccagaucgaggucaccaacgccaccgagcucguccaguccuccuccaccggccgcaucugcgacuccccccaccgcauccucgacggcaagaacugcacccucaucgacgcccuccucggcgacccccacugcgacggcuuccagaacaaggagugggaccucuucgucgagcgcuccaaggccuacuccaacugcuaccccuacgacguccccgacuacgccucccuccgcucccucgucgccuccuccggcacccucgaguucgucaacgaggacuucaacuggaccggcgucgcccaggacggcaaguccuacgccugcaagcgcggcuccgucaacuccuucuucucccgccucaacuggcuccacaagcucgaguacaaguaccccgcccucaacgucaccaugcccaacaacggcaaguucgacaagcucuacaucuggggcguccaccaccccuccaccgacuccgaccagaccucccucuacguccgcgccuccggccgcgucaccgucuccaccaagcgcucccagcagaccgucauccccaacaucggcucccgccccuggguccgcggccucuccucccgcaucuccaucuacuggaccaucgucaagcccggcgacauccuccucaucaacuccaccggcaaccucaucgccccccgcggcuacuucaagauccgcaacggcaaguccuccaucaugcgcuccgacgcccccaucggcaacugcuccuccgagugcaucacccccaacggcuccauccccaacgacaagcccuuccagaacgucaaccgcaucaccuacggcgccugcccccgcuacgucaagcagaacacccucaagcucgccaccggcaugcgcaacguccccgagaagcagacccgcggcaucuucggcgccaucgccggcuucaucgagaacggcugggagggcauggucgacggcugguacggcuuccgccaccagaacuccgagggcaccggccaggccgccgaccucaaguccacccaggccgccaucgaccagaucaacggcaagcucaaccgccucaucgagaagaccaacgagaaguuccaccagaucgagaaggaguucuccgaggucgagggccgcauccaggaccucgagaaguacgucgaggacaccaagaucgaccucugguccuacaacgccgagcuccucgucgcccucgagaaccagcacaccaucgaccucaccgacuccgagaugaacaagcucuucgagcgcacccgcaagcagcuccgcgagaacgccgaggacaugggcaacggcugcuucaagaucuaccacaagugcgacaacgccugcaucggcuccauccgcaacggcaccuacgaccacgacgucuaccgcgacgaggcccucaacaaccgcuuccagaucaagggcgucgagcucaaguccggcuacaaggacuggauccucuggaucuccuucgccaucuccugcuuccuccucugcgucguccuccucggcuucaucaugugggccugccagaagggcaacauccgcugcaacaucugcaucuga

SEQ ID NO: 97257 - RNA, 1701 nt, Artificial Sequence; identical to SEQ ID NO: 97089
  derived and/or modified CDS sequence (opt2) from hemagglutinin__InfluenzaA__ABI21409

SEQ ID NO: 97258 - RNA, 1701 nt, Artificial Sequence
  derived and/or modified CDS sequence (opt2) from hemagglutinin__InfluenzaA__ABI21420
augaagaccaucaucgcccucuccuacauccucugccucgucuucacccagaagcuccccggcaacgacaacuccaccgccacccucugccucggccaccacgccguccccaacggcacccucgucaagaccaucaccaacgaccagaucgaggucaccaacgccaccgagcucguccaguccuccuccaccggccgcaucugcgacuccccccaccgcauccucgacggcaagaacugcacccucaucgacgcccuccucggcgacccccacugcgacggcuuccagaacaaggagugggaccucuucgucgagcgcuccaaggccuacuccaacugcuaccccuacgacguccccgacuacgccucccuccgcucccucgucgccuccuccggcacccucgaguucaucaacgaggacuucaacuggaccggcgucgcccaggacggcggcuccuacuccugcaagcgcggcuccgucaacuccuucuucucccgccucaacuggcuccacaagcucgaguacaaguaccccgcccucaacgucaccaugcccaacaacggcaaguucgacaagcucuacaucuggggcguccaccaccccuccaccgacuccgaccagaccucccucuacguccgcgccuccggccgcgucaccgucuccaccaagcgcucccagcagaccgucauccccaacaucggcucccgccccuggguccgcggccucuccucccgcaucuccaucuacuggaccaucgucaagcccggcgacauccuccucaucaacuccaccggcaaccucaucgccccccgcggcuacuucaagauccgcaacggcaaguccuccaucaugcgcuccgacgcccccaucggcaacugcuccuccgagugcaucacccccaacggcuccauccccaacgacaagcccuuccagaacgucaaccgcaucaccuacggcgccugcccccgcuacgucaagcagaacacccucaagcucgccaccggcaugcgcaacguccccgagaagcagacccgcggcaucuucggcgccaucgccggcuucaucgagaacggcugggagggcauggucgacggcugguacggcuuccgccaccagaacuccgagggcaccggccaggccgccgaccucaaguccacccaggccgccaucgaccagaucaacggcaagcucaaccgccucaucgagaagaccaacgagaaguuccaccagaucgagaaggaguucuccgaggucgagggccgcauccaggaccucgagaaguacgucgaggacaccaagaucgaccucugguccuacaacgccgagcuccucgucgcccucgagaaccagcacaccaucgaccucaccgacuccgagaugaacaagcucuucgagcgcacccgcaagcagcuccgcgagaacgccgaggacaugggcaacggcugcuucaagaucuaccacaagugcgacaacgccugcaucggcuccauccgcaacggcaccuacgaccacgacgucuaccgcgacgaggcccucaacaaccgcuuccagaucaaguccgucgagcucaaguccggcuacaaggacuggauccucuggaucuccuucgccaucuccugcuuccuccucugcgucguccuccucggcuucaucaugugggccugccagaagggcaacauccgcugcaacaucugcaucuga

SEQ ID NO: 97259 - RNA, 1701 nt, Artificial Sequence; identical to SEQ ID NO: 97089
  derived and/or modified CDS sequence (opt2) from hemagglutinin__InfluenzaA__ABI21431

SEQ ID NO: 97260 - RNA, 1701 nt, Artificial Sequence; identical to SEQ ID NO: 97089
  derived and/or modified CDS sequence (opt2) from hemagglutinin__InfluenzaA__ABI21442

SEQ ID NO: 97261 - RNA, 1701 nt, Artificial Sequence; identical to SEQ ID NO: 97089
  derived and/or modified CDS sequence (opt2) from hemagglutinin__InfluenzaA__ABI21453

SEQ ID NO: 97262 - RNA, 1701 nt, Artificial Sequence; identical to SEQ ID NO: 97089
  derived and/or modified CDS sequence (opt2) from hemagglutinin__InfluenzaA__ABI21464

SEQ ID NO: 97263 - RNA, 1701 nt, Artificial Sequence; identical to SEQ ID NO: 97089
  derived and/or modified CDS sequence (opt2) from hemagglutinin__InfluenzaA__ABI21475

SEQ ID NO: 97264 - RNA, 1701 nt, Artificial Sequence
  derived and/or modified CDS sequence (opt2) from hemagglutinin__InfluenzaA__ABI21486
augaagaccaucaucgcccucuccuacauccucugccucgucuucgcccagaagcuccccggcaacgacaacuccaccgccacccucugccucggccaccacgccguccccaacggcacccucgucaagaccaucaccaacgaccagaucgaggucaccaacgccaccgagcucguccaguccuccuccaccggccgcaucugcgacuccccccaccgcauccucgacggcaagaacugcacccucaucgacgcccuccucggcgacccccacugcgacggcuuccagaacaaggagugggaccucuucgucgagcgcuccaaggccuacuccaacugcuaccccuacgacguccccgacuacgccucccuccgcucccucgucgccuccuccggcacccucgaguucaucaacgaggacuucaacuggaccggcgucgcccaggacggcaaguccuacgccugcaagcgcggcuccgucaacuccuucuucucccgccucaacuggcuccacaagcucgaguacaaguaccccgcccucaacgucaccaugcccaacaacggcaaguucgacaagcucuacaucuggggcguccaccaccccuccaccgacuccgaccagaccucccucuacguccgcgccuccggccgcgucaccgucuccaccaagcgcucccagcagaccgucauccccaacaucggcucccgccccuggguccgcggccucuccucccgcaucuccaucuacuggaccaucgucaagcccggcgacauccuccucaucaacuccaccggcaaccucaucgccccccgcggcuacuucaagauccgcaacggcaaguccuccaucaugcgcuccgacgcccccaucggcaacugcuccuccgagugcaucacccccaacggcuccauccccaacgacaagcccuuccagaacgucaaccgcaucaccuacggcgccugcccccgcuacgucaagcagaacacccucaagcucgccaccggcaugcgcaacguccccgagaagcagacccgcggcaucuucggcgccaucgccggcuucaucgagaacggcugggagggcauggucgacggcugguacggcuuccgccaccagaacuccgagggcaccggccaggccgccgaccucaaguccacccaggaggccaucgaccagaucaacggcaagcucaaccgccucaucgagaagaccaacgagaaguuccaccagaucgagaaggaguucuccgaggucgagggccgcauccaggaccucgagaaguacgucgaggacaccaagaucgaccucugguccuacaacgccgagcuccucgucgcccucgagaaccagcacaccaucgaccucaccgacuccgagaugaacaagcucuucgagcgcacccgcaagcagcuccgcgagaacgccgaggacaugggcaacggcugcuucaagaucuaccacaagugcgacaacgccugcaucggcuccauccgcaacggcaccuacgaccacgacgucuaccgcgacgaggcccucaacaaccgcuuccagaucaagggcgucgagcucaaguccggcuacaaggacuggauccucuggaucuccuucgccaucuccugcuuccuccucugcgucguccuccucggcuucaucaugugggccugccagaagggcaacauccgcugcaacaucugcaucuga

SEQ ID NO: 97265 - RNA, 1701 nt, Artificial Sequence; identical to SEQ ID NO: 97089
  derived and/or modified CDS sequence (opt2) from hemagglutinin__InfluenzaA__ABI21497

SEQ ID NO: 97266 - RNA, 1698 nt, Artificial Sequence
  derived and/or modified CDS sequence (opt2) from hemagglutinin__InfluenzaA__ABI21530
augaaggccaagcuccucguccuccucugcaccuucaccgccaccuacgccgacaccaucugcaucggcuaccacgccaacaacuccaccgacaccgucgacaccguccucgagaagaacgucaccgucacccacuccgucaaccuccucgaggacucccacaacggcaagcucugccuccucaagggcaucgccccccuccagcucggcaacugcuccgucgccggcuggauccucggcaaccccgagugcgagucccucaucuccaaggaguccugguccuacaucgucgagacccccaaccccgagaacggcaccugcuaccccggcuacuucgccgacuacgaggagcuccgcgagcagcucuccuccgucuccuccuucgagcgcuucgagaucuuccccaaggaguccuccuggcccaaccacaccgucaccggcgucuccgccuccugcucccacaacggcaaguccuccuucuaccgcaaccuccucuggcucaccgagaagaacggccucuaccccaaccucuccaaguccuacgucaacaacaaggagaaggagguccucguccucuggggcguccaccaccccuccaacaucggcguccagcgcgccaucuaccgcaccgagaacgccuacgucuccgucgucuccucccacuacucccgccgcuucacccccgagaucgccaagcgccccaagguccgcgaccaggagggccgcaucaacuacuacuggacccuccucgagcccggcgacaccaucaucuucgaggccaacggcaaccucaucgcccccugguacgccuucgcccucucccgcggcuucgaguccggcaucaucaccuccaacgcccccaugaacgagugcgacgccaagugccagaccccccagggcgccaucaacuccucccuccccuuccagaacguccaccccgucaccaucggcgagugccccaaguacguccgcuccgccaagcuccgcauggucaccggccuccgcaacauccccuccauccagucccgcggccucuucggcgccaucgccggcuucaucgagggcggcuggaccggcaugaucgacggcugguacggcuaccaccaccagaacgagcagggcuccggcuacgccgccgaccagaaguccacccagaacgccaucaacggcaucaccaacaaggucaacuccgucaucgagaagaugaacacccaguucaccgccgucggcaaggaguucaacaagcucgagcgccgcauggagaaccucaacaagaaggucgacgacggcuuccucgacaucuggaccuacaacgccgagcuccucguccuccucgagaacgagcgcacccucgacuuccacgacuccaacgucaagaaccucuacgagaaggucaagucccagcucaagaacaacgccaaggagaucggcaacggcugcuucgaguucuaccacaagugcaacaacgagugcauggaguccgucaagaacggcaccuacgacuaccccaaguacuccgaggaguccaagcucaaccgcgagaagaucgacggcgucaagcucgaguccaugggcgucuaccagauccucgccaucuacuccaccgucgccuccucccucguccuccucgucucccucggcgccaucuccuucuggaugugcuccaacggcucccuccagugccgcaucugcaucuga

SEQ ID NO: 97267 - RNA, 1698 nt, Artificial Sequence
  derived and/or modified CDS sequence (opt2) from hemagglutinin__InfluenzaA__ABI21552
augaaggccaagcuccucguccuccucugcaccuucaccgccaccuacgccgacaccaucugcaucggcuaccacgccaacaacuccaccgacaccgucgacaccguccucgagaagaacgucaccgucacccacuccgucaaccuccucgaggacucccacaacggcaagcucugccuccucaagggcaucgccccccuccagcucggcaacugcuccgucgccggcuggauccucggcaaccccgagugcgagucccucaucuccaaggaguccugguccuacaucgucgagacccccaaccccgagaacggcaccugcuaccccggcuacuucgccgacuacgaggagcuccgcgagcagcucuccuccgucuccuccuucgagcgcuucgagaucuuccccaaggaguccuccuggcccaaccacaccgucaccggcgucuccgccuccugcucccacaacggcaaguccuccuucuaccgcaaccuccucuggcucaccgagaagaacggccucuaccccaaccucuccaaguccuacgucaacaacaaggagaaggagguccucguccucuggggcguccaccaccccuccaacaucggcguccagcgcgccaucuaccacaccgagaacgccuacgucuccgucgucuccucccacuacucccgccgcuucacccccgagaucgccaagcgccccaagguccgcgaccaggagggccgcaucaacuacuacuggacccuccucgagcccggcgacaccaucaucuucgaggccaacggcaaccucaucgcccccugguacgccuucgcccucucccgcggcuucgaguccggcaucaucaccuccaacgcccccauggacgagugcgacgccaagugccagaccccccagggcgccaucaacuccucccuccccuuccagaacguccaccccgucaccaucggcgagugccccaaguacguccgcuccgccaagcuccgcauggucaccggccuccgcaacauccccuccauccagucccgcggccucuucggcgccaucgccggcuucaucgagggcggcuggaccggcaugaucgacggcugguacggcuaccaccaccagaacgagcagggcuccggcuacgccgccgaccagaaguccacccagaacgccaucaacggcaucaccaacaaggucaacuccgucaucgagaagaugaacacccaguucaccgccgucggcaaggaguucaacaagcucgagcgccgcauggagaaccucaacaagaaggucgacgacggcuuccucgacaucuggaccuacaacgccgagcuccucguccuccucgagaacgagcgcacccucgacuuccacgacuccaacgucaagaaccucuacgagaaggucaagucccagcucaagaacaacgccaaggagaucggcaacggcugcuucgaguucuaccacaagugcaacaacgagugcauggaguccgucaagaacggcaccuacgacuaccccaaguacuccgaggaguccaagcucaaccgcgagaagaucgacggcgucaagcucgaguccaugggcgucuaccagauccucgccaucuacuccaccgucgccuccucccucguccuccucgucucccucggcgccaucuccuucuggaugugcuccaacggcucccuccagugccgcaucugcaucuga

SEQ ID NO: 97268 - RNA, 1698 nt, Artificial Sequence
  derived and/or modified CDS sequence (opt2) from hemagglutinin__InfluenzaA__ABI21563
augaaggccaagcuccucguccuccucugcaccuucaccgccaccuacgccgacaccaucugcaucggcuaccacgccaacaacuccaccgacaccgucgacaccguccucgagaagaacgucaccgucacccacuccgucaaccuccucgaggacucccacaacggcaagcucugccuccucaagggcaucgccccccuccagcucggcaacugcuccgucgccggcuggauccucggcaaccccgagugcgagucccucaucuccaaggaguccugguccuacaucgucgagacccccaaccccgagaacggcaccugcuaccccggcuacuucgccgacuacgaggagcuccgcgagcagcucuccuccgucuccuccuucgagcgcuucgagaucuuccccaaggaguccuccuggcccaaccacaccgucaccggcgucuccgccuccugcucccacaacggcaaguccuccuucuaccgcaaccuccucuggcucaccgagaagaacggccucuaccccaaccucuccaaguccuacgucaacaacaaggagaaggagguccucguccucuggggcguccaccaccccuccaacaucggcguccagcgcgccaucuaccacaccgagaacgccuacgucuccgucgucuccucccacuacucccgccgcuucacccccgagaucgccaagcgccccaagguccgcggccaggagggccgcaucaacuacuacuggacccuccucgagcccggcgacaccaucaucuucgaggccaacggcaaccucaucgcccccugguacgccuucgcccucucccgcggcuucgaguccggcaucaucaccuccaacgcccccaugaacgagugcgacgccaagugccagaccccccagggcgccaucaacuccucccuccccuuccagaacguccaccccgucaccaucggcgagugccccaaguacguccgcuccgccaagcuccgcauggucaccggccuccgcaacauccccuccauccagucccgcggccucuucggcgccaucgccggcuucaucgagggcggcuggaccggcaugaucgacggcugguacggcuaccaccaccagaacgagcagggcuccggcuacgccgccgaccagaaguccacccagaacgccaucaacggcaucaccaacaaggucaacuccgucaucgagaagaugaacacccaguucaccgccgucggcaaggaguucaacaagcucgagcgccgcauggagaaccucaacaagaaggucgacgacggcuuccucgacaucuggaccuacaacgccgagcuccucguccuccucgagaacgagcgcacccucgacuuccacgacuccaacgucaagaaccucuacgagaaggucaagucccagcucaagaacaacgccaaggagaucggcaacggcugcuucgaguucuaccacaagugcaacaacgagugcauggaguccgucaagaacggcaccuacgacuaccccaaguacuccgaggaguccaagcucaaccgcgagaagaucgacggcgucaagcucgaguccaugggcgucuaccagauccucgccaucuacuccaccgucgccuccucccucguccuccucgucucccucggcgccaucuccuucuggaugugcuccaacggcucccuccagugccgcaucugcaucuga

SEQ ID NO: 97269 - RNA, 1698 nt, Artificial Sequence; identical to SEQ ID NO: 97268
  derived and/or modified CDS sequence (opt2) from hemagglutinin__InfluenzaA__ABI21574

SEQ ID NO: 97270 - RNA, 1701 nt, Artificial Sequence
  derived and/or modified CDS sequence (opt2) from hemagglutinin__InfluenzaA__ABI21736
augaagaccaucaucgcccucuccuacauccucugccucgucuucgcccagaagcuccccggcaacgacaacuccaccgccacccucugccucggccaccacgccguccccaacggcacccucgucaagaccaucaccaacgaccagaucgaggucaccaacgccaccgagcucguccaguccuccuccaccggcggcaucugcgacuccccccaccagauccucgacggcgagaacugcacccucaucgacgcccuccucggcgacccccacugcgacggcuuccagaacaaggagugggaccucuucgucgagcgcuccaaggccuacuccaacugcuaccccuacgacguccccgacuacgccucccuccgcucccucgucgccuccuccggcacccucgaguucaacaacgaguccuucaacuggaccggcgucgcccagaacggcaccuccuccgccugcaagcgccgcuccaacaaguccuucuucucccgccucaacuggcuccaccagcucaaguacaaguaccccgcccucaacgucaccaugcccaacaacgagaaguucgacaagcucuacaucuggggcguccaccaccccuccaccgacuccgaccagaucucccucuacgcccaggcccccggccgcgucaccgucuccaccaagcgcucccagcagaccgucauccccaacaucggcucccgccccuggguccgcggcgucuccucccgcaucuccaucuacuggaccaucgucaagcccggcgacauccuccucaucaacugcaccggcaaccucaucgccccccgcggcuacuucaagauccgcuccggcaaguccuccaucaugcgcuccgacgccuccaucggcaagugcaacuccgagugcaucacccccaacggcuccauccccaacgacaagcccuuccagaacgucaaccgcaucaccuacggcgccugcccccgcuacgucaagcagaacacccucaagcucgccaccggcaugcgcaacguccccgagaagcagacccgcggcaucuucggcgccaucgccggcuucaucgagaacggcugggagggcauggucgacggcugguacggcuuccgccaccagaacuccgagggcaccggccaggccgccgaccucaaguccacccaggccgccaucaaccagaucaacggcaagcucaaccgccucaucgagaagaccaacgagaaguuccaccagaucgagaaggaguucuccgaggucgagggccgcauccaggaccucgagaaguacgucgaggacaccaagaucgaccucugguccuacaacgccgagcuccucgucgcccucgagaaccagcacaccaucgaccucaccgacuccgagaugaacaagcucuucgagcgcaccaagaagcagcuccgcgagaacgccgaggacgucggcaacggcugcuucaagaucuaccacaagugcgacaacgccugcaucggcuccauccgcaacggcaccuacgaccacgacgucuaccgcgacgaggcccucaacaaccgcuuccagaucaagggcgucgagcucaaguccggcuacaaggacuggauccucuggaucuccuucgccaucuccugcuuccuccucugcgucguccuccucggcuucaucaugugggccugccagaagggcaacauccgcugcaacaucugcaucuga

SEQ ID NO: 97271 - RNA, 1701 nt, Artificial Sequence
  derived and/or modified CDS sequence (opt2) from hemagglutinin__InfluenzaA__ABI22159
augaagaccaucaucgcccucuccuacauccucugccucgucuucgcccagaagcuccccggcaacgacaacuccaccgccacccucugccucggccaccacgccguccccaacggcaccaucgucaagaccaucaccaacgaccagaucgaggucaccaacgccaccgagcucguccaguccuccuccaccggcgagaucugcgacuccccccaccagauccucgacggcgagaacugcacccucaucgacgcccuccucggcgacccccagugcgacggcuuccagaacaagaagugggaccucuucgucgagcgcuccaacgccuacuccaacugcuaccccuacgacguccccgacuacgccucccuccgcucccucgucgccuccuccggcacccucgaguucaacaacgaguccuucaacuggaccggcgucacccagaacggcaccuccuccgccugcaagcgccgcuccaacaacuccuucuucucccgccucaacuggcucacccaccucaaguucaaguaccccgcccucaacgucaccaugcccaacaacgagaaguucgacaagcucuacaucuggggcguccaccaccccggcaccgacaacgaccagaucuuccucuacgcccaggccuccggccgcaucaccgucuccaccaagcgcucccagcagaccgucauccccaacaucggcucccgcccccgcguccgcaacauccccucccgcaucuccaucuacuggaccaucgucaagcccggcgacauccuccucaucaacuccaccggcaaccucaucgccccccgcggcuacuucaagauccgcuccggcaaguccuccaucaugcgcuccgacgcccccaucggcaagugcaacuccgagugcaucacccccaacggcuccauccccaacgacaagcccuuccagaacgucaaccgcaucaccuacggcgccugcccccgcuacgucaagcagaacacccucaagcucgccaccggcaugcgcaacguccccgagaagcagacccgcggcaucuucggcgccaucgccggcuucaucgagaacggcugggagggcauggucgacggcugguacggcuuccgccaccagaacuccgagggcaucggccaggccgccgaccucaaguccacccaggccgccaucaaccagaucaacggcaagcucaaccgccucaucggcaagaccaacgagaaguuccaccagaucgagaaggaguucuccgaggucgagggccgcauccaggaccucgagaaguacgucgaggacaccaagaucgaccucugguccuacaacgccgagcuccucgucgcccucgagaaccagcacaccaucgaccucaccgacuccgagaugaacaagcucuucgagcgcaccaagaagcagcuccgcgagaacgccgaggacaugggcaacggcugcuucaagaucuaccacaagugcgacaacgccugcaucggcuccauccgcaacggcaccuacgaccacgacgucuaccgcgacgaggcccucaacaaccgcuuccagaucaagggcgucgagcucaaguccggcuacaaggacuggauccucuggaucuccuucgccaucuccugcuuccuccucugcgucgcccuccucggcuucaucaugugggccugccagaagggcaacauccgcugcaacaucugcaucuga

SEQ ID NO: 97272 - RNA, 1707 nt, Artificial Sequence
  derived and/or modified CDS sequence (opt2) from hemagglutinin__InfluenzaA__ABI23979
auggagaagaucguccuccuccucgccaucaucucccucgucaaguccgaccagaucugcaucggcuaccacgccaacaacuccaccgagcaggucgacaccaucauggagaagaacgucaccgucacccacgcccaggacauccucgagaagacccacaacggcaagcucugcgaccucgacggcgucaagccccucauccuccgcgacugcuccgucgccggcuggcuccucggcaaccccaugugcgacgaguuccucaacguccccgagugguccuacaucgucgagaagaucaaccccgccaacgaccucugcuaccccggcaacuucaacgacuacgaggagcucaagcaccuccucucccgcaucaaccacuucgagaagauccagaucauccccaaguccuccugguccgaccacgaggccuccuccggcgucuccuccgccugccccuaccagggccgcuccuccuucuuccgcaacgucgucuggcucaucaagaaggacaacgccuaccccaccaucaagcgcuccuacaacaacaccaaccaggaggaccuccucguccucuggggcauccaccaccccaacgacgccgccgagcagacccgccucuaccagaaccccaccaccuacaucuccgucggcaccuccacccucaaccagcgccucguccccaagaucgccacccgcuccaaggucaacggccaguccggccgcauggaguucuucuggaccauccucaagcccaacgacgccaucaacuucgaguccaacggcaacuucaucgcccccgagaacgccuacaagaucgucaagaagggcgacuccaccaucaugaaguccgagcucgaguacggcaacugcaacaccaagugccagacccccaucggcgccaucaacuccuccaugcccuuccacaacauccacccccucaccaucggcgagugccccaaguacgucaaguccaaccgccucguccucgccaccggccuccgcaacuccccccagggcgagcgccgccgcaagaagcgcggccucuucggcgccaucgccggcuucaucgagggcggcuggcagggcauggucgacggcugguacggcuaccaccacuccaacgagcagggcuccggcuacgccgccgacaaggaguccacccagaaggccaucgacggcgucaccaacaaggucaacuccaucaucgacaagaugaacacccaguucgaggccgucggccgcgaguucaacaaccucgagcgccgcaucgagaaccucaacaagaagauggaggacggcuuccucgacgucuggaccuacaacgccgagcuccucguccucauggagaacgagcgcacccucgacuuccacgacuccaacgucaagaaccucuacgacaagguccgccuccagcuccgcgacaacgccaaggagcucggcaacggcugcuucgaguucuaccaccgcugcgacaacgagugcauggaguccguccgcaacggcaccuacgacuacccccaguacuccgaggagucccgccucaagcgcgaggagaucuccggcgucaagcucgaguccaucggcaccuaccagauccucuccaucuacuccaccgucgccuccucccucgcccucgccaucauggucgccggccucucccucuggaugugcuccaacggcucccuccagugccgcaucugcaucuga

SEQ ID NO: 97273 - RNA, 1701 nt, Artificial Sequence; identical to SEQ ID NO: 96318
  derived and/or modified CDS sequence (opt2) from hemagglutinin__InfluenzaA__ABI26646

SEQ ID NO: 97274 - RNA, 1701 nt, Artificial Sequence; identical to SEQ ID NO: 96947
  derived and/or modified CDS sequence (opt2) from hemagglutinin__InfluenzaA__ABI30367

SEQ ID NO: 97275 - RNA, 1701 nt, Artificial Sequence; identical to SEQ ID NO: 96957
  derived and/or modified CDS sequence (opt2) from hemagglutinin__InfluenzaA__ABI30378

SEQ ID NO: 97276 - RNA, 1701 nt, Artificial Sequence; identical to SEQ ID NO: 96686
  derived and/or modified CDS sequence (opt2) from hemagglutinin__InfluenzaA__ABI30400

SEQ ID NO: 97277 - RNA, 1701 nt, Artificial Sequence
  derived and/or modified CDS sequence (opt2) from hemagglutinin__InfluenzaA__ABI30411
augaagaccaucaucgcccucuccuacauccucugccucgucuucgcccagaagcuccccggcaacgacaacuccaccgccacccucugccucggccaccacgccguccccaacggcacccucgucaagaccaucaccaacgaccagaucgaggucaccaacgccaccgagcucguccaguccuccuccaccggcggcaucugcgacuccccccaccagauccucgacggcgagaacugcacccucaucgacgcccuccucggcgacccccacugcgacggcuuccagaacaaggagugggaccucuucgucgagcgcuccaaggccuacuccaacugcuaccccuacgacguccccgacuacgccucccuccgcucccucgucgccuccuccggcacccucgaguucaacaacgaguccuucaacuggaccggcgucgcccagaacggcaccuccuccgccugcaagcgccgcuccaacaaguccuucuucucccgccucaacuggcuccaccagcucaaguacaaguaccccgcccucaacgucaccaugcccaacaacgagaaguucgacaagcucuacaucuggggcguccaccaccccuccaccgacuccgaccagaucucccucuacgcccaggcccccggccgcgucaccgucuccaccaagcgcucccagcagaccgucauccccaacaucggcucccgccccuggguccgcggcgucuccucccgcaucuccaucuacuggaccaucgucaagcccggcgacauccuccucaucaacugcaccggcaaccucaucgccccccgcggcuacuucaagauccgcuccggcaaguccuccaucaugcgcuccgacgccuccaucggcaagugcaacuccgagugcaucacccccaacggcuccauccccaacgacaagcccuuccagaacgucaaccgcaucaccuacggcgccugcccccgcuacgucaagcagaacacccucaagcucgccaccggcaugcgcaacguccccgagaagcagacccgcggcaucuucggcgccaucgccggcuucaucgagaacggcugggagggcauggucgacggcugguacggcuuccgccaccagaacuccgagggcaccggccaggccgccgaccucaaguccacccaggccgccaucaaccagaucaacggcaagcucaaccgccucaucgagaagaccaacgagaaguuccaccagaucgagaaggaguucuccgaggucgagggccgcauccaggaccucgagaaguacgucgaggacaccaagaucgaccucugguccuacaacgccgagcuccucgucgcccucgagaaccagcacaccaucgaccucaccgacuccgagauggacaagcucuucgagcgcaccaagaagcagcuccgcgagaacgccgaggacaugggcaacggcugcuucaagaucuaccacaagugcgacaacgccugcaucggcuccauccgcaacggcaccuacgaccacgacgucuaccgcgacgaggcccucaacaaccgcuuccagaucaagggcgucgagcucaaguccggcuacaaggacuggauccucuggaucuccuucgccaucuccugcuuccuccucugcgucguccuccucggcuucaucaugugggccugccagaagggcaacauccgcugcaacaucugcaucuga

SEQ ID NO: 97278 - RNA, 1701 nt, Artificial Sequence; identical to SEQ ID NO: 96627
  derived and/or modified CDS sequence (opt2) from hemagglutinin__InfluenzaA__ABI30422

SEQ ID NO: 97279 - RNA, 1701 nt, Artificial Sequence; identical to SEQ ID NO: 96318
  derived and/or modified CDS sequence (opt2) from hemagglutinin__InfluenzaA__ABI30433

SEQ ID NO: 97280 - RNA, 1701 nt, Artificial Sequence; identical to SEQ ID NO: 96627
  derived and/or modified CDS sequence (opt2) from hemagglutinin__InfluenzaA__ABI30444

SEQ ID NO: 97281 - RNA, 1701 nt, Artificial Sequence; identical to SEQ ID NO: 96318
  derived and/or modified CDS sequence (opt2) from hemagglutinin__InfluenzaA__ABI30455

SEQ ID NO: 97282 - RNA, 1701 nt, Artificial Sequence; identical to SEQ ID NO: 96318
  derived and/or modified CDS sequence (opt2) from hemagglutinin__InfluenzaA__ABI30466

SEQ ID NO: 97283 - RNA, 1701 nt, Artificial Sequence; identical to SEQ ID NO: 96318
  derived and/or modified CDS sequence (opt2) from hemagglutinin__InfluenzaA__ABI30477

SEQ ID NO: 97284 - RNA, 1701 nt, Artificial Sequence; identical to SEQ ID NO: 96318
  derived and/or modified CDS sequence (opt2) from hemagglutinin__InfluenzaA__ABI30488

SEQ ID NO: 97285 - RNA, 1701 nt, Artificial Sequence; identical to SEQ ID NO: 96318
  derived and/or modified CDS sequence (opt2) from hemagglutinin__InfluenzaA__ABI30499

SEQ ID NO: 97286 - RNA, 1701 nt, Artificial Sequence; identical to SEQ ID NO: 96279
  derived and/or modified CDS sequence (opt2) from hemagglutinin__InfluenzaA__ABI30510

SEQ ID NO: 97287 - RNA, 1701 nt, Artificial Sequence
  derived and/or modified CDS sequence (opt2) from hemagglutinin__InfluenzaA__ABI30521
augaagaccaucaucgcccucuccuacauccucugccucgucuucgcccagaagcuccccggcaacgacaacuccaccgccacccucugccucggccaccacgccguccccaacggcaccaucgucaagaccaucaccaacgaccagaucgaggucaccaacgccaccgagcucguccaguccuccuccaccggcggcaucugcgacuccccccaccagauccucgacggcgagaacugcacccucaucgacgcccuccucggcgacccccagugcgacggcuuccagaacaagaagugggaccucuucgucgagcgcuccaaggccuacuccaacugcuaccccuacgacguccccgacuacgccucccuccgcucccucgucgccuccuccggcacccucgaguucaacaacgaguccuucaacuggaccggcgucacccagaacggcaccuccuccgccugcaagcgccgcuccaacaacuccuucuucucccgccucaacuggcucacccaccucaaguucaaguaccccgcccucaacgucaccaugcccaacaacgagaaguucgacaagcucuacaucuggggcguccaccaccccggcaccaacaacgaccagaucucccucuacgcccaggccuccggccgcaucaccgucuccaccaagcgcucccagcagaccgucauccccaacaucggcucccgcccccgcguccgcgacauccccucccgcaucuccaucuacuggaccaucgucaagcccggcgacauccuccucaucaacuccaccggcaaccucaucgccccccgcggcuacuucaagauccgcuccggcaaguccuccaucaugcgcuccgacgccuccaucggcaagugcaacuccgagugcaucacccccaacggcuccauccccaacgacaagcccuuccagaacgucaaccgcaucaccuacggcgccugcccccgcuacgucaagcagaacacccucaagcucgccaccggcaugcgcaacguccccgagaagcagacccgcggcaucuucggcgccaucgccggcuucaucgagaacggcugggagggcauggucgacggcugguacggcuuccgccaccagaacuccgagggcaucggccaggccgccgaccucaaguccacccaggccgccaucaaccagaucaacggcaagcucaaccgccucaucggcaagaccaacgagaaguuccaccagaucgagaaggaguucuccgaggucgagggccgcauccaggaccucgagaaguacgucgaggacaccaagaucgaccucugguccuacaacgccgagcuccucgucgcccucgagaaccagcacaccaucgaccucaccgacuccgagaugaacaagcucuucgagcgcaccaagaagcagcuccgcgagaacgccgaggacaugggcaacggcugcuucaagaucuaccacaagugcgacaacgccugcaucggcuccauccgcaacggcaccuacgaccacgacgucuaccgcgacgaggcccucaacaaccgcuuccagaucaagggcgucgagcucaaguccggcuacaaggacuggauccucuggaucuccuucgccaucuccugcuuccuccucugcgucgcccuccucggcuucaucaugugggccugccagaagggcaacauccgcugcaacaucugcaucuga

SEQ ID NO: 97288 - RNA, 1701 nt, Artificial Sequence; identical to SEQ ID NO: 96318
  derived and/or modified CDS sequence (opt2) from hemagglutinin__InfluenzaA__ABI30532

SEQ ID NO: 97289 - RNA, 1701 nt, Artificial Sequence; identical to SEQ ID NO: 97149
  derived and/or modified CDS sequence (opt2) from hemagglutinin__InfluenzaA__ABI30543

SEQ ID NO: 97290 - RNA, 1701 nt, Artificial Sequence; identical to SEQ ID NO: 96318
  derived and/or modified CDS sequence (opt2) from hemagglutinin__InfluenzaA__ABI30554

SEQ ID NO: 97291 - RNA, 1698 nt, Artificial Sequence; identical to SEQ ID NO: 97240
  derived and/or modified CDS sequence (opt2) from hemagglutinin__InfluenzaA__ABI30565

SEQ ID NO: 97292 - RNA, 1701 nt, Artificial Sequence; identical to SEQ ID NO: 96669
  derived and/or modified CDS sequence (opt2) from hemagglutinin__InfluenzaA__ABI30587

SEQ ID NO: 97293 - RNA, 1701 nt, Artificial Sequence
  derived and/or modified CDS sequence (opt2) from hemagglutinin__InfluenzaA__ABI30609
augaagaccaucaucgcccucuccuacauccucugccucgucuucgcccagaagcuccccggcaacgacaacuccaccgccacccucugccucggccaccacgccguccccaacggcaccaucgucaagaccaucaugaacgaccagaucgaggucaccaacgccaccgagcucguccaguccuccuccaccggcggcaucugcgacuccccccaccagauccucgacggcgagaacugcacccucaucgacgcccuccucggcgacccccagugcgacggcuuccagaacaagaagugggaccucuucgucgagcgcuccaaggccuacuccaacugcuaccccuacgacguccccgacuacgccucccuccgcucccucgucgccuccuccggcacccucgaguucaacaacgaguccuucaacuggaccggcgucacccagaacggcaccuccuccgccugcaagcgccgcuccaacaacuccuucuucucccgccucaacuggcucacccaccucaaguucaaguaccccgcccucaacgucaccaugcccaacaacgagaaguucgacaagcucuacaucuggggcguccaccaccccggcaccgacaacgaccagaucuuccucuacgcccaggccuccggccgcaucaccgucuccaccaagcgcucccagcagaccgucauccccaacaucggcucccgcccccgcguccgcaacauccccucccgcaucuccaucuacuggaccaucgucaagcccggcgacauccuccucaucaacuccaccggcaaccucaucgccccccgcggcuacuucaagauccgcuccggcaaguccuccaucaugcgcuccgacgcccccaucggcaagugcaacuccgagugcaucacccccaacggcuccauccccaacgacaagcccuuccagaacgucaaccgcaucaccuacggcgccugcccccgcuacgucaagcagaacacccucaagcucgccaccggcaugcgcaacguccccgagaagcagacccgcggcaucuucggcgccaucgccggcuucaucgagaacggcugggagggcauggucgacggcugguacggcuuccgccaccagaacuccgagggcaccggccaggccgccgaccucaaguccacccaggccgccaucaaccagaucaacggcaagcucaaccgccucaucggcaagaccaacgagaaguuccaccagaucgagaaggaguucuccgaggucgagggccgcauccaggaccucgagaaguacgucgaggacaccaagaucgaccucugguccuacaacgccgagcuccucgucgcccucgagaaccagcacaccaucgaccucaccgacuccgagaugaacaagcucuucgagcgcaccaagaagcagcuccgcgagaacgccgaggacaugggcaacggcugcuucaagaucuaccacaagugcgacaacgccugcaucggcuccauccgcaacggcaccuacgaccacgacgucuaccgcgacgaggcccucaacaaccgcuuccagaucaagggcgucgagcucaaguccggcuacaaggacuggauccucuggaucuccuucgccaucuccugcuuccuccucugcgucgcccuccucggcuucaucaugugggccugccagaagggcaacauccgcugcaacaucugcaucuga

SEQ ID NO: 97294 - RNA, 1701 nt, Artificial Sequence
  derived and/or modified CDS sequence (opt2) from hemagglutinin__InfluenzaA__ABI30620
augaagaccaucaucgcccucuccuacauccucugccucgucuucgcccagaagcuccccggcaacgacaacuccaccgccacccucugccucggccaccacgccguccccaacggcaccaucgucaagaccaucaccaacgaccagaucgaggucaccaacgccaccgagcucguccaguccuccuccaccggcggcaucugcgacuccccccaccagauccucgacggcgagaacugcacccucaucgacgcccuccucggcgacccccagugcgacggcuuccagaacaagaagugggaccucuucaucgagcgcuccaaggccuacuccaacugcuaccccuacgacguccccgacuacgccucccuccgcucccucgucgccuccuccggcacccucgaguucaacaacgaguccuucaacuggaccggcgucacccagaacggcaccuccuccgccugcaagcgccgcuccaacaacuccuucuucucccgccucaacuggcucacccaccucaaguucaaguaccccgcccucaacgucaccaugcccaacaacgagaaguucgacaagcucuacaucuggggcguccaccaccccggcaccgacaacgaccagaucucccucuacgcccaggccuccggccgcaucaccgucuccaccaagcgcucccagcagaccgucauccccaacaucggcucccgcccccgcguccgcgacauccccucccgcaucuccaucuacuggaccaucgucaagcccggcgacauccuccucaucaacuccaccggcaaccucaucgccccccgcggcuacuucaagauccgcuccggcaaguccuccaucaugcgcuccgacgcccccaucggcaagugcaacuccgagugcaucacccccaacggcuccauccccaacgacaagcccuuccagaacgucaaccgcaucaccuacggcgccugcccccgcuacgucaagcagaacacccucaagcucgccaccggcaugcgcaacguccccgagaagcagacccgcggcaucuucggcgccaucgccggcuucaucgagaacggcugggagggcauggucgacggcugguacggcuuccgccaccagaacuccgagggcaucggccaggccgccgaccucaaguccacccaggccgccaucaaccagaucaacggcaagcucaaccgccucaucggcaagaccaacgagaaguuccaccagaucgagaaggaguucuccgaggucgagggccgcauccaggaccucgagaaguacgucgaggacaccaaggucgaccucugguccuacaacgccgagcuccucgucgcccucgagaaccagcacaccaucgaccucaccgacuccgagaugaacaagcucuucgagcgcaccaagaagcagcuccgcgagaacgccgaggacaugggcaacggcugcuucaagaucuaccacaagugcgacaacgccugcaucggcuccauccgcaacggcaccuacgaccacgacgucuaccgcgacgaggcccucaacaaccgcuuccagaucaagggcgucgagcucaaguccggcuacaaggacuggauccucuggaucuccuucgccaucuccugcuuccuccucugcgucgcccuccucggcuucaucaugugggccugccagaagggcaacauccgcugcaacaucugcaucuga

SEQ ID NO: 97295 - RNA, 1701 nt, Artificial Sequence; identical to SEQ ID NO: 96669
  derived and/or modified CDS sequence (opt2) from hemagglutinin__InfluenzaA__ABI30733

SEQ ID NO: 97296 - RNA, 1701 nt, Artificial Sequence; identical to SEQ ID NO: 96669
  derived and/or modified CDS sequence (opt2) from hemagglutinin__InfluenzaA__ABI30744

SEQ ID NO: 97297 - RNA, 1701 nt, Artificial Sequence; identical to SEQ ID NO: 96669
  derived and/or modified CDS sequence (opt2) from hemagglutinin__InfluenzaA__ABI30755

SEQ ID NO: 97298 - RNA, 1701 nt, Artificial Sequence; identical to SEQ ID NO: 96669
  derived and/or modified CDS sequence (opt2) from hemagglutinin__InfluenzaA__ABI30766

SEQ ID NO: 97299 - RNA, 1701 nt, Artificial Sequence; identical to SEQ ID NO: 96669
  derived and/or modified CDS sequence (opt2) from hemagglutinin__InfluenzaA__ABI30777

SEQ ID NO: 97300 - RNA, 1701 nt, Artificial Sequence
  derived and/or modified CDS sequence (opt2) from hemagglutinin__InfluenzaA__ABI30788
augaagaccaucaucgcccucuccuacauccucugccucgucuucgcccagaagcucuccggcaacgacaacuccaccgccacccucugccucggccaccacgccguccccaacggcaccaucgucaagaccaucaccaacgaccagaucgaggucaccaacgccaccgagcucguccaguccuccuccaccggcggcaucugcgacuccccccaccagauccucgacggcgagaacugcacccucaucgacgcccuccucggcgacccccagugcgacggcuuccagaacaagaagugggaccucuucgucgagcgcuccaaggccuacuccaacugcuaccccuacgacguccccgacuacgccucccuccgcucccucaucgccuccuccggcacccucgaguucaacaacgaguccuucaacuggaccggcgucacccagaacggcaccuccuccgccugcaagcgccgcuccaacuccuccuucuucucccgccucaacuggcucacccaccucaaguucaaguaccccgcccucaacgucaccaugcccaacaacgaggaguucgacaagcucuacaucuggggcguccaccaccccggcaccuacaacgaccagaucucccucuacgcccaggccuccggccgcaucaccgucuccaccaagcgcucccagcagaccgucauccccaacaucggcucccgcccccgcguccgcgacauccccucccgcaucuccaucuacuggaccaucgucaagcccggcgacauccuccucaucaacuccaccggcaaccucaucgccccccgcggcuacuucaagauccgcuccggcaaguccuccaucaugcgcuccgacgcccccaucggcaagugcaacuccgagugcaucacccccaacggcuccauccccaacgacaagcccuuccagaacgucaaccgcaucaccuacggcgccugcccccgcuacgucaagcagaacacccucaagcucgccaccggcaugcgcaacguccccgagaagcagacccgcggcaucuucggcgccaucgccggcuucaucgagaacggcugggagggcauggucgacggcugguacggcuuccgccaccagaacuccgagggcaucggccaggccgccgaccucaaguccacccaggccgccaucgaccagaucaacggcaagcucaaccgccucaucggcaagaccaacgagaaguuccaccagaucgagaaggaguucuccgaggucgagggccgcauccaggaccucgagaaguacgucgaggacaccaagaucgaccucugguccuacaacgccgagcuccucgucgcccucgagaaccagcacaccaucgaccucaccgacuccgagaugaacaagcucuucgagcgcaccaagaagcagcuccgcgagaacgccgaggacaugggcaacggcugcuucaagaucuaccacaagugcgacaacgccugcaucggcuccauccgcaacggcaccuacgaccacgacgucuaccgcgacgaggcccucaacaaccgcuuccagaucaagggcgucgagcucaaguccggcuacaaggacuggauccucuggaucuccuucgccaucuccugcuuccuccucugcgucgcccuccucggcuucaucaugugggccugccagaagggcaacauccgcugcaacaucugcaucuga

SEQ ID NO: 97301 - RNA, 1701 nt, Artificial Sequence; identical to SEQ ID NO: 96669
  derived and/or modified CDS sequence (opt2) from hemagglutinin__InfluenzaA__ABI30799

SEQ ID NO: 97302 - RNA, 1701 nt, Artificial Sequence
  derived and/or modified CDS sequence (opt2) from hemagglutinin__InfluenzaA__ABI30810
augaagaccaucaucgcccucuccuacauccucugccucgucuucgcccagaagcuccccggcaacgacaacuccaccgccacccucugccucggccaccacgccguccccaacggcaccaucgucaagaccaucaccaacgaccagaucgaggucaccaacgccaccgagcucguccaguccuccuccaccggcggcaucugcgacuccccccaccagauccucgacggcgagaacugcacccucaucgacgcccuccucggcgacccccagugcgacggcuuccagaacaagaagugggaccucuucgucgagcgcuccaaggccuacuccaacugcuaccccuacgacguccccgacuacgccucccuccgcucccucaucgccuccuccggcacccucgaguucaacaacgaguccuucaacuggaccggcgucacccagaacggcaccuccuccgccugcaagcgccgcuccaacuccuccuucuucucccgccucaacuggcucacccaccucaaguucaaguaccccgcccucaacgucaccaugcccaacaacgaggaguucgacaagcucuacaucuggggcguccaccaccccggcaccuacaacgaccagaucucccucuacgcccaggccuccggccgcaucaccgucuccaccaagcgcucccagcagaccgucauccccaacaucggcucccgcccccgcguccgcgacauccccucccgcaucuccaucuacuggaccaucgucaagcccggcgacauccuccucaucaacuccaccggcaaccucaucgccccccgcggcuacuucaagauccgcuccggcaaguccuccaucaugcgcuccgacgcccccaucggcaagugcaacuccgagugcaucacccccaacggcuccauccccaacgacaagcccuuccagaacgucaaccgcaucaccuacggcgccugcccccgcuacgucaagcagaacacccucaagcucgccaccggcaugcgcaacguccccgagaagcagacccgcggcaucuucggcgccaucgccggcuucaucgagaacggcugggagggcauggucgacggcugguacggcuuccgccaccagaacuccgagggcaucggccaggccgccgaccucaaguccacccaggccgccaucgaccagaucaacggcaagcucaaccgccucaucggcaagaccaacgagaaguuccaccagaucgagaaggaguucuccgaggucgagggccgcauccaggaccucgagaaguacgucgaggacaccaagaucgaccucugguccuacaacgccgagcuccucgucgcccucgagaaccagcacaccaucgaccucaccgacuccgagaugaacaagcucuucgagcgcaccaagaagcagcuccgcgagaacgccgaggacaugggcaacggcugcuucaagaucuaccacaagugcgacaacgccugcaucggcuccaucaagaacggcaccuacgaccacgacgucuaccgcgacgaggcccucaacaaccgcuuccagaucaagggcgucgagcucaaguccggcuacaaggacuggauccucuggaucuccuucgccaucuccugcuuccuccucugcgucgcccuccucggcuucaucaugugggccugccagaagggcaacauccgcugcaacaucugcaucuga

SEQ ID NO: 97303 - RNA, 1701 nt, Artificial Sequence
  derived and/or modified CDS sequence (opt2) from hemagglutinin__InfluenzaA__ABI30821
augaagaccaucaucgcccucuccuacauccucugccucgucuucgcccagaagcuccccggcaacgacaacuccaccgccacccucugccucggccaccacgccguccccaacggcaccaucgucaagaccaucaccaacgaccagaucgaggucaccaacgccaccgagcucguccaguccuccuccaccggcggcaucugcgacuccccccaccagauccucgacggcgagaacugcacccucaucgacgcccuccucggcgacccccagugcgacggcuuccagaacaagaagugggaccucuucgucgagcgcuccaaggccuacuccaacugcuaccccuacgacguccccgacuacgccucccuccgcucccucaucgccuccuccggcacccucgaguucaacaacgaguccuucaacuggaccggcgucacccagaacggcaccuccuccgccugcaagcgccgcuccaacuccuccuucuucucccgccucaacuggcucacccaccucaaguucaaguaccccgcccucaacgucgccaugcccaacaacgaggaguucgacaagcucuacaucuggggcguccaccaccccggcaccuacaacgaccagaucucccucuacgcccaggccuccggccgcaucaccgucuccaccaagcgcucccagcagaccgucauccccaacaucggcucccgcccccgcguccgcgacauccccucccgcaucuccaucuacuggaccaucgucaagcccggcgacauccuccucaucaacuccaccggcaaccucaucgccccccgcggcuacuucaagauccgcuccggcaaguccuccaucaugcgcuccgacgcccccaucggcaagugcaacuccgagugcaucacccccaacggcuccauccccaacgacaagcccuuccagaacgucaaccgcaucaccuacggcgccugcccccgcuacgucaagcagaacacccucaagcucgccaccggcaugcgcaacguccccgagaagcagacccgcggcaucuucggcgccaucgccggcuucaucgagaacggcugggagggcauggucgacggcugguacggcuuccgccaccagaacuccgagggcaucggccaggccgccgaccucaaguccacccaggccgccaucgaccagaucaacggcaagcucaaccgccucaucggcaagaccaacgagaaguuccaccagaucgagaaggaguucuccgaggucgagggccgcauccaggaccucgagaaguacgucgaggacaccaagaucgaccucugguccuacaacgccgagcuccucgucgcccucgagaaccagcacaccaucgaccucaccgacuccgagaugaacaagcucuucgagcgcaccaagaagcagcuccgcgagaacgccgaggacaugggcaacggcugcuucaagaucuaccacaagugcgacaacgccugcaucggcuccauccgcaacggcaccuacgaccacgacgucuaccgcgacgaggcccucaacaaccgcuuccagaucaagggcgucgagcucaaguccggcuacaaggacuggauccucuggaucuccuucgccaucuccugcuuccuccucugcgucgcccuccucggcuucaucaugugggccugccagaagggcaacauccgcugcaacaucugcaucuga

SEQ ID NO: 97304 - RNA, 1701 nt, Artificial Sequence; identical to SEQ ID NO: 96669
  derived and/or modified CDS sequence (opt2) from hemagglutinin__InfluenzaA__ABI30832

SEQ ID NO: 97305 - RNA, 1701 nt, Artificial Sequence
  derived and/or modified CDS sequence (opt2) from hemagglutinin__InfluenzaA__ABI30843
augaagaccaucaucgcccucuccuacauccucugccucgucuucgcccagaagcuccccggcaacgacaacuccaccgccacccucugccucggccaccacgccguccccaacggcaccaucgucaagaccaucaccaacgaccagaucgaggucaccaacgccaccgagcucguccaguccuccuccaccggcggcaucugcgacuccccccaccagauccucgacggcgagaacugcacccucaucgacgcccuccucggcgacccccagugcgacggcuuccagaacaagaagugggaccucuucgucgagcgcuccaaggccuacuccaacugcuaccccuacgacguccccgacuacgccucccuccgcucccucaucgccuccuccggcacccucgaguucaacaacgaguccuucaacuggaccggcgucacccagaacggcaccuccuccgccugcaagcgccgcuccaacuccuccuucuucucccgccucaacuggcucacccaccucaaguucaaguaccccgcccucaacgucaccaugcccaacaacgaggaguucgacaagcucuacaucuggggcguccaccaccccggcaccuacaacgaccagaucucccucuacgcccaggccuccggccgcaucaccgucuccaccaagcgcucccagcagaccgucauccccaacaucggcucccgcccccgcguccgcgacauccccucccgcaucuccaucuacuggaccaucgucaagcccggcgacauccuccucaucaacuccaccggcaaccucaucgccccccgcggcuacuucaagauccgcuccggcaaguccuccaucaugcgcuccgacgcccccaucggcaagugcaacuccgagugcaucacccccaacggcuccauccccaacgacaagcccuuccagaacgucaaccgcaucaccuacggcgccugcccccgcuacgucaagcagaacacccucaagcucgccaccggcaugcgcaacguccccgagaagcagacccgcggcaucuucggcgccaucgccggcuucaucgagaacggcugggagggcauggucgacggcugguacggcuuccgccaccagaacuccgagggcaucggccaggccgccgaccucaaguccacccaggccgccaucgaccagaucaacggcaagcucaaccgccucaucggcaagaccaacgagaaguuccaccagaucgagaaggaguucuccgaggucgagggccgcauccaggaccucgagaaguacgucgaggacaccaagaucgaccucugguccuacaacgccgagcuccucgucgcccucgagaaccagcacaccaucgaccucaccgacuccgagaugaacaagcucuucgagcgcacccgcaagcagcuccgcgagaacgccgaggacaugggcaacggcugcuucaagaucuaccacaagugcgacaacgccugcaucggcuccauccgcaacggcaccuacgaccacgacgucuaccgcgacgaggcccucaacaaccgcuuccagaucaagggcgucgagcucaaguccggcuacaaggacuggauccucuggaucuccuucgccaucuccugcuuccuccucugcgucgcccuccucggcuucaucaugugggccugccagaagggcaacauccgcugcaacaucugcaucuga

SEQ ID NO: 97306 - RNA, 1701 nt, Artificial Sequence; identical to SEQ ID NO: 97249
  derived and/or modified CDS sequence (opt2) from hemagglutinin__InfluenzaA__ABI30865

SEQ ID NO: 97307 - RNA, 1707 nt, Artificial Sequence
  derived and/or modified CDS sequence (opt2) from hemagglutinin__InfluenzaA__ABI36155
auggagaagaucguccuccuccucgccaccgucucccucgucaaguccgaccagaucugcaucggcuaccacgccaacaacuccaccgagcaggucgacaccaucauggagaagaacgucaccgucacccacgcccaggacauccucgagaagacccacaacggcaagcucugcgaccucgacggcgucaagccccucauccuccgcgacugcuccgucgccggcuggcuccucggcaaccccaugugcgacgaguucaucaacguccccgagugguccuacaucgucgagaaggccaaccccgccaacggccucugcuaccccggcaacuucaacgacuacgaggagcucaagcaccuccucucccgcaucaaccacuucgagaagcuccagaucauccccaaguccuccugguccgaccacgaggccucccucggcgucuccuccgccugccccuaccucggccgcuccuccuucuuccgcaacgucgucuggcucaucaagaagaacaacaccuaccccaccaucaagcgcuccuacaacaacaccaaccaggaggaccuccucguccucuggggcauccaccaccccaacgacgccgccgagcagacccgccucuaccagaaccccaccaccuacaucuccgucggcaccuccacccucaaccagcgccucguccccaagaucgccacccgcuccaaggucaacggccaguccggccgcauggaguucuucuggaccauccucaagcccaacgacgccaucaacuucgaguccaacggcaacuucaucgcccccgaguacgccuacaagaucgucaagaagggcgacuccgccaucaugaaguccgagcucgaguacggcgacugcaacaccaagugccagacccccaugggcgccaucaacuccuccaugccccuccacaacauccacccccucaccaucggcgagugccccaaguacgucaaguccaaccgccucguccucgccaccggccuccgcaacuccccccagcgcgagcgccgccgcaagaagcgcggccucuucggcgccaucgccggcuucaucgagggcggcuggcagggcauggucgacggcugguacggcuaccaccacuccaacgagcagggcuccggcuacgccgccgacaaggaguccacccagaaggccaucgacggcgucaccaacaaggucaacuccaucaucgacaagaugaacacccaguucgaggccgucggccgcgaguucaacaaccucgagcgccgcaucgagaaccucaacaagaagauggaggacggcuuccucgacgucuggaccuacaacgccgagcuccucguccucauggagaacgagcgcacccucgacuuccacgacuccaacgucaagaaccucuacgacaagguccgccuccagcuccgcgacaacgccaaggagcucggcaacggcugcuucgaguucuaccacaagugcgacaacgagugcauggaguccauccgcaacggcaccuacaacuacccccaguacuccgaggaggcccgccucaagcgcgaggagaucuccggcgucaagcucgaguccaucggcaucuaccagauccucuccaucuacuccaccgucgccuccucccucgcccucgccaucaugauggccggccucucccucuggaugugcuccaacggcucccuccagugccgcgucugcaucuga

SEQ ID NO: 97308 - RNA, 1707 nt, Artificial Sequence
  derived and/or modified CDS sequence (opt2) from hemagglutinin__InfluenzaA__ABI36166
auggagaagaucguccuccuccucgccaccgucucccucgucaaguccgaccagaucugcaucggcuaccacgccaacaacuccaccgagcaggucgacaccaucauggagaagaacgucaccgucacccacgcccaggacauccucgagaagacccacaacggcaagcucugcgaccucgacggcgucaagccccucauccuccgcgacugcuccgucgccggcuggcuccucggcaaccccaugugcgacgaguucaucaacguccccgagugguccuacaucgucgagaaggccaaccccgccaacggccucugcuaccccggcaacuucaacgacuacgaggagcucaagcaccuccucucccgcaucaaccacuucgagaagcuccagaucauccccaaguccuccugguccgaccacgaggccucccucggcgucuccuccgccugccccuaccucggccgcuccuccuucuuccgcaacgucgucuggcucaucaagaagaacaacaccuaccccaccaucaagcgcuccuacaacaacaccaaccaggaggaccuccucguccucuggggcauccaccaccccaacgacgccgccgagcagacccgccucuaccagaaccccaccaccuacaucuccgucggcaccuccacccucaaccagcgccucguccccaagaucgccacccgcuccaaggucaacggccaguccggccgcauggaguucuucuggaccauccucaagcccaacgacgccaucaacuucgaguccaacggcaacuucaucgcccccgaguacgccuacaagaucgucaagaagggcgacuccgccaucaugaaguccgagcucgaguacggcgacugcaacaccaagugccagacccccaugggcgccaucaacuccuccaugcccuuccacaacauccacccccucaccaucggcgagugccccaaguacgucaaguccaaccgccucguccucgccaccggccuccgcaacuccccccagcgcgagcgccgccgcaagaagcgcggccucuucggcgccaucgccggcuucaucgagggcggcuggcagggcauggucgacggcugguacggcuaccaccacuccaacgagcagggcuccggcuacgccgccgacaaggaguccacccagaaggccaucgacggcgucaccaacaaggucaacuccaucaucgacaagaugaacacccaguucgaggccgucggccgcgaguucaacaaccucgagcgccgcaucgagaaccucaacaagaagauggaggacggcuuccucgacgucuggaccuacaacgccgagcuccucguccucauggagaacgagcgcacccucgacuuccacgacuccaacgucaagaaccucuacgacaagguccgccuccagcuccgcgacaacgccaaggagcucggcaacggcugcuucgaguucuaccacaagugcgacaacgagugcauggaguccauccgcaacggcaccuacaacuacccccaguacuccgaggaggcccgccucaagcgcgaggagaucuccggcgucaagcucgaguccaucggcaucuaccagauccucuccaucuacuccaccgucgccuccucccucgcccucgccaucaugauggccggccucucccucuggaugugcuccaacggcucccuccagugccgcgucugcaucuga

SEQ ID NO: 97309 - RNA, 1707 nt, Artificial Sequence; identical to SEQ ID NO: 97308
  derived and/or modified CDS sequence (opt2) from hemagglutinin__InfluenzaA__ABI36177

SEQ ID NO: 97310 - RNA, 1707 nt, Artificial Sequence
  derived and/or modified CDS sequence (opt2) from hemagglutinin__InfluenzaA__ABI36406
auggagaagaucguccuccuccucgccaccgucucccucgucaaguccgaccagaucugcaucggcuaccacgccaacaacuccaccgagcaggucgacaccaucauggagaagaacgucaccgucacccacgcccaggacauccucgagaagacccacaacggcaagcucugcgaccucgacggcgucaagccccucauccuccgcgacugcuccgucgccggcuggcuccucggcaaccccaugugcgacgaguucaucaacguccccgagugguccuacaucgucgagaaggccaaccccgccaacggccucugcuaccccggcaacuucaacgacuacgaggagcucaagcaccuccucucccgcaucaaccacuucgagaagcuccagaucauccccaaguccuccugguccgaccacgaggccucccucggcgucuccuccgccugccccuaccucggccgcuccuccuucuuccgcaacgucgucuggcucaucaagaagaacaacaccuaccccaccaucaagcgcuccuacaacaacaccaaccaggaggaccuccucguccucuggggccuccaccaccccaacgacgccgccgagcagacccgccucuaccagaaccccaccaccuacaucuccgucggcaccuccacccucaaccagcgccucguccccaagaucgccacccgcuccaaggucaacggccaguccggccgcauggaguucuucuggaccauccucaagcccaacgacgccaucaacuucgaguccaacggcaacuucaucgcccccgaguacgccuacaagaucgucaagaagggcgacuccgccaucaugaaguccgagcucgaguacggcgacugcaacaccaagugccagacccccaugggcgccaucaacuccuccaugcccuuccacaacauccacccccucaccaucggcgagugccccaaguacgucaaguccaaccgccucguccucgccaccggccuccgcaacuccccccagcgcgagcgccgccgcaagaagcgcggccucuucggcgccaucgccggcuucaucgagggcggcuggcagggcauggucgacggcugguacggcuaccaccacuccaacgagcagggcuccggcuacgccgccgacaaggaguccacccagaaggccaucgacggcgucaccaacaaggucaacuccaucaucgacaagaugaacacccaguucgaggccgucggccgcgaguucaacaaccucgagcgccgcaucgagaaccucaacaagaagauggaggacggcuuccucgacgucuggaccuacaacgccgagcuccucguccucauggagaacgagcgcacccucgacuuccacgacuccaacgucaagaaccucuacgacaagguccgccuccagcuccgcgacaacgccaaggagcucggcaacggcugcuucgaguucuaccacaagugcgacaacgagugcauggaguccauccgcaacggcaccuacaacuacccccaguacuccgaggaggcccgccucaagcgcgaggagaucuccggcgucaagcucgaguccaucggcaucuaccagauccucuccaucuacuccaccgucgccuccucccucgcccucgccaucaugauggccggccucucccucuggaugugcuccaacggcucccuccagugccgcgucugcaucuga

SEQ ID NO: 97311 - RNA, 1707 nt, Artificial Sequence
  derived and/or modified CDS sequence (opt2) from hemagglutinin__InfluenzaA__ABI36450
auggagaagaucguccuccuccucgccaucgucucccucgucaaguccgaccagaucugcaucggcuaccacgccaacaacuccaccgagcaggucgacaccaucauggagaagaacgucaccgucacccacgcccaggacauccucggcaagacccacaacggcaagcucugcgaccucgacggcgucaagccccucauccuccgcgacugcuccgucgccggcuggcuccucggcaaccccaugugcgacgaguucaucaacguccccgagugguccuacaucgucgagaaggccaaccccaccaacgaccucugcuaccccggcuccuucaacgacuacgaggagcucaagcaccuccucucccgcaucaaccacuucgagaagauccagaucauccccaaguccuccugguccgaccacgaggccuccuccggcgucuccuccgccugccccuaccucggcucccccuccuucuuccgcaacgucgucuggcucaucaagaagaacuccaccuaccccaccaucaagaccuccuacaacaacaccaaccaggaggaccuccucguccucuggggcauccaccacuccaacgacgccgccgagcagacccgccucuaccagaaccccaccaccuacaucuccaucggcaccuccacccucaaccagcgccucguccccaagaucgccacccgcuccaaggucaacggccaguccggccgcauggaguucuucuggaccauccucaagcccaacgacgccaucaacuucgaguccaacggcaacuucaucgcccccgaguacgccuacaagaucgucaagaagggcgacuccgccaucaugaaguccgagcucgaguacggcaacugcaacaccaagugccagacccccaugggcgccaucaacuccuccaugcccuuccacaacauccacccccucaccaucggcgagugccccaaguacgucaaguccaaccgccucguccucgccaccggccuccgcaacuccccccagcgcgagucccgccgcaagaagcgcggccucuucggcgccaucgccggcuucaucgagggcggcuggcagggcauggucgacggcugguacggcuaccaccacuccaacgagcagggcuccggcuacgccgccgacaaggaguccacccagaaggccaucgacggcgucaccaacaaggucaacuccaucaucgacaagaugaacacccaguucgaggccgucggccgcgaguucaacaaccucgagcgccgcaucgagaaccucaacaagaagauggaggacggcuuccucgacgucuggaccuacaacgccgagcuccucguccucauggagaacgagcgcacccucgacuuccacgacuccaacgucaagaaccucuacgacaagguccgccuccagcuccgcgacaacgccaaggagcucggcaacggcugcuucgaguucuaccacaagugcgacaacgagugcauggaguccauccgcaacggcaccuacaacuacccccaguacuccgaggaggcccgccucaagcgcgaggagaucuccggcgucaagcucgaguccaucggcaccuaccagauccucuccaucuacuccaccgucgccuccucccucgcccucgccaucaugaucgccggccucucccucuggaugugcuccaacggcucccuccagugccgcaucugcaucuga

SEQ ID NO: 97312 - RNA, 1707 nt, Artificial Sequence
  derived and/or modified CDS sequence (opt2) from hemagglutinin__InfluenzaA__ABI49396
auggagaagaucguccuccuccucgccaucgucucccucgucaaguccgaccagaucugcaucggcuaccacgccaacaacuccaccgagcaggucgacaccaucauggagaagaacgucaccgucacccacgcccaggacauccucggcaagacccacaacggcaagcucugcgaccucgacggcgucaagccccucauccuccgcgacugcuccgucgccggcuggcuccucggcaaccccaugugcgacgaguucaucaacguccccgagugguccuacaucgucgagaaggccaaccccaccaacgaccucugcuaccccggcuccuucaacgacuacgaggagcucaagcaccuccucucccgcaucaaccacuucgagaagauccagaucauccccaaguccuccugguccgaccacgaggccuccuccggcgucuccuccgccugccccuaccucggcucccccuccuucuuccgcaacgucgucuggcucaucaagaagaacuccaccuaccccaccaucaagaaguccuacaacaacaccaaccaggaggaccuccucguccucuggggcauccaccaccccaacgacgccgccgagcagacccgccucuaccagaaccccaccaccuacaucuccaucggcaccuccacccucaaccagcgccucguccccaagaucgccacccgcuccaaggucaacggccaguccggccgcauggaguucuucugggccauccucaagcccaacgacgccaucaacuucgaguccaacggcaacuucaucgcccccgaguacgccuacaagaucgucaagaagggcgacuccgccaucaugaaguccgagcucgaguacggcaacugcaacaccaagugccagacccccaugggcgccaucaacuccuccaugcccuuccacaacauccacccccucaccaucggcgagugccccaaguacgucaaguccaaccgccucguccucgccaccggccuccgcaacuccccccagcgcgagucccgccgcaagaagcgcggccucuucggcgccaucgccggcuucaucgagggcggcuggcagggcauggucgacggcugguacggcuaccaccacuccaacgagcagggcuccggcuacgccgccgacaaggaguccacccagaaggccaucgacggcgucaccaacaaggucaacuccaucaucgacaagaugaacacccaguucgaggccgucggccgcgaguucaacaaccucgagcgccgcaucgagaaccucaacaagaagauggaggacggcuuccucgacgucuggaccuacaacgccgagcuccucguccucauggagaacgagcgcacccucgacuuccacgacuccaacgucaagaaccucuacgacaagguccgccuccagcuccgcgacaacgccaaggagcucggcaacggcugcuucgaguucuaccacaagugcgacaacgagugcauggaguccauccgcaacggcaccuacaacuacccccaguacuccgaggaggcccgccucaagcgcgaggagaucuccggcgucaagcucgaguccaucggcaccuaccagauccucuccaucuacuccaccgucgccuccucccucgcccucgccaucaugaucgccggccucucccucuggaugugcuccaacggcucccuccagugccgcaucugcaucuga

SEQ ID NO: 97313 - RNA, 1704 nt, Artificial Sequence
  derived and/or modified CDS sequence (opt2) from hemagglutinin__InfluenzaA__ABI85000
augaacacccagauccucgccuucaucgccugcaugcucaucggcaccaagggcgacaagaucugccucggccaccacgccgucgccaacggcaccaaggucaacacccucaccgagcgcggcaucgaggucgucaacgccaccgagaccgucgagaccgucaacaucaagaagaucugcacccagggcaagcgccccaccgaccucggccagugcggccuccucggcacccucaucggccccccccagugcgaccaguuccucgaguucgacgccaaccucaucaucgagcgccgcgagggcaccgacgucugcuaccccggcaaguucaccaacgaggagucccuccgccagauccuccgcggcuccggcggcaucgacaaggaguccaugggcuucaccuacuccggcauccgcaccaacggcgccaccuccgccugccgccgcuccggcuccuccuucuacgccgagaugaaguggcuccucuccaacuccgacaacgccgccuucccccagaugaccaaguccuaccgcaacccccgcaacaagcccgcccucaucaucuggggcguccaccacuccggcuccgccaccgagcagaccaagcucuacggcuccggcaacaagcucaucaccgucggcuccuccaaguaccagcaguccuucacccccucccccggcgcccgcccccaggucaacggccaguccggccgcaucgacuuccacuggcuccuccucgaccccaacgacaccgucaccuucaccuucaacggcgccuucaucgcccccgaccgcgccuccuucuuccgcggcgagucccucggcguccaguccgacgucccccucgacuccggcugcgagggcgacugcuuccacuccggcggcaccaucgucuccucccuccccuuccagaacaucaacccccgcaccgucggcaagugcccccgcuacgucaagcagaccucccuccuccucgccaccggcaugcgcaacguccccgagaaccccaagcaggccuaccagaagcgcaugacccgcggccucuucggcgccaucgccggcuucaucgagaacggcugggagggccucaucgacggcugguacggcuuccgccaccagaacgcccagggcgagggcaccgccgccgacuacaaguccacccaguccgccaucgaccagaucaccggcaagcucaaccgccucaucgacaagaccaaccagcaguucgagcucaucgacaacgaguucuccgagaucgagcagcagaucggcaacgucaucaacuggacccgcgacuccaugaccgaggucugguccuacaacgccgagcuccucgucgccauggagaaccagcacaccaucgaccucgccgacuccgagaugaacaagcucuacgagcgcguccgcaagcagcuccgcgagaacgccgaggaggacggcaccggcugcuucgagaucuuccacaagugcgacgaccagugcauggaguccauccgcaacaacaccuacgaccacacccaguaccgcaccgagucccuccagaaccgcauccagaucgaccccgucaagcucuccuccggcuacaaggacaucauccucugguucuccuucggcgccuccugcuuccuccuccucgccaucgccaugggccucgucuucaucugcaucaagaacggcaacaugcgcugcaccaucugcaucuga

SEQ ID NO: 97314 - RNA, 1701 nt, Artificial Sequence; identical to SEQ ID NO: 96866
  derived and/or modified CDS sequence (opt2) from hemagglutinin__InfluenzaA__ABI92291

SEQ ID NO: 97315 - RNA, 1701 nt, Artificial Sequence
  derived and/or modified CDS sequence (opt2) from hemagglutinin__InfluenzaA__ABI92302
augaaggccaagcuccucguccuccucugcgcccucuccgccaccgacgccgacaccaucugcaucggcuaccacgccaacaacuccaccgacaccgucgacaccguccucgagaagaacgucaccgucacccacuccgucaaccuccucgaggacucccacaacggcaagcucugccgccucaagggcaucgccccccuccagcucggcaagugcuccaucgccggcuggauccucggcaaccccgagugcgagucccucuucuccaagaaguccugguccuacaucgccgagacccccaacuccgagaacggcaccugcuaccccggcuacuucgccgacuacgaggagcuccgcgagcagcucuccuccgucuccuccuucgagcgcuucgagaucuuccccaaggaguccuccuggcccaagcacaacgucacccgcggcgucaccgccuccugcucccacaagggcaaguccuccuucuaccgcaaccuccucuggcucaccgagaagaacggcuccuaccccaaccucuccaaguccuacgucaacaacaaggagaaggagguccucguccucuggggcguccaccaccccuccaacaucgaggaccagaagaccaucuaccgcaaggagaacgccuacgucuccgucgucuccucccacuacaaccgccgcuucacccccgagaucgccaagcgccccaagguccgcgaccaggagggccgcaucaacuacuacuggacccuccucgagcccggcgacaccaucaucuucgaggccaacggcaaccucaucgcccccugguacgccuucgcccucucccgcggcuucggcuccggcaucaucaccuccaacgccuccauggacgagugcgacgccaagugccagaccccccagggcgccaucaacuccucccuccccuuccagaacguccaccccgucaccaucggcgagugccccaaguacguccgcuccaccaagcuccgcauggucaccggccuccgcaacauccccuccauccagucccgcggccucuucggcgccaucgccggcuucaucgagggcggcuggaccggcaugaucgacggcugguacggcuaccaccaccagaacgagcagggcuccggcuacgccgccgaccagaaguccacccagaacgccaucaacggcaucaccaacaaggucaacuccgucaucgagaagaugaacauccaguucaccgccgucggcaaggaguucaacaagcucgagaagcgcauggagaaccucaacaagaaggucgacgacggcuuccucgacaucuggaccuacaacgccgagcuccucguccuccucgagaacgagcgcacccucgacuuccacgacuccaacgucaagaaccucuacgagaaggucaagucccagcucaagaacaacgccaaggagaucggcaacggcugcuucgaguucuaccacaagugcaacaacgagugcauggaguccgucaagaacggcaccuacgacuaccccaaguacuccgaggaguccaagcucaaccgcgagaagaucgacggcgucaagcucgaguccaugggcgucuaccagauccucgccaucuacuccaccgucgccuccucccucguccuccucgucucccucggcgccaucuccuucuggaugugcuccaacggcucccuccagugccgcaucugcaucuga

SEQ ID NO: 97316 - RNA, 1701 nt, Artificial Sequence
  derived and/or modified CDS sequence (opt2) from hemagglutinin__InfluenzaA__ABI92313
augaaggccaagcuccucguccuccucugcgccuucaccgccaccuacgccgacaccaucugcaucggcuaccacgccaacaacuccaccgacaccgucgacaccguccucgagaagaacgucaccgucacccacuccgucaaccuccucgaggacucccacaacggcaagcucugccgccucaagggcaccgccccccuccagcucggcaacugcuccgucgccggcuggauccucggcaaccccgagugcgagucccucuucuccaaggaguccugguccuacaucgccgagacccccaaccccgagaacggcaccugcuaccccggcuacuucgccgacuacgaggagcuccgcgagcagcucuccuccaucuccuccuucgagcgcuucgagaucuuccccaaggaguccuccuggcccaaccacaccgucaccaagggcgucaccgccuccugcucccacaacggcaaguccuccuucuacaagaaccuccucuggcucaccgagaagaacggccucuaccccaaccucuccaaguccuacgucaacaacaaggagaaggagguccucguccucuggggcguccaccaccccuccaacaucggcgaccagcgcgccaucuaccacaccgagaacgccuacgucuccgucgucuccucccacuacucccgccgcuucacccccgagaucaccaagcgccccaagguccgcgaccaggagggccgcaucaacuacuacuggacccuccucgagcccggcgacaccaucaucuucgaggccaacggcaaccucaucgcccccugguacgccuucgcccucucccgcggcuucggcuccggcaucaucaccuccaacgccuccaugggcgagugcgacgccaagugccagaccccccagggcgccaucaacuccucccuccccuuccagaacguccaccccgucaccaucggcgagugccccaaguacguccgcuccaccaagcuccgcauggucaccggccuccgcaacauccccuccauccagucccgcggccucuucggcgccaucgccggcuucaucgagggcggcuggaccggcaugaucgacggcugguacggcuaccaccaccagaacgagcagggcuccggcuacgccgccgaccagaaguccacccagaacgccaucgacggcaucaccaacaaggucaacuccgucaucgagaagaugaacacccaguucaccgccgucggcaaggaguucaacaagcucgagcgccgcauggagaaccucaacaagaaggucgacgacggcuuccucgacaucuggaccuacaacgccgagcuccucguccuccucgagaacgagcgcacccucgacuuccacgacuccaacgucaagaaccucuacgagaaggucaagaaccagcucaagaacaacgccaaggagaucggcaacggcugcuucgaguucuaccacaagugcaacaacgagugcauggaguccgucaagaacggcaccuacgacuaccccaaguacuccgaggaguccaagcucaaccgcgagaagaucgacggcgucaagcucgaguccaugggcgucuaccacauccucgccaucuacuccaccgucgccuccucccucguccuccucgucucccucggcgccaucuccuucuggaugugcuccaacggcucccuccagugccgcaucugcaucuga

SEQ ID NO: 97317 - RNA, 1701 nt, Artificial Sequence
  derived and/or modified CDS sequence (opt2) from hemagglutinin__InfluenzaA__ABI92324
augaagaccaucaucgcccucuccuacauccucugccucgucuucgcccagaagcuccccggcaacgacaacuccaccgccacccucugccucggccaccacgccguccccaacggcacccucgucaagaccaucaccaacgaccagaucgaggucaccaacgccaccgagcucguccaguccuccuccaccggccgcaucugcgacuccccccaccgcauccucgacggcaagaacugcacccucaucgacgcccuccucggcgacccccacugcgacggcuuccagaacaaggagugggaccucuucgucgagcgcuccaaggccuacuccaacugcuaccccuacgacguccccgacuacgccucccuccgcucccucgucgccuccuccggcacccucgaguucaucaacgaggacuucaacuggaccggcgucgcccaggacggcaaguccuacgccugcaagcgcggcuccgucaacuccuucuucucccgccucaacuggcuccacaagcucgaguacaaguaccccgcccucaacgucaccaugcccaacaacggcaaguucgacaagcucuacaucuggggcguccaccaccccuccaccgacuccgaccagaccucccucuacguccgcgccuccggcaaggucaccgucuccaccaagcgcucccagcagaccgucauccccaacaucggcuuccgccccuggguccgcggccucuccucccgcaucuccaucuacuggaccaucgucaagcccggcgacauccuccucaucaacuccaccggcaaccucaucgccccccgcggcuacuucaagauccgcaacggcaaguccuccaucaugcgcuccgacgcccccaucggcaacugcuccuccgagugcaucacccccaacggcuccauccccaacgacaagcccuuccagaacgucaaccgcaucaccuacggcgccugcccccgcuacgucaagcagaacacccucaagcucgccaccggcaugcgcaacguccccgagaagcagacccgcggcaucuucggcgccaucgccggcuucaucgagaacggcugggagggcauggucgacggcugguacggcuuccgccaccagaacuccgagggcaccggccaggccgccgaccucaaguccacccaggccgccaucgaccagaucaacggcaagcucaaccgccucaucgagaagaccaacgagaaguuccaccagaucgagaaggaguucuccgaggucgagggccgcauccaggaccucgagaaguacgucgaggacaccaagaucgaccucugguccuacaacgccggccuccucgucgcccucgagaaccagcacaccaucgaccucaccgacuccgagaugaacaagcucuucgagcgcacccgcaagcagcuccgcgagaacgccgaggacaugggcaacggcugcuucaagaucuaccacaagugcgacaacgccugcaucggcuccauccgcaacggcaccuacgaccacgacgucuaccgcgacgaggcccucaacaaccgcuuccagaucaagggcgucgagcucaaguccggcuacaaggacuggauccucuggaucuccuucgccaucuccugcuuccuccucugcgucguccuccucggcuucaucaugugggccugccagaagggcaacauccgcugcaacaucugcaucuga

SEQ ID NO: 97318 - RNA, 1701 nt, Artificial Sequence
  derived and/or modified CDS sequence (opt2) from hemagglutinin__InfluenzaA__ABI92335
augaagaccaucaucgcccucuccuacauccucugccucgucuucgcccagaagcuccccggcaacgacaacuccaccgccacccucugccucggccaccacgccguccccaacggcacccucgucaagaccaucaccaacgaccagaucgaggucaccaacgccaccgagcucguccaguccuccuccaccucccgcaucugcgacuccccccaccagauccucgacggcgagaacugcacccucaucgacgcccuccucggcgacccccacugcgacggcuuccagaacaaggagugggaccucuucgucgagcgcuccaaggccuacuccaacugcuaccccuacgacguccccgacuacgucucccuccgcucccucgucgccuccuccggcacccucgaguucaacaacgaguccuucaacuggaccggcgucgcccagaacggcaccuccuccgccugcaagcgccgcuccgacaaguccuucuucucccgccucaacuggcuccaccagcucaaguacaaguaccccgcccucaacgucaccaugcccaacaacgagaaguucgacaagcucuacaucuggggcguccaccaccccggcaccgacuccgaccagaucucccucuacgcccaggccuccggccgcgucaccgucuccaccaagcgcucccagcagaccgucauccccaacaucggcucccgccccuggguccgcggcgucuccucccgcaucuccaucuacuggaccaucgucaagcccggcgacauccuccucaucaacuccaccggcaaccucaucgccccccgcggcuacuucaagauccgcuccggcaaguccuccaucaugcgcuccgacgcccccaucggcaagugcaacuccgagugcaucacccccaacggcuccauccccaacgacaagcccuuccagaacgucaaccgcaucaccuacggcgccugcccccgcuacgucaagcagaacacccucaagcucgccaccggcaugcgcaacguccccgagaagcagacccgcggcaucuucggcgccaucgccggcuucaucgagaacggcugggagggcaugauggacggcugguacggcuuccgccaccagaacuccgagggcaccggccaggccgccgaccucaaguccacccaggccgccaucaaccagaucaacggcaagcucaaccgccucaucgagaagaccaacgagaaguuccaccagaucgagaaggaguucuccgaggucgagggccgcauccaggaccucgagaaguacgucgaggacaccaagaucgaccucugguccuacaacgccgagcuccucgucgcccucgagaaccagcacaccaucgaccucaccgacuccgagaugaacaagcucuucgagcgcaccaagaagcagcuccgcgagaacgccgaggacaugggcaacggcugcuucaagaucuaccacaagugcgacaacgccugcaugggcuccauccgcaacggcaccuacgaccacgacgucuaccgcgacgaggcccucaacaaccgcuuccagaucaagggcgucgagcucaaguccggcuacaaggacuggauccucuggaucuccuucgccaucuccugcuuccuccucugcaucguccucaugggcuucaucaugugggccugccagaagggcaacauccgcugcaacaucugcaucuga

SEQ ID NO: 97319 - RNA, 1701 nt, Artificial Sequence
  derived and/or modified CDS sequence (opt2) from hemagglutinin__InfluenzaA__ABI92346
augaagaccaucaucgcccucuccuacauccucugccucgucuucgcccagaagcuccccggcaacgacaacuccaccgccacccucugccucggccaccacgccguccccaacggcacccucgucaagaccaucaccaacgaccagaucgaggucaccaacgccaccgagcucguccaguccuccuccaccggccgcaucugcgacuccccccaccagauccucgacggcgagaacugcacccucaucgacgcccuccucggcgacccccacugcgacggcuuccagaacaaggagugggaccucuucgucgagcgcuccaaggccuacuccaacugcuaccccuacgacguccccgacuacgucucccuccgcucccucgucgccuccuccggcacccucgaguucaacaacgaguccuucaacuggaccggcgucgcccagaacggcaccuccuccgccugcaagcgccgcuccgacaaguccuucuucucccgccucaacuggcuccaccagcucaaguacaaguaccccgcccucaacgucaccaugcccaacaacgagaaguucgacaagcucuacaucuggggcguccaccaccccggcaccgacuccgaccagaucucccucuacgcccaggccuccggccgcgucaccgucuccaccaagcgcucccagcagaccgucauccccaacaucggcucccgccccuggguccgcggcgucuccucccgcaucuccaucuacuggaccaucgucaagcccggcgacauccuccucaucaacuccaccggcaaccucaucgccccccgcggcuacuucaagauccgcuccggcaaguccuccaucaugcgcuccgacgcccccaucggcaagugcaacuccgagugcaucacccccaacggcuccauccccaacgacaagcccuuccagaacgucaaccgcaucaccuacggcgccugcccccgcuacgucaagcagaacacccucaagcucgccaccggcaugcgcaacguccccgagaagcagacccgcggcaucuucggcgccaucgccggcuucaucgagaacggcugggagggcaugauggacggcugguacggcuuccgccaccagaacuccgagggcaccggccaggccgccgaccucaaguccacccaggccgccaucaaccagaucaacggcaagcucaaccgccucaucgagaagaccaacgagaaguuccaccagaucgagaaggaguucuccgaggucgagggccgcauccaggaccucgagaaguacgucgaggacaccaagaucgaccucugguccuacaacgccgagcuccucgucgcccucgagaaccagcacaccaucgaccucaccgacuccgagaugaacaagcucuucgagcgcaccaagaagcagcuccgcgagaacgccgaggacaugggcaacggcugcuucaagaucuaccacaagugcgacaacgccugcaucggcuccauccgcaacggcaccuacgaccacgacgucuaccgcgacgaggcccucaacaaccgcuuccacaucaagggcgucgagcucaaguccggcuacaaggacuggguccucuggaucuccuucgccaucuccugcuuccuccucugcaucguccuccucggcuucaucaugugggccugccagaagggcaacauccgcugcaacaucugcaucuga

SEQ ID NO: 97320 - RNA, 1701 nt, Artificial Sequence; identical to SEQ ID NO: 96318
  derived and/or modified CDS sequence (opt2) from hemagglutinin__InfluenzaA__ABI92357

SEQ ID NO: 97321 - RNA, 1701 nt, Artificial Sequence; identical to SEQ ID NO: 96318
  derived and/or modified CDS sequence (opt2) from hemagglutinin__InfluenzaA__ABI92368

SEQ ID NO: 97322 - RNA, 1698 nt, Artificial Sequence; identical to SEQ ID NO: 97240
  derived and/or modified CDS sequence (opt2) from hemagglutinin__InfluenzaA__ABI92379

SEQ ID NO: 97323 - RNA, 1701 nt, Artificial Sequence
  derived and/or modified CDS sequence (opt2) from hemagglutinin__InfluenzaA__ABI92390
augaagaccaucaucgccuucuccuacauccucugccucgucuucgcccagaagcuccccggcaacgacaacuccaccgccacccucugccucggccaccacgccguccccaacggcaccaucgucaagaccaucaccaacgaccagaucgaggucaccaacgccaccgagcucguccaguccuccuccaccggcggcaucugcgacuccccccaccagauccucgacggcgagaacugcacccucaucgacgcccuccucggcgacccccagugcgacggcuuccagaacaagaagugggaccucuucgucgagcgcuccaaggccuacuccaacugcuaccccuacgacguccccgacuacgccucccuccgcucccucgucgccuccuccggcacccucgaguucaacaacgaguccuucaacuggaccggcgucacccagaacggcaccuccuccgccugcaagcgccgcuccaacaacuccuucuucucccgccucaacuggcucacccaccucaaguucaaguaccccgcccucaacgucaccaugcccaacaacgagaaguucgacaagcucuacaucuggggcguccaccaccccggcaccgacaacgaccagaccucccucuacgcccaggccuccggccgcaucaccgucuccaccaagcgcucccagcagaccgucacccccaacaucggcucccgcccccgcguccgcgacauccccucccgcaucuccaucuacuggaccaucgucaagcccggcgacauccuccucaucaacuccaccggcaaccucaucgccccccgcggcuacuucaagauccgcuccggcaaguccuccaucaugcgcuccgacgcccccaucggcaagugcaacuccgagugcaucacccccaacggcuccauccccaacgacaagcccuuccagaacgucaaccgcaucaccuacggcgccugcccccgcuacgucaagcagaacacccucaagcucgccaccggcaugcgcaacguccccgagaagcagacccgcggcaucuucggcgccaucgccggcuucaucgagaacggcugggagggcauggucgacggcugguacggcuuccgccaccagaacuccgagggcaccggccaggccgccgaccucaaguccacccaggccgccaucaaccagaucaacggcaagcucaaccgccucaucggcaagaccaacgagaaguuccaccagaucgagaaggaguucuccgaggucgagggccgcauccaggaccucgagaaguacgucgaggacaccaagaucgaccucugguccuacaacgccgagcuccucgucgcccucgagaaccagcacaccaucgaccucaccgacuccgagaugaacaagcucuucgagcgcaccaagaagcagcuccgcgagaacgccgaggacaugggcaacggcugcuucaagaucuaccacaagugcgacaacgccugcaucggcuccauccgcaacggcaccuacgaccacgacgucuaccgcgacgaggcccucaacaaccgcuuccagaucaagggcgucgagcucaaguccggcuacaaggacuggauccucuggaucuccuucgccaucuccugcuuccuccucugcgucgcccuccucggcuucaucaugugggccugccagaagggcaacauccgcugcaacaucugcaucuga

SEQ ID NO: 97324 - RNA, 1701 nt, Artificial Sequence; identical to SEQ ID NO: 96318
  derived and/or modified CDS sequence (opt2) from hemagglutinin__InfluenzaA__ABI92401

SEQ ID NO: 97325 - RNA, 1701 nt, Artificial Sequence
  derived and/or modified CDS sequence (opt2) from hemagglutinin__InfluenzaA__ABI92412
augaagaccaucaucgcccucuccuacauccucugccucgucuucgcccagaagcuccccggcaacgacaacuccaccgccacccucugccucggccaccacgccguccccaacggcacccucgucaagaccaucaccaacgaccagaucgaggucaccaacgccaccgagcucguccaguccuccuccaccggcggcaucugcgacuccccccaccagauccucgacggcgagaacugcacccucaucgacgcccuccucggcgacccccagugcgacggcuuccagaacaagaagugggaccucuucgucgagcgcuccaaggccuacuccaacugcuaccccuacgacguccccgacuacgccucccuccgcucccucaucgccuccuccggcacccucgaguucaacaacgaguccuucaacuggaccggcgucacccagaacggcaccuccuccgccugcaagcgccgcuccaacuccuccuucuucucccgccucaacuggcucacccaccucaaguucaaguaccccgcccucaacgucaccaugcccaacaacgaggaguucgacaagcucuacaucuggggcguccaccaccccggcaccuacaacgaccagaucucccucuacgcccaggccuccggccgcaucaccgucuccaccaagcgcucccagcagaccgucauccccaacaucggcucccgcccccgcguccgcgacauccccucccgcaucuccaucuacuggaccaucgucaagcccggcgacauccuccucaucaacuccaccggcaaccucaucgccccccgcggcuacuucaagauccgcuccggcaaguccuccaucaugcgcuccgacgcccccaucggcaagugcaacuccgagugcaucacccccaacggcuccauccccaacgacaagcccuuccagaacaucaaccgcaucaccuacggcgccugcccccgcuacgucaagcagaacacccucaagcucgccaccggcaugcgcaacguccccgagaagcagacccgcggcaucuucggcgccaucgccggcuucaucgagaacggcugggagggcauggucgacggcugguacggcuuccgccaccagaacuccgagggcaucggccaggccgccgaccucaaguccacccaggccgccaucgaccagaucaacggcaagcucaaccgccucaucggcaagaccaacgagaaguuccaccagaucgagaaggaguucuccgaggucgagggccgcauccaggaccucgagaaguacgucgaggacaccaagaucgaccucugguccuacaacgccgagcuccucgucgcccucgagaaccagcacaccaucgaccucaccgacuccgagaugaacaagcucuucgagcgcaccaagaagcagcuccgcgagaacgccgaggacaugggcaacggcugcuucaagaucuaccacaagugcgacaacgccugcaucggcuccauccgcaacggcaccuacgaccacgacgucuaccgcgacgaggcccucaacaaccgcuuccagaucaagggcgucgagcucaaguccggcuacaaggacuggauccucuggaucuccuucgccaucuccugcuuccuccucugcgucgcccuccucggcuucaucaugugggccugccagaagggcaacauccgcugcaacaucugcaucuga

SEQ ID NO: 97326 - RNA, 1701 nt, Artificial Sequence
  derived and/or modified CDS sequence (opt2) from hemagglutinin__InfluenzaA__ABI92423
augaagaccaucaucgcccucuccuacauccucugccucgucuucgcccagaagcuccccggcaacgacaacuccaccgccacccucugccucggccaccacgccguccccaacggcaccaucgucaagaccaucaccaacgaccagaucgaggucaccaacgccaccgagcucguccaguccuccuccaccggcggcaucugcgacuccccccaccagauccucgacggcgagaacugcacccucaucgacgcccuccucggcgacccccagugcgacggcuuccagaacaagaagugggaccucuucgucgagcgcuccaaggccuacuccaacugcuaccccuacgacguccccgacuacgccucccuccgcucccucaucgccuccuccggcacccucgaguucaacaacgaguccuucaacuggaccggcgucacccagaacggcaccuccuccgccugcaagcgccgcuccaacuccuccuucuucucccgccucaacuggcucacccaccucaaguucaaguaccccgcccucaacgucaccaugcccaacaacgaggaguucgacaagcucuacaucuggggcguccaccaccccggcaccuacaacgaccagaucucccucuacgcccaggccuccggccgcaucaccgucuccaccaagcgcucccagcagaccgucauccccaacaucggcucccgcccccgcguccgcgacauccccucccgcaucuccaucuacuggaccaucgucaagcccggcgacauccuccucaucaacuccaccggcaaccucaucgccccccgcggcuacuucaagauccgcuccggcaaguccuccaucaugcgcuccgacgcccccaucggcaagugcaacuccgagugcaucacccccaacggcuccauccccaacgacaagcccuuccagaacgucaaccgcaucaccuacggcgccugcccccgcuacgucaagcagaacacccucaagcucgccaccggcaugcgcaacguccccgacaagcagacccgcggcaucuucggcgccaucgccggcuucaucgagaacggcugggagggcauggucgacggcugguacggcuuccgccaccagaacuccgagggcaucggccaggccgccgaccucaaguccacccaggccgccaucgaccagaucaacggcaagcucaaccgccucaucggcaagaccaacgagaaguuccaccagaucgagaaggaguucuccgaggucgagggccgcauccaggaccucgagaaguacgucgaggacaccaagaucgaccucugguccuacaacgccgagcuccucgucgcccucgagaaccagcacaccaucgaccucaccgacuccgagaugaacaagcucuucgagcgcaccaagaagcagcuccgcgagaacgccgaggacaugggcaacggcugcuucaagaucuaccacaagugcgacaacgccugcaucggcuccauccgcaacggcaccuacgaccacgacgucuaccgcgacgaggcccucaacaaccgcuuccagaucaagggcgucgagcucaaguccggcuacaaggacuggauccucuggaucuccuucgccaucuccugcuuccuccucugcgucgcccuccucggcuucaucaugugggccugccagaagggcaacauccgcugcaacaucugcaucuga

SEQ ID NO: 97327 - RNA, 1701 nt, Artificial Sequence; identical to SEQ ID NO: 96669
  derived and/or modified CDS sequence (opt2) from hemagglutinin__InfluenzaA__ABI92434

SEQ ID NO: 97328 - RNA, 1701 nt, Artificial Sequence
  derived and/or modified CDS sequence (opt2) from hemagglutinin__InfluenzaA__ABI92445
augaagaccaucaucgcccucuccuacauccucugccucgucuucacccagaagcuccccggcaacgacaacuccaccgccacccucugccucggccaccacgccguccccaacggcaccaucgucaagaccaucaccaacgaccagaucgaggucaccaacgccaccgagcucguccaguccuccuccaccggcggcaucugcgacuccccccaccagauccucgacggcgagaacugcacccucaucgacgcccuccucggcgacccccagugcgacggcuuccagaacaagaagugggaccucuucgucgagcgcuccaaggccuacuccaacugcuaccccuacgacguccccgacuacgccucccuccgcucccucaucgccuccuccggcacccucgaguucaacaacgaguccuucaacuggaccggcgucaaccagaacggcaccuccuccgccugcaagcgccgcuccaacuccuccuucuucucccgccucaacuggcucacccaccucaaguucaaguaccccgcccucaacgucaccaugcccaacaacgaggaguucgacaagcucuacaucuggggcguccaccaccccggcaccuacaacgaccagaucucccucuacgcccaggccuccggccgcaucaccgucuccaccaagcgcucccagcagaccgucauccccaacaucggcucccgcccccgcguccgcgacauccccucccgcaucuccaucuacuggaccaucgucaagcccggcgacauccuccucaucaacuccaccggcaaccucaucgccccccgcggcuacuucaagauccgcuccggcaaguccuccaucaugcgcuccgacgcccccaucggcaagugcaacuccgagugcaucacccccaacggcuccauccccaacgacaagcccuuccagaacgucaaccgcaucaccuacggcgccugcccccgcuacgucaagcagaacacccucaagcucgccaccggcaugcgcaacguccccgagaagcagacccgcggcaucuucggcgccaucgccggcuucaucgagaacggcugggagggcauggucgacggcugguacggcuuccgccaccagaacuccgagggcaucggccaggccgccgaccucaaguccacccaggccgccaucgaccagaucaacggcaagcucaaccgccucaucggcaagaccaacgagaaguuccaccagaucgagaaggaguucuccgaggucgagggccgcauccaggaccucgagaaguacgucgaggacaccaagaucgaccucugguccuacaacgccgagcuccucgucgcccucgagaaccagcacaccaucgaccucaccgacuccgagaugaacaagcucuucgagcgcaccaagaagcagcuccgcgagaacgccgaggacaugggcaacggcugcuucaagaucuaccacaagugcgacaacaccugcaucggcuccauccgcaacggcaccuacgaccacgacgucuaccgcgacgaggcccucaacaaccgcuuccagaucaagggcgucgagcucaaguccggcuacaaggacuggauccucuggaucuccuucgccaucuccugcuuccuccucugcgucgcccuccucggcuucaucaugugggccugccagaagggcaacauccgcugcaacaucugcaucuga

SEQ ID NO: 97329 - RNA, 1701 nt, Artificial Sequence; identical to SEQ ID NO: 96669
  derived and/or modified CDS sequence (opt2) from hemagglutinin__InfluenzaA__ABI92456

SEQ ID NO: 97330 - RNA, 1701 nt, Artificial Sequence; identical to SEQ ID NO: 97277
  derived and/or modified CDS sequence (opt2) from hemagglutinin__InfluenzaA__ABI92467

SEQ ID NO: 97331 - RNA, 1701 nt, Artificial Sequence; identical to SEQ ID NO: 96686
  derived and/or modified CDS sequence (opt2) from hemagglutinin__InfluenzaA__ABI92478

SEQ ID NO: 97332 - RNA, 1701 nt, Artificial Sequence; identical to SEQ ID NO: 97277
  derived and/or modified CDS sequence (opt2) from hemagglutinin__InfluenzaA__ABI92489

SEQ ID NO: 97333 - RNA, 1701 nt, Artificial Sequence
  derived and/or modified CDS sequence (opt2) from hemagglutinin__InfluenzaA__ABI92500
augaagaccaucaucgcccucuccuacauccucugccucgucuucgcccagaagcuccccggcaacgacaacuccaccgccacccucugccucggccaccacgccguccccaacggcacccucgucaagaccaucaccaacgaccagaucgaggucaccaacgccaccgagcucguccaguccuccuccaccggcggcaucugcgacuccccccaccagauccucgacggcgagaacugcacccucaucgacgcccuccucggcgacccccacugcgacggcuuccagaacaaggagugggaccucuucgucgagcgcuccaaggccuacuccaacugcuaccccuacgacguccccgacuacgccucccuccgcucccucgucgccuccuccggcacccucgaguucaacaacgaguccuucaacuggaccggcgucgcccagaacggcaccuccuccgccugcaagcgccgcuccaacaaguccuucuucucccgccucaacuggcuccaccagcucaaguacaaguaccccgcccucaacgucaccaugcccaacaacgagaaguucgacaagcucuacaucuggggcguccaccaccccuccaccgacuccgaccagaucucccucuacgcccaggcccccggccgcgucaccgucuccaccaagcgcucccagcagaccgucauccccaacaucggcucccgccccuggguccgcggcgucuccucccgcaucuccaucuacuggaccaucgucaagcccggcgacauccuccucaucaacugcaccggcaaccucaucgccccccgcggcuacuucaagauccgcuccggcaaguccuccaucaugcgcuccgacgccuccaucggcaagugcaacuccgagugcaucacccccaacggcuccauccccaacgacaagcccuuccagaacgucaaccgcaucaccuacggcgccugcccccgcuacgucaagcagaacacccucaagcucgccaccggcaugcgcaacguccccgagaagcagacccgcggcaucuucggcgccaucgccggcuucaucgagaacggcugggagggcauggucgacggcugguacggcuuccgccaccagaacuccgagggcaccggccaggccgccgaccucaaguccacccaggccgucaucaaccagaucaacggcaagcucaaccgccucaucgagaagaccaacgagaaguuccaccagaucgagaaggaguucuccgaggucgagggccgcauccaggaccucgagaaguacgucgaggacaccaagaucgaccucugguccuacaacgccgagcuccucgucgcccucgagaaccagcacaccaucgaccucaccgacuccgagaugaacaagcucuucgagcgcaccaagaagcagcuccgcgagaacgccgaggacaugggcaacggcugcuucaagaucuaccacaagugcgacaacgccugcaucggcuccauccgcaacggcaccuacgaccacgacgucuaccgcgacgaggcccucaacaaccgcuuccagaucaagggcgucgagcucaaguccggcuacaaggacuggauccucuggaucuccuucgccaucuccugcuuccuccucugcgucguccuccucggcuucaucaugugggccugccagaagggcaacauccgcugcaacaucugcaucuga

SEQ ID NO: 97334 - RNA, 1701 nt, Artificial Sequence
  derived and/or modified CDS sequence (opt2) from hemagglutinin__InfluenzaA__ABI92511
augaagaccaucaucgcccucuccuacauccucugccucgucuucgcccagaagcuccccggcaacgacaacuccaccgccacccucugccucggccaccacgccguccccaacggcacccucgucaagaccaucaccaacgaccagaucgaggucaccaacgccaccgagcucguccagaacuccuccaccggcaucaucugcgacuccccccaccagauccucgacggcgagaacugcacccucaucgacgcccuccucggcgacccccacugcgacggcuuccagaacaaggagugggaccucuucgucgagcgcuccaaggccuacuccaacugcuaccccuacgacguccccgacuacgccucccuccgcucccucgucgccuccuccggcacccucgaguucaacaacgaguccuucaacuggaccggcgucgcccagaacggcaccuccuccgccugcaagcgccgcuccgacaaguccuucuucucccgccucaacuggcuccaccagcucaaguacaaguaccccgcccucaacgucaccaugcccaacaccgagaaguucgacaagcucuacaucuggggcguccaccaccccuccaccgacuccgaccagaucucccucuacgcccaggccuccggccgcgucaccgucuccaccaagcgcucccagcagaccgucauccccaacaucggcucccgccccuggguccgcggcgucuccucccgcgucuccaucuacuggaccaucgucaagcccggcgacauccuccucaucaacuccaccggcaaccucaucgccccccgcggcuacuucaagauccgcuccggcaaguccuccaucaugcgcuccgacgccuccaucggcaagugcaacuccaagugcaucacccccaacggcuccauccccaacgacaagcccuuccagaacgucaaccgcaucaccuacggcgccugcccccgcuacgucaagcagaacacccucaagcucgccaccggcaugcgcaacguccccgagaagcagacccgcggcaucuucggcgccaucgccggcuucaucgagaacggcugggagggcauggucgacggcugguacggcuuccgccaccagaacuccgagggcaccggccaggccgccgaccucaaguccacccaggccgccaucaaccagaucaacggcaagcucaaccgccucaucgagaagaccaacgagaaguuccaccagaucgagaaggaguucuccgaggucgagggccgcauccaggaccucgagaaguacgucgaggacaccaagaucgaccucugguccuacaacgccgagcuccucgucgcccucgagaaccagcacaccaucgaccucaccgacuccgagaugaacaagcucuucgagcgcaccaagaagcagcuccgcgagaacgccgaggacaugggcaacggcugcuucaagaucuaccacaagugcgacaacaccugcaucggcuccauccgcaacggcaccuacgaccacgacgucuaccgcgacgaggcccucaacaaccgcuuccagaucaagggcgucgagcucaaguccggcuacaaggacuggauccucuggaucuccuucgccaucuccugcuuccuccucugcgucguccuccucggcuucaucaugugggccugccagaagggcaacauccgcugcaacaucugcaucuga

SEQ ID NO: 97335 - RNA, 1701 nt, Artificial Sequence
  derived and/or modified CDS sequence (opt2) from hemagglutinin__InfluenzaA__ABI92522
augaagaccaucaucgcccucuccuacauccucugccucgucuucgcccagaagcuccccggcaacgacaacuccaccgccacccucugccucggccaccacgccguccccaacggcacccucgucaagaccaucaccaacgaccagaucgaggucaccaacgccaccgagcucguccaguccuccuccaccggccgcaucugcgacuccccccaccagauccucgacggcgagaacugcacccucaucgacgcccuccucggcgacccccacugcgacggcuuccagaacaaggagugggaccucuucgucgagcgcuccaaggccuacuccaacugcuaccccuacgacguccccgacuacgucucccuccgcucccucgucgccuccuccggcacccucgaguucaacaacgaguccuucaacuggaccggcgucgcccagaacggcaccuccuccgccugcaagcgccgcuccaacaaguccuucuucucccgccucaacuggcuccaccagcucaaguacaaguaccccgcccucaacgucaccaugcccaacaacgagaaguucgacaagcucuacaucuggggcguccaccaccccggcaccgacuccgaccagaucucccucuacgcccaggccuccggccgcgucaccgucuccaccaagcgcucccagcagaccgucauccccaacaucggcucccgccccuggguccgcggcgucuccucccgcaucuccaucuacuggaccaucgucaagcccggcgacauccuccucaucaacuccaccggcaaccucaucgccccccgcggcuacuucaagauccgcuccggcaaguccuccaucaugaaguccgacgcccccaucggcaagugcaacuccgagugcaucacccccaacggcuccauccccaacgacaagcccuuccagaacgucaaccgcaucaccuacggcgccugcccccgcuacgucaagcagaacacccucaagcucgccaccggcaugcgcaacguccccgagaagcagacccgcggcaucuucggcgccaucgccggcuucaucgagaacggcugggagggcaugauggacggcugguacggcuuccgccaccagaacuccgagggcaccggccaggccgccgaccucaaguccacccaggccgccaucaaccagaucaacggcaagcucaaccgccucaucgagaagaccaacgagaaguuccaccagaucgagaaggaguucuccgaggucgagggccgcauccaggaccucgagaaguacgucgaggacaccaagaucgaccucugguccuacaacgccgagcuccucgucgcccucgagaaccagcacaccaucgaccucaccgacuccgagaugaacaagcucuucgagcgcaccaagaagcagcuccgcgagaacgccgaggacaugggcaacggcugcuucaagaucuaccacaagugcgacaacgccugcaucggcuccauccgcaacggcaccuacgaccacgacgucuaccgcgacgaggcccucaacaaccgcuuccagaucaagggcgucgagcucaaguccggcuacaaggacuggauccucuggaucuccuucgccaucuccugcuuccuccucugcaucguccuccucggcuucaucaugugggccugccagaagggcaacauccgcugcaacaucugcaucuga

SEQ ID NO: 97336 - RNA, 1701 nt, Artificial Sequence
  derived and/or modified CDS sequence (opt2) from hemagglutinin__InfluenzaA__ABI92533
augaagaccaucaucgcccucuccuacauccucugccucgucuucgcccagaagcuccccggcaacgacaacucccgcgccacccucugccucggccaccacgccguccccaacggcacccucgucaagaccaucaccaacgaccagaucgaggucaccaacgccaccgagcucguccaguccuccuccaccggccgcaucugcgacuccccccaccagauccucgacggcgagaacugcacccucaucgacgcccuccucggcgacccccacugcgacggcuuccagaacaaggagugggaccucuucgucgagcgcuccaaggccuacuccaacugcuaccccuacgacguccccgacuacgucucccuccgcucccucgucgccuccuccggcacccucgaguucaacaacgaguccuucaacuggaccggcgucgcccagaacggcaccuccuccgccugcaagcgccgcuccgacaaguccuucuucucccgccucaacuggcuccaccagcucaaguacaaguaccccgcccucaacgucaccaugcccaacaacgagaaguucgacaagcucuacaucuggggcguccaccaccccggcaccgacuccgaccagaucucccucuacgcccaggccuccggccgcgucaccgucuccaccaagcgcucccagcagaccgucauccccaacaucggcucccgccccuggguccgcggcgucuccucccgcaucuccaucuacuggaccaucgucaagcccggcgacauccuccucaucaacuccaccggcaaccucaucgccccccgcggcuacuucaagauccgcuccggcaaguccuccaucaugcgcuccgacgcccccaucggcaagugcaacuccgagugcaucacccccaacggcuccauccccaacgacaagcccuuccagaacgucaaccgcaucaccuacggccccugcccccgcuacgucaagcagaacacccucaagcucgccaccggcaugcgcaacguccccgagaagcagacccgcggcaucuucggcgccaucgccggcuucaucgagaacggcugggagggcaugauggacggcugguacggcuuccgccaccagaacuccgagggcaccggccaggccgccgaccucaaguccacccaggccgccaucaaccagaucaacggcaagcucaaccgccucaucgagaagaccaacgagaaguuccaccagaucgagaaggaguucuccgaggucgagggccgcauccaggaccucgagaaguacgucgaggacaccaagaucgaccucugguccuacaacgccgagcuccucgucgcccucgagaaccagcacaccaucgaccucaccgacuccgagaugaacaagcucuucgagcgcaccaagaagcagcuccgcgagaacgccgaggacaugggcaacggcugcuucaagaucuaccacaagugcgacaacgccugcaucggcuccauccgcaacggcaccuacgaccacgacgucuaccgcgacgaggcccucaacaaccgcuuccagaucaagggcgucgagcucaaguccggcuacaaggacuggauccucuggaucuccuucgccaucuccugcuuccuccucugcaucguccuccucggcuucaucaugugggccugccagaagggcaacauccgcugcaacaucugcaucuga

SEQ ID NO: 97337 - RNA, 1701 nt, Artificial Sequence; identical to SEQ ID NO: 97336
  derived and/or modified CDS sequence (opt2) from hemagglutinin__InfluenzaA__ABI92544

SEQ ID NO: 97338 - RNA, 1701 nt, Artificial Sequence
  derived and/or modified CDS sequence (opt2) from hemagglutinin__InfluenzaA__ABI92577
augaagaccaucaucgcccucuccuacauccucugccucgucuucgcccagaagcuccccggcaacgacaacuccaccgccacccucugccucggccaccacgccguccccaacggcacccucgucaagaccaucaccaacgaccagaucgaggucaccaacgccaccgagcucguccaguccuccuccaccggccgcaucugcgacuccccccaccagauccucgacggcgagaacugcacccucaucgacgcccuccucggcgacccccacugcgacggcuuccagaacaaggagugggaccucuucgucgagcgcucccgcgccuacuccaacugcuaccccuacgacguccccgacuacgucucccuccgcucccucgucgccuccuccggcacccucgaguucaacaacgaguccuucaacuggaccggcgucgcccagaacggcaccuccuccgccugcaagcgccgcuccgacaaguccuucuucucccgccucaacuggcuccaccagcucaaguacaaguaccccgcccucaacgucaccaugcccaacaacgagaaguucgacaagcucuacaucuggggcguccaccaccccggcaccgacuccgaccagaucucccucuacgcccaggccuccggccgcgucaccgucuccaccaagcgcucccagcagaccgucauccccaacaucggcucccgccccuggguccgcggcgucuccuccaagaucuccaucuacuggaccaucgucaagcccggcgacauccuccucaucaacuccaccggcaaccucaucgccccccgcggcuacuucaagauccgcuccggcaaguccuccaucaugcgcuccgacgcccccaucggcaagugcaacuccgagugcaucacccccaacggcuccauccccaacgacaagcccuuccagaacgucaaccgcaucaccuacggccccugcccccgcuacgucaagcagaacacccucaagcucgccaccggcaugcgcaacguccccgagaagcagacccgcggcaucuucggcgccaucgccggcuucaucgagaacggcugggagggcaugauggacggcugguacggcuuccgccaccagaacuccgagggcaccggccaggccgccgaccucaaguccacccaggccgccaucaaccagaucaacggcaagcucaaccgccucaucgagaagaccaacgagaaguuccaccagaucgagaaggaguucuccgaggucgagggccgcauccaggaccucgagaaguacgucgaggacaccaagaucgaccucugguccuacaacgccgagcuccucgucgcccucgagaaccagcacaccaucgaccucaccgacuccgagaugaacaagcucuucgagcgcaccaagaagcagcuccgcgagaacgccgaggacaugggcaacggcugcuucaagaucuaccacaagugcgacaacgccugcaucggcuccauccgcaacggcaccuacgaccacgacgucuaccgcgacgaggcccucaacaaccgcuuccagaucaagggcgucgagcucaaguccggcuacaaggacuggauccucuggaucuccuucgccaucuccugcuuccuccucugcaucguccuccucggcuucaucaugugggccugccagaagggcaacauccgcugcaacaucugcaucuga

SEQ ID NO: 97339 - RNA, 1701 nt, Artificial Sequence; identical to SEQ ID NO: 97075
  derived and/or modified CDS sequence (opt2) from hemagglutinin__InfluenzaA__ABI92588

SEQ ID NO: 97340 - RNA, 1701 nt, Artificial Sequence
  derived and/or modified CDS sequence (opt2) from hemagglutinin__InfluenzaA__ABI92599
augaagaccaucaucgcccucuccuacauccucugccucgucuucgcccagaagcuccccggcaacgacaacuccaccgccacccucugccucggccaccacgccguccccaacggcacccucgucaagaccaucaccaacgaccagaucgaggucaccaacgccaccgagcucguccaguccuccuccaccggccgcaucugcaacuccccccaccagauccucgacggcgagaacugcacccucaucgacgcccuccucggcgacccccacugcgacggcuuccagaacaaggagugggaccucuucgucgagcgcuccaaggccuacuccaacugcuaccccuacgacguccccgacuacgucucccuccgcucccucgucgccuccuccggcacccucgaguucaacaacgaguccuucaacuggaccggcgucgcccagaacggcaccuccuccgccugcaagcgccgcuccgacaaguccuucuucucccgccucaacuggcuccaccagcucaaguacaaguaccccgcccucaacgucaccaugcccaacaacgagaaguucgacaagcucuacaucuggggcguccaccaccccggcaccgacuccgaccagaucucccucuacgcccaggccuccggccgcgucaccgucuccaccaagcgcucccagcagaccgucauccccaacaucggcucccgccccuggguccgcggcgucuccucccgcaucuccaucuacuggaccaucgucaagcccggcgacauccuccucaucaacuccaccggcaaccucaucgccccccgcggcuacuucaagauccgcuccggcaaguccuccaucaugcgcuccgacgcccccaucggcaagugcaacuccgagugcaucacccccaacggcuccauccccaacgacaagcccuuccagaacgucaaccgcaucaccuacggcgccugcccccgcuacgucaagcagaagacccucaagcucgccaccggcaugcgcaacguccccgagaagcagacccgcggcaucuucggcgccaucgccggcuucaucgagaacggcugggagggcaugauggacggcugguacggcuuccgccaccagaacuccgagggcaccggccaggccgccgaccucaaguccacccaggccgccaucaaccagaucaacggcaagcucaaccgccucaucgagaagaccaacgagaaguuccaccagaucgagaaggaguucuccgaggucgagggccgcauccaggaccucgagaaguacgucgaggacaccaagaucgaccucugguccuacaacgccgagcuccucgucgcccucgagaaccagcacaccaucgaccucaccgacuccgagaugaacaagcucuucgagcgcaccaagaagcagcuccgcgagaacgccgaggacaugggcaacggcugcuucaagaucuaccacaagugcgacaacgccugcaucggcuccauccgcaacggcaccuacgaccacgacgucuaccgcgacgaggcccucaacaaccgcuuccagaucaagggcgucgagcucaaguccggcuacaaggacuggauccucuggaucuccuucgccaucuccugcuuccuccucugcaucguccuccucggcuucaucaugugggccugccagaagggcaacauccgcugcaacaucugcaucuga

SEQ ID NO: 97341 - RNA, 1701 nt, Artificial Sequence
  derived and/or modified CDS sequence (opt2) from hemagglutinin__InfluenzaA__ABI92610
augaagaccaucaucgcccucuccuacauccucugccucgucuucgcccagaagcuccccggcaacgacaacuccaccgccacccucugccucggccaccacgccguccccaacggcacccucgucaagaccaucaccaacgaccagaucgaggucaccaacgccaccgagcucguccaguccuccuccaccggccgcaucugcgacuccccccaccagauccucgacggcgagaacugcacccucaucgacgcccuccucggcgacccccacugcgacggcuuccagaacaaggagugggaccucuucgucgagcgcuccaaggccuacuccaacugcuaccccuacgacguccccgacuacgucucccuccgcucccucgucgccuccuccggcacccucgaguucaacaacgaguccuucaacuggaccggcgucgcccagaacggcaccuccuccgccugcaagcgccgcuccgacaaguccuucuucucccgccucaacuggcuccaccagcucaaguacaaguaccccgcccucaacgucaccaugcccaacaacgagaaguucgacaagcucuacaucuggggcguccaccaccccggcaccgacuccgaccagaucucccucuacgcccaggccuccggccgcgucaccgucuccaccaagcgcucccagcagaccgucauccccaacaucggcucccgccccuggguccgcggcgucuccucccgcaucuccaucuacuggaccaucgucaagcccggcgacauccuccucaucaacuccaccggcaaccucaucgccccccgcggcuacuucaagauccgcuccggcaaguccuccaucaugcgcuccgacgcccccaucggcaagugcaacuccgagugcaucacccccaacggcuccauccccaacgacaagcccuuccagaacgucaaccgcaucaccuacggcgccugcccccgcuacgucaagcagaacacccucaagcucgccaccggcaugcgcaacguccccgagaagcagacccgcggcaucuucggcgccaucgccggcuucaucgagaacggcugggagggcaugauggacggcugguacggcuuccgccaccagaacuccgagggcaccggccaggccgccgaccucaaguccacccaggccgccaucaaccagaucaacggcaagcucaaccgccucaucgagaagaccaacgagaaguuccaccagaucgagaaggaguucuccgaggucgagggccgcauccaggaccucgagaaguacgucgaggacaccaagaucgaccucugguccuacaacgccgagcuccucgucgcccucgagaaccagcacaccaucgaccucaccgacuccgagaugaacaagcucuucgagcgcaccaagaagcagcuccgcgagaacgccgaggacaugggcaacggcugcuucaagaucuaccacaagugcgacaacgccugcaucggcuccauccgcaacggcaccuacgaccacgacgucuaccgcgacgaggcccucaacaaccgcuuccagaucaagggcgucgagcucaaguccggcuacaaggacuggauccucuggaucuccuucgccaucuccugcuuccuccucugcaucguccuccucggcuucaucaugugggccugccagaagggcaacauccgcugcaacaucugcaucuga

SEQ ID NO: 97342 - RNA, 1701 nt, Artificial Sequence
  derived and/or modified CDS sequence (opt2) from hemagglutinin__InfluenzaA__ABI92621
augaagaccaucaucgcccucuccuacauccucugccucgucuucgcccagaagcuccccggcaacgacaacuccauggccacccucugccucggccaccacgccguccccaacggcacccucgucaagaccaucaccaacgaccagaucgaggucaccaacgccaccgagcucguccaguccuccuccaccggccgcaucugcaacuccccccaccagauccucgacggcgagaacugcacccucaucgacgcccuccucggcgacccccacugcgagggcuuccagaacaaggagugggaccucuucgucgagcgcuccaaggccuacuccaacugcuaccccuacgacguccccgacuacgucucccuccgcucccucgucgccuccuccggcacccucgaguucaacaacgaguccuucaacuggaccggcgucgcccagaacggcaccuccuccgccugcaagcgccgcuccgacaaguccuucuucucccgccucaacuggcuccaccagcucaaguacaaguaccccgcccucaacgucaccaugcccaacaacgagaaguucgacaagcucuacaucuggggcguccaccaccccggcaccgacuccgaccagaucucccucuacgcccaggccuccggccgcgucaccgucuccaccaagcgcucccagcagaccgucauccccaacaucggcucccgccccuggguccgcggcgucuccuccaagaucuccaucuacuggaccaucgucaagcccggcgacauccuccucaucaacuccaccggcaaccucaucgccccccgcggcuacuucaagauccgcuccggcaaguccuccaucaugcgcuccgacgcccccaucgacaagugcaacuccgagugcaucacccccaacggcuccauccccaacgacaagcccuuccagaacgucaaccgcaucaccuacggccucugcccccgcuacgucaagcagaacacccucaagcucgccaccggcaugcgcaacguccccgagaagcagacccgcggcaucuucggcgccaucgccggcuucaucgagaacggcugggagggcaugauggacggcugguacggcuuccgccaccagaacuccgagggcaccggccaggccgccgaccucaaguccacccaggccgccaucaaccagaucaacggcaagcucaaccgccucaucgagaagaccaacgagaaguuccaccagaucgagaaggaguucuccgaggucgagggccgcauccaggaccucgagaaguacgucgaggacaccaagaucgaccucugguccuacaacgccgagcuccucgucgcccucgagaaccagcacaccaucgaccucaccgacuccgagaugaacaagcucuucgagcgcaccaagaagcagcuccgcgagaacgccgaggacaugggcaacggcugcuucaagaucuaccacaagugcgacaacgccugcaucggcuccauccgcaacggcaccuacgaccacgacgucuaccgcgacgaggcccucaacaaccgcuuccagaucaagggcgucgagcucaaguccggcuacaaggacuggauccucuggaucuccuucgccaucuccugcuuccuccucugcaucguccuccucggcuucaucaugugggccugccagaagggcaacauccgcugcaacaucugcaucuga

SEQ ID NO: 97343 - RNA, 1701 nt, Artificial Sequence; identical to SEQ ID NO: 96598
  derived and/or modified CDS sequence (opt2) from hemagglutinin__InfluenzaA__ABI92632

SEQ ID NO: 97344 - RNA, 1701 nt, Artificial Sequence
  derived and/or modified CDS sequence (opt2) from hemagglutinin__InfluenzaA__ABI92643
augaagaccaucaucgcccucuccuacauccucugccucgucuucgcccagaagcuccccggcaacgacaacuccaccgccacccucugccucggccaccacgccguccccaacggcaccaucgucaagaccaucaccaacgaccagaucgaggucaccaacgccaccgagcucguccaguccuccuccaccggcggcaucugcgacuccccccaccagauccucgacggcgagaacugcacccucaucgacgcccuccucggcgacccccagugcgacggcuuccagaacaagaagugggaccucuucgucgagcgcuccaaggccuacuccaacugcuaccccuacgacguccccgacuacgccucccuccgcucccucgucgccuccuccggcacccucgaguucaacaacgaguccuucgacuggaccggcgucacccagaacggcaccuccuccgccugcaagcgccgcuccaacaaguccuucuucucccgccucaacuggcucacccaccucaaguacaaguaccccgcccucaacgucaccauccccaacaacgagaaguucgacaagcucuacaucuggggcguccaccaccccggcaccgacuccgaccagaucucccucuacgcccaggccuccggccgcaucaccgucuccaccaagcgcucccagcagaccgucauccccaacaucggcucccgcccccgcguccgcgacgucuccucccgcaucuccaucuacuggaccaucgucaagcccggcgacauccuccucaucaacuccaccggcaaccucaucgccccccgcggcuacuucaagauccgcuccggcaaguccuccaucaugcgcuccgacgcccccaucggcaagugcaacuccgagugcaucacccccaacggcuccauccccaacgacaagcccuuccagaacgucaaccgcaucaccuacggcgccugcccccgcuacgucaagcagaacacccucaagcucgccaccggcaugcgcaacguccccgagaagcagacccgcggcaucuucggcgccaucgccggcuucaucgagaacggcugggagggcauggucgacggcugguacggcuuccgccaccagaacuccgagggcaccggccaggccgccgaccucaaguccacccaggccgccaucaaccagaucaacggcaagcucaaccgccucaucggcaagaccaacgagaaguuccaccagaucgagaaggaguucuccgaggucgagggccgcauccaggaccucgagaaguacgucgaggacaccaagaucgaccucugguccuacaacgccgagcuccucgucgcccucgagaaccagcacaccaucgaccucaccgacuccgagaugaacaagcucuucgagcgcaccaagcgccagcuccgcgagaacgccgaggacaugggcaacggcugcuucaagaucuaccacaagugcgacaacgccugcaucggcuccauccgcaacggcaccuacgaccacgacgucuaccgcgacgaggcccucaacaaccgcuuccagaucaagggcgucgagcucaaguccggcuacaaggacuggauccucuggaucuccuucgccaucuccugcuuccuccucugcgucgcccuccucggcuucaucaugugggccugccagaagggcaacauccgcugcaacaucugcaucuga

SEQ ID NO: 97345 - RNA, 1701 nt, Artificial Sequence
  derived and/or modified CDS sequence (opt2) from hemagglutinin__InfluenzaA__ABI92665
augaagaccaucaucgcccucuccuacauccucugccucgucuucgcccagaagcuccccggcaacgacaacuccaccgccacccucugccucggccaccacgccguccccaacggcaccaucgucaagaccaucaccaacgaccagaucgaggucaccaacgccaccgagcucguccaguccuccuccaccggcggcaucugcgacuccccccaccagauccucgacggcgagaacugcacccucaucgacgcccuccucggcgacccccagugcgacggcuuccagaacaagaagugggaccucuucgucgagcgcuccaaggccuacuccaacugcuaccccuacgacguccccgacuacgccucccuccgcucccucgucgccuccuccggcacccucgaguucaacaacgaguccuucgacuggaccggcgucacccagaacggcaccuccuccgccugcaagcgcggcuccaacaaguccuucuucucccgccucaacuggcucacccaccucaaguacaaguaccccgcccucaacgucaccaugcccaacaacgagaaguucgacaagcucuacaucuggggcguccaccaccccggcaccgacuccgaccagaucucccucuacgcccaggccuccggccgcaucaccgucuccaccaagcgcucccagcagaccgucauccccaacaucggcucccgcccccgcguccgcgacgucuccucccgcaucuccaucuacuggaccaucgucaagcccggcgacauccuccucaucaacuccaccggcaaccucaucgccccccgcggcuacuucaagauccgcuccggcaaguccuccaucaugcgcuccgacgcccccaucggcaagugcaacuccgagugcaucacccccaacggcuccauccccaacgacaagcccuuccagaacgucaaccgcaucaccuacggcgccugcccccgcuacgucaagcagaacacccucaagcucgccaccggcaugcgcaacguccccgagaagcagacccgcggcaucuucggcgccaucgccggcuucaucgagaacggcugggagggcauggucgacggcugguacggcuuccgccaccagaacuccgagggcaccggccaggccgccgaccucaaguccacccaggccgccaucaaccagaucaacggcaagcucaaccgccucaucggcaagaccaacgagaaguuccaccagaucgagaaggaguucuccgaggucgagggccgcauccaggaccucgagaaguacgucgaggacaccaagaucgaccucugguccuacaacgccgagcuccucgucgcccucgagaaccagcacaccaucgaccucaccgacuccgagaugaacaagcucuucgagcgcaccaagcgccagcuccgcgagaacgccgaggacaugggcaacggcugcuucaagaucuaccacaagugcgacaacgccugcaucggcuccauccgcaacggcaccuacgaccacgacgucuaccgcaacgaggcccucaacaaccgcuuccagaucaagggcgucgagcucaaguccggcuacaaggacuggauccucuggaucuccuucgccaucuccugcuuccuccucugcgucgcccuccucggcuucaucaugugggccugccagaagggcaacauccgcugcaacaucugcaucuga

SEQ ID NO: 97346 - RNA, 1701 nt, Artificial Sequence
  derived and/or modified CDS sequence (opt2) from hemagglutinin__InfluenzaA__ABI92676
augaagaccaucaucgcccucuccuacauccucugccucgucuucgcccagaagcuccccggcaacgacaacuccaccgccacccucugccucggccaccacgccguccccaacggcaccaucgucaagaccaucaccaacgaccagaucgaggucaccaacgccaccgagcucguccaguccuccuccaccggcggcaucugcgacuccccccaccagauccucgacggcgagaacugcacccucaucgacgcccuccucggcgacccccagugcgacggcuuccagaacaagaagugggaccucuucgucgagcgcuccaaggccuacuccaacugcuaccccuacgacguccccgaccacgccucccuccgcucccucgucgccuccuccggcacccucgaguucaacaacgaguccuucgacuggaccggcgucacccagaacggcaccuccuccgccugcaagcgccgcuccaacaaguccuucuucucccgccucaacuggcucacccaccucaaguacaaguaccccgcccucaacgucaccaugcccaacaacgagaaguucgacaagcucuacaucuggggcguccaccaccccggcaccgacuccgaccagaucucccucuacgcccaggccuccggccgcaucaccgucuccaccaagcgcucccagcagaccgucauccccaacaucggcucccgcccccgcguccgcgacgucuccucccgcaucuccaucuacuggaccaucgucaagcccggcgacauccuccucaucaacuccaccggcaaccucaucgccccccgcggcuacuucaagauccgcaacggcaaguccuccaucaugcgcuccgacgcccccaucggcaagugcaacuccgagugcaucacccccaacggcuccauccccaacgacaagcccuuccagaacgucaaccgcaucaccuacggcgccugcccccgcuacgucaagcagaacacccucaagcucgccaccggcaugcgcaacguccccgagaagcagacccgcggcaucuucggcgccaucgccggcuucaucgagaacggcugggagggcauggucgacggcugguacggcuuccgccaccagaacuccgagggcaccggccaggccgccgaccucaaguccacccaggccgccaucaaccagaucaacggcaagcucaaccgccucaucggcaagaccaacgagaaguuccaccagaucgagaaggaguucuccgaggucgagggccgcauccaggaccucgagaaguacgucgaggacaccaagaucgaccucugguccuacaacgccgagcuccucgucgcccucgagaaccagcacaccaucgaccucaccgacuccgagaugaacaagcucuucgagcgcaccaagaagcagcuccgcgagaacgccgaggacaugggcaacggcugcuucaagaucuaccacaagugcgacaacgccugcaucggcuccauccgcaacggcaccuacgaccacgacgucuaccgcgacgaggcccucaacaaccgcuuccagaucaagggcgucgagcucaaguccggcuacaaggacuggauccucuggaucuccuucgccaucuccugcuuccuccucugcgucgcccuccucggcuucaucaugugggccugccagaagggcaacauccgcugcaacaucugcaucuga

SEQ ID NO: 97347 - RNA, 1701 nt, Artificial Sequence
  derived and/or modified CDS sequence (opt2) from hemagglutinin__InfluenzaA__ABI92687
augaagaccaucaucgcccucuccuacauccucugccucgucuucgcccagaagcuccccggcaacgacaacuccaccgccacccucugccucggccaccacgccguccccaacggcaccaucgucaagaccaucaccaacgaccagaucgaggucaccaacgccaccgagcucguccaguccuccuccaccggcggcaucugcgacuccccccaccagauccucgacggcgagaacugcacccucaucgacgcccuccucggcgacccccagugcgacggcuuccagaacaagaagugggaccucuucgucgagcgcuccaaggccuacuccaacugcuaccccuacgacguccccgacuacgccucccuccgcucccucgucgccuccuccggcacccucgaguucaacaacgaguccuucgacuggaccggcgucacccagaacggcaccuccuccgccugcaagcgcggcuccaacaaguccuucuucucccgccucaacuggcucacccaccucaaguacaaguaccccgcccucaacgucaccaugcccaacaacgagaaguucgacaagcucuacaucuggggcguccaccaccccggcaccgacuccgaccagaucucccucuacgcccaggccuccggccgcaucaccgucuccaccaagcgcucccagcagaccgucauccccaacaucggcucccgcccccgcguccgcgacgucuccucccgcaucuccaucuacuggaccaucgucaagcccggcgacauccuccucaucaacuccaccggcaaccucaucgccccccgcggcuacuucaagauccgcuccggcaaguccuccaucaugcgcuccgacgcccccaucggcaagugcaacuccgagugcaucacccccaacggcuccauccccaacgacaagcccuuccagaacgucaaccgcaucaccuacggcgccugcccccgcuacgucaagcagaacacccucaagcucgccaccggcaugcgcaacguccccgagaagcagacccgcggcaucuucggcgccaucgccggcuucaucgagaacggcugggagggcauggucgacggcugguacggcuuccgccaccagaacuccgagggcaccggccaggccgccgaccucaaguccacccaggccgccaucaaccagaucaacggcaagcucaaccgccucaucggcaagaccaacgagaaguuccaccagaucgagaaggaguucuccgaggucgagggccgcauccaggaccucgagaaguacgucgaggacaccaagaucgaccucugguccuacaacgccgagcuccucgucgcccucgagaaccagcacaccaucgaccucaccgacuccgagaugaacaagcucuucgagcgcaccaagcgccagcuccgcgagaacgccgaggacaugggcaacggcugcuucaagaucuaccacaagugcgacaacgccugcaucggcuccauccgcaacggcaccuacgaccacgacgucuaccgcgacgaggcccucaacaaccgcuuccagaucaagggcgucgagcucaaguccggcuacaaggacuggauccucuggaucuccuucgccaucuccugcuuccuccucugcgucgcccuccucggcuucaucaugugggccugccagaagggcaacauccgcugcaacaucugcaucuga

SEQ ID NO: 97348 - RNA, 1701 nt, Artificial Sequence; identical to SEQ ID NO: 97347
  derived and/or modified CDS sequence (opt2) from hemagglutinin__InfluenzaA__ABI92698

SEQ ID NO: 97349 - RNA, 1701 nt, Artificial Sequence; identical to SEQ ID NO: 96552
  derived and/or modified CDS sequence (opt2) from hemagglutinin__InfluenzaA__ABI92709

SEQ ID NO: 97350 - RNA, 1701 nt, Artificial Sequence
  derived and/or modified CDS sequence (opt2) from hemagglutinin__InfluenzaA__ABI92720
augaagaccaucaucgcccucuccuacauccucugccucgucuucgcccagaagcuccccggcaacgacaacuccaccgccacccucugccucggccaccacgccguccccaacggcaccaucgucaagaccaucaccaacgaccagaucgaggucaccaacgccaccgagcucguccaguccuccuccaccggcggcaucugcgacuccccccaccagauccucgacggcgagaacugcacccucaucgacgcccuccucggcgacccccagugcgacggcuuccagaacaagaagugggaccucuucgucgagcgcuccaaggccuacuccaacugcuaccccuacgacguccccgaccacgccucccuccgcucccucgucgccuccuccggcacccucgaguucaacaacgaguccuucgacuggaccggcgucacccagaacggcaccuccuccgccugcaagcgccgcuccaacaaguccuucuucucccgccucaacuggcucacccaccucaaguacaaguaccccgcccucaacgucaccaugcccaacaacgagaaguucgacaagcucuacaucuggggcguccaccaccccggcaccgaguccgaccagaucucccucuacgcccaggccuccggccgcaucaccgucuccaccaagcgcucccagcagaccgucauccccaacaucggcucccgcccccgcguccgcgacgucuccucccgcaucuccaucuacuggaccaucgucaagcccggcgacauccuccucaucaacuccaccggcaaccucaucgccccccgcggcuacuucaagauccgcuccggcaaguccuccaucaugcgcuccgacgcccccaucggcaagugcaacuccgagugcaucacccccaacggcuccauccccaacgacaagcccuuccagaacgucaaccgcaucaccuacggcgccugcccccgcuacgucaagcagaacacccucaagcucgccaccggcaugcgcaacguccccgagaagcagacccgcggcaucuucggcgccaucgccggcuucaucgagaacggcugggagggcauggucgacggcugguacggcuuccgccaccagaacuccgagggcaccggccaggccgccgaccucaaguccacccaggccgccaucaaccagaucaacggcaagcucaaccgccucaucggcaagaccaacgagaaguuccaccagaucgagaaggaguucuccgaggucgagggccgcauccaggaccucgagaaguacgucgaggacaccaagaucgaccucugguccuacaacgccgagcuccucgucgcccucgagaaccagcacaccaucgaccucaccgacuccgagaugaacaagcucuucgagcgcaccaagaagcagcuccgcgagaacgccgaggacaugggcaacggcugcuucaagaucuaccacaagugcgacaacgccugcaucggcuccauccgcaacggcaccuacgaccacgacgucuaccgcgacgaggcccucaacaaccgcuuccagaucaagggcgucgagcucaaguccggcuacaaggacuggauccucuggaucuccuucgccaucuccugcuuccuccucugcgucgcccuccucggcuucaucaugugggccugccagaagggcaacauccgcugcaacaucugcaucuga

SEQ ID NO: 97351 - RNA, 1701 nt, Artificial Sequence
  derived and/or modified CDS sequence (opt2) from hemagglutinin__InfluenzaA__ABI92731
augaagaccaucaucgcccucuccuacauccucugccucgucuucgcccagaagcuccccggcaacgacaacuccaccgccacccucugccucggccaccacgccguccccaacggcaccaucgucaagaccaucaccaacgaccagaucgaggucaccaacgccaccgagcucguccaguccuccuccaccggcggcaucugcgacuccccccaccagauccucgacggcgagaacugcacccucaucgacgcccuccucggcgacccccagugcgacggcuuccagaacaagaagugggaccucuucgucgagcgcuccaaggccuacuccaacugcuaccccuacgacguccccgacuacgccucccuccgcucccucgucgccuccuccggcacccucgaguucaacaacgaguccuucgacuggaccggcgucacccagaacggcaccuccuccgccugcaagcgccgcuccaacaaguccuucuucucccgccucaacuggcucacccaccucaaguacaaguaccccgcccucaacgucaccaugcccaacaacgagaaguucgacaagcucuacaucuggggcguccaccaccccggcaccgacuccgaccagaucucccucuacgcccaggccuccggccgcaucaccgucuccaccaagcgcucccagcagaccgucauccccaacaucggcucccgcccccgcguccgcgacgucuccucccgcaucuccaucuacuggaccaucgucaagcccggcgacauccuccucaucaacuccaccggcaaccucaucgccccccgcggcuacuucaagauccgcuccggcaaguccuccaucaugcgcuccgacgcccccaucggcaagugcaacuccgagugcaucacccccaacggcuccauccccaacgacaagcccuuccagaacgucaaccgcaucaccuacggcgccugcccccgcuacgucaagcagaacacccucaagcucgccaccggcaugcgcaacguccccgagaagcagacccgcggcaucuucggcgccaucgccggcuucaucgagaacggcugggagggcauggucgacggcugguacggcuuccgccaccagaacuccgagggcaccggccaggccgccgaccucaaguccacccaggccgccaucaaccagaucaacggcaagcucaaccgccucaucggcaagaccaacgagaaguuccaccagaucgagaaggaguucuccgaggucgagggccgcauccaggaccucgagaaguacgucgaggacaccaagaucgaccucugguccuacaacgccgagcuccucgucgcccucgagaaccagcacaccaucgaccucaccgacuccgagaugaacaagcucuucgagcgcaccaagcgccagcuccgcgagaacgccgaggacaugggcaacggcugcuucaagaucuaccacaagugcgacaacgccugcaucggcuccauccgcaacggcaccuacgaccacgacgucuaccgcgacgaggcccucaacaaccgcuuccagaucaagggcgucgagcucaaguccggcuacaaggacuggauccucuggaucuccuucgccaucuccugcuuccuccucugcgucgcccuccucggcuucaucaugugggccugccagaagggcaacauccgcugcaacaucugcaucuga

SEQ ID NO: 97352 - RNA, 1701 nt, Artificial Sequence
  derived and/or modified CDS sequence (opt2) from hemagglutinin__InfluenzaA__ABI92742
augaagaccaucaucgcccucuccuacauccucugccucgucuucucccagaagcuccccggcaacgacaacuccaccgccacccucugccucggccaccacgccguccccaacggcaccaucgucaagaccaucaccaacgaccagaucgaggucaccaacgccaccgagcucguccaguccuccuccaccggcggcaucugcgacuccccccaccagauccucgacggcgagaacugcacccucaucgacgcccuccucggcgacccccagugcgacggcuuccagaacaagaagugggaccucuucgucgagcgcuccaaggccuacuccaacugcuaccccuacgacguccccgaccacgccucccuccgcucccucgucgccuccuccggcacccucgaguucaacaacgaguccuucgacuggaccggcgucacccagaacggcaccuccuccgccugcaagcgccgcuccaacaaguccuucuucucccgccucaacuggcucacccaccucaaguacaaguaccccgcccucaacgucaccaugcccaacaacgagaaguucgacaagcucuacaucuggggcguccaccaccccggcaccgacuccgaccagaucucccucuacgcccaggccuccggccgcaucaccgucuccaccaagcgcucccagcagaccgucauccccaacaucggcucccgcccccgcguccgcgacgucuccucccgcaucuccaucuacuggaccaucgucaagcccggcgacauccuccucaucaacuccaccggcaaccucaucgccccccgcggcuacuucaagauccgcuccggcaaguccuccaucaugcgcuccgacgcccccaucggcaagugcaacuccgagugcaucacccccaacggcuccauccccaacgacaagcccuuccagaacgucaaccgcaucaccuacggcgccugcccccgcuacgucaagcagaacacccucaagcucgccaccggcaugcgcaacguccccgagaagcagacccgcggcaucuucggcgccaucgccggcuucaucgagaacggcugggagggcauggucgacggcugguacggcuuccgccaccagaacuccgagggcaccggccaggccgccgaccucaaguccacccaggccgccaucaaccagaucaacggcaagcucaaccgccucaucggcaagaccaacgagaaguuccaccagaucgagaaggaguucuccgaggucgagggccgcauccaggaccucgagaaguacgucgaggacaccaagaucgaccucugguccuacaacgccgagcuccucgucgcccucgagaaccagcacaccaucgaccucaccgacuccgagaugaacaagcucuucgagcgcaccaagaagcagcuccgcgagaacgccgaggacaugggcaacggcugcuucaagaucuaccacaagugcgacaacgccugcaucggcuccauccgcaacggcaccuacgaccacgacgucuaccgcgacgaggcccucaacaaccgcuuccagaucaagggcgucgagcucaaguccggcuacaaggacuggauccucuggaucuccuucgccaucuccugcuuccuccucugcgucgcccuccucggcuucaucaugugggccugccagaagggcaacauccgcugcaacaucugcaucuga

SEQ ID NO: 97353 - RNA, 1701 nt, Artificial Sequence
  derived and/or modified CDS sequence (opt2) from hemagglutinin__InfluenzaA__ABI92753
augaagaccaucaucgcccucuccuacauccucugccucgucuucgcccagaagcuccccggcaacgacaacuccaccgccacccucugccucggccaccacgccguccccaacggcaccaucgucaagaccaucaccaacgaccagaucgaggucaccaacgccaccgagcucguccaguccuccuccaccggcggcaucugcgacuccccccaccagauccucgacggcgagaacugcacccucaucgacgcccuccucggcgacccccagugcgacggcuuccagaacaagaagugggaccucuucgucgagcgcuccaaggccuacuccaacugcuaccccuacgacguccccgacuacgccuaccuccgcucccucgucgccuccuccggcacccucgaguucaacaacgaguccuucgacuggaccggcgucacccagaacggcaccuccuccgccugcaagcgccgcuccaacaaguccuucuucucccgccucaacuggcucacccaccucaaguacaaguaccccgcccucaacgucaccaugcccaacaacgagaaguucgacaagcucuacaucuggggcguccaccaccccggcaccgacuccgaccagaucucccucuacgcccaggccuccggccgcaucaccgucuccaccaagcgcucccagcagaccgucauccccaacaucggcucccgcccccgcguccgcgacgucuccucccgcaucuccaucuacuggaccaucgucaagcccggcgacauccuccucaucaacuccaccggcaaccucaucgccccccgcggcuacuucaagauccgcuccggcaaguccuccaucaugcgcuccgacgcccccaucggcaagugcaacuccgagugcaucacccccaacggcuccauccccaacgacaagcccuuccagaacgucaaccgcaucaccuacggcgccugcccccgcuacgucaagcagaacacccucaagcucgccaccggcaugcgcaacguccccgagaagcagacccgcggcaucuucggcgccaucgccggcuucaucgagaacggcugggagggcauggucgacggcugguacggcuuccgccaccagaacuccgagggcaccggccaggccgccgaccucaaguccacccaggccgccaucaaccagaucaacggcaagcucaaccgccucaucggcaagaccaacgagaaguuccaccagaucgagaaggaguucuccgaggucgagggccgcauccaggaccucgagaaguacgucgaggacaccaagaucgaccucugguccuacaacgccgagcuccucgucgcccucgagaaccagcacaccaucgaccucaccgacuccgagaugaacaagcucuucgagcgcaccaagcgccagcuccgcgagaacgccgaggacaugggcaacggcugcuucaagaucuaccacaagugcgacaacgccugcaucggcuccauccgcaacggcaccuacgaccacgacgucuaccgcgacgaggcccucaacaaccgcuuccagaucaagggcgucgagcucaaguccggcuacaaggacuggauccucuggaucuccuucgccaucuccugcuuccuccucugcgucgcccuccucggcuucaucaugugggccugccagaagggcaacauccgcugcaacaucugcaucuga

SEQ ID NO: 97354 - RNA, 1701 nt, Artificial Sequence
  derived and/or modified CDS sequence (opt2) from hemagglutinin__InfluenzaA__ABI92764
augaagaccaucaucgcccucuccuacauccucugccucgucuucgcccagaagcuccccggcaacgacaacuccaccgccacccucugccucggccaccacgccguccccaacggcaccaucgucaagaccaucaccaacgaccagaucgaggucaccaacgccaccgagcucguccaguccuccuccaccggcgagaucugcgacuccccccaccagauccucgacggcgagaacugcacccucaucgacgcccuccucggcgacccccagugcgacggcuuccagaacaagaagugggaccucuucgucgagcgcuccaaggccuacuccaacugcuaccccuacgacguccccgacuacgccucccuccgcucccucgucgccuccuccggcacccucgaguucaacaacgaguccuucgacuggaccggcgucacccagaacggcaccuccuccgccugcaagcgcggcuccaacaaguccuucuucucccgccucaacuggcucacccaccucaaguacaaguaccccgcccucaacgucaccaugcccaacaacgagaaguucgacaagcucuacaucuggggcguccaccaccccggcaccgacuccgaccagaucucccucuacgcccaggccuccggccgcaucaccgucuccaccaagcgcucccagcagaccgucauccccaacaucggcucccgcccccgcguccgcgacgucuccucccgcaucuccaucuacuggaccaucgucaagcccggcgacauccuccucaucaacuccaccggcaaccucaucgccccccgcggcuacuucaagauccgcuccggcaaguccuccaucaugcgcuccgacgcccccaucggcaagugcaacuccgagugcaucacccccaacggcuccauccccaacgacaagcccuuccagaacgucaaccgcaucaccuacggcgccugcccccgcuacgucaagcagaacacccucaagcucgccaccggcaugcgcaacguccccgagaagcagacccgcggcaucuucggcgccaucgccggcuucaucgagaacggcugggagggcauggucgacggcugguacggcuuccgccaccagaacuccgagggcaccggccaggccgccgaccucaaguccacccaggccgccaucaaccagaucaacggcaagcucaaccgccucaucggcaagaccaacgagaaguuccaccagaucgagaaggaguucuccgaggucgagggccgcauccaggaccucgagaaguacgucgaggacaccaagaucgaccucugguccuacaacgccgagcuccucgucgcccucgagaaccagcacaccaucgaccucaccgacuccgagaugaacaagcucuucgagcgcaccaagcgccagcuccgcgagaacgccgaggacaugggcaacggcugcuucaagaucuaccacaagugcgacaacgccugcaucggcuccauccgcaacggcaccuacgaccacgacgucuaccgcgacgaggcccucaacaaccgcuuccagaucaagggcgucgagcucaaguccggcuacaaggacuggauccucuggaucuccuucgccaucuccugcuuccuccucugcgucgcccuccucggcuucaucaugugggccugccagaagggcaacauccgcugcaacaucugcaucuga

SEQ ID NO: 97355 - RNA, 1701 nt, Artificial Sequence; identical to SEQ ID NO: 97347
  derived and/or modified CDS sequence (opt2) from hemagglutinin__InfluenzaA__ABI92775

SEQ ID NO: 97356 - RNA, 1701 nt, Artificial Sequence; identical to SEQ ID NO: 96279
  derived and/or modified CDS sequence (opt2) from hemagglutinin__InfluenzaA__ABI92786

SEQ ID NO: 97357 - RNA, 1701 nt, Artificial Sequence
  derived and/or modified CDS sequence (opt2) from hemagglutinin__InfluenzaA__ABI92797
augaagaccaucaucgcccucuccuacauccucugccucgucuucgcccagaagcuccccggcaacgacaacuccaccgccacccucugccucggccaccacgccguccccaacggcaccaucgucaagaccaucaccaacgaccagaucgaggucaccaacgccaccgagcucguccaguccuccuccaccggcggcaucugcgacuccccccaccagauccucgacggcgagaacugcacccucaucgacgcccuccucggcgacccccagugcgacggcuuccagaacaagaagugggaccucuucgucgagcgcuccaaggccuacuccaacugcuaccccuacgacguccccgacuacgccucccuccgcucccucgucgccuccuccggcacccucgaguucaacaacgaguccuucaacuggaccggcgucacccagaacggcaccuccuccgccugcaagcgccgcuccaacaacuccuucuucucccgccucaacuggcucacccaccucaaguucaaguaccccgcccucaacgucaccaugcccaacaacgagaaguucgacaagcucuacaucuggggcguccaccaccccggcaccgacaacgaccagaucucccucuacgcccaggccuccggccgcaucaccgucuccaccaagcgcucccagcagaccgucaucuccaacaucggcucccgcccccgcguccgcgacauccccucccgcaucuccaucuacuggaccaucgucaagcccggcgacauccuccucaucaacuccaccggcaaccucaucgccccccgcggcuacuucaagauccgcuccggcaaguccuccaucaugcgcuccgacgcccccaucggcaagugcaacuccgagugcaucacccccaacggcuccauccccaacgacaagcccuuccagaacgucaaccgcaucaccuacggcgccugcccccgcuacgucaagcagaacacccucaagcucgccaccggcaugcgcaacguccccgagaagcagacccgcggcaucuucggcgccaucgccggcuucaucgagaacggcugggagggcauggucgacggcugguacggcuuccgccaccagaacuccgagggcaucggccaggccgccgaccucaaguccacccaggccgccaucaaccagaucaacggcaagcucaaccgccucaucggcaagaccaacgagaaguuccaccagaucgagaaggaguucuccgaggucgagggccgcauccaggaccucgagaaguacgucgaggacaccaagaucgaccucugguccuacaacgccgagcuccucgucgcccucgagaaccagcacaccaucgaccucaccgacuccgagaugaacaagcucuucgagcgcaccaagaagcagcuccgcgagaacgccgaggacaugggcaacggcugcuucaagaucuaccacaagugcgacaacgccugcaucggcuccauccgcaacggcaccuacgaccacgacgucuaccgcgacgaggcccucaacaaccgcuuccagaucaagggcgucgagcucaaguccggcuacaaggacuggauccucuggaucuccuucgccaucuccugcuuccuccucugcgucgcccuccucggcuucaucaugugggccugccagaagggcaacauccgcugcaacaucugcaucuga

SEQ ID NO: 97358 - RNA, 1701 nt, Artificial Sequence; identical to SEQ ID NO: 96279
  derived and/or modified CDS sequence (opt2) from hemagglutinin__InfluenzaA__ABI92808

SEQ ID NO: 97359 - RNA, 1701 nt, Artificial Sequence; identical to SEQ ID NO: 96279
  derived and/or modified CDS sequence (opt2) from hemagglutinin__InfluenzaA__ABI92819

SEQ ID NO: 97360 - RNA, 1701 nt, Artificial Sequence; identical to SEQ ID NO: 96279
  derived and/or modified CDS sequence (opt2) from hemagglutinin__InfluenzaA__ABI92841

SEQ ID NO: 97361 - RNA, 1701 nt, Artificial Sequence
  derived and/or modified CDS sequence (opt2) from hemagglutinin__InfluenzaA__ABI92852
augaagaccaucaucgcccucuccuacauccucugccucgucuucgcccagaagcuccccggcaacgacaacuccaccgccacccucugccucggccaccacgccguccccaacggcaccaucgucaagaccaucaccaacgaccagaucgaggucaccaacgccaccgagcucguccaguccuccuccaccggcggcaucugcgacuccccccaccagauccucgacggcgagaacugcacccucaucgacgcccuccucggcgacccccagugcgacggcuuccagaacaagaagugggaccucuucgucgagcgcuccaaggccuacuccaacugcuaccccuacgacguccccgacuacgccucccuccgcucccucgucgccuccuccggcacccucgaguucaacaacgaguccuucaacuggaccggcgucacccagaacggcaccuccuccgccugcaagcgccgcuccaacaacuccuucuucucccgccucaacuggcucacccaccucaaguucaaguaccccgcccucaacgucaccaugcccaacaacgagaaguucgacaagcucuacaucuggggcguccaccaccccggcaccgacaacgaccagaucucccucuacgcccaggccuccggccgcaucaccgucuccaccaagcgcucccagcagaccgucauccccaacaucggcuaccgcccccgcguccgcgacauccccucccgcaucuccaucuacuggaccaucgucaagcccggcgacauccuccucaucaacuccaccggcaaccucaucgccccccgcggcuacuucaagauccgcuccggcaaguccuccaucaugcgcuccgacgcccccaucggcaagugcaacuccgagugcaucacccccaacggcuccauccccaacgacaagcccuuccagaacgucaaccgcaucaccuacggcgccugcccccgcuacgucaagcagaacacccucaagcucgccaccggcaugcgcaacguccccgagaagcagacccgcggcaucuucggcgccaucgccggcuucaucgagaacggcugggagggcauggucgacggcugguacggcuuccgccaccagaacuccgagggcaucggccaggccgccgaccucaaguccacccaggccgccaucaaccagaucaacggcaagcucaaccgccucaucggcaagaccaacgagaaguuccaccagaucgagaaggaguucuccgaggucgagggccgcauccaggaccucgagaaguacgucgaggacaccaagaucgaccucugguccuacaacgccgagcuccucgucgcccucgagaaccagcacaccaucgaccucaccgacuccgagaugaacaagcucuucgagcgcaccaagaagcagcuccgcgagaacgccgaggacaugggcaacggcugcuucaagaucuaccacaagugcgacaacgccugcaucggcuccauccgcaacggcaccuacgaccacgacgucuaccgcgacgaggcccucaacaaccgcuuccagaucaagggcgucgagcucaaguccggcuacaaggacuggauccucuggaucuccuucgccaucuccugcuuccuccucugcgucgcccuccucggcuucaucaugugggccugccagaagggcaacauccgcugcaacaucugcaucuga

SEQ ID NO: 97362 - RNA, 1701 nt, Artificial Sequence
  derived and/or modified CDS sequence (opt2) from hemagglutinin__InfluenzaA__ABI92863
augaagaccaucaucgcccucuccuacauccucugccucgucuucgcccagaagcuccccggcaacgacaacuccaccgccacccucugccucggccaccacgccguccccaacggcaccaucgucaagaccaucaccaacgaccagaucgaggucaccaacgccaccgagcucguccaguccuccuccaccggcggcaucugcgacuccccccaccagauccucgacggcgagaacugcacccucaucgacgcccuccucggcgacccccagugcgacggcuuccagaacaagaagugggaccucuucgucgagcgcuccaaggcccacuccaacugcuaccccuacgacguccccgacuacgccucccuccgcucccucaucgccuccuccggcacccucgaguucaacaacgaguccuucaacuggaccggcgucacccagaacggcaccuccuccgccugcaagcgccgcuccaaccaguccuucuucucccgccucaacuggcucacccaccucaaguucaaguaccccgcccucaacgucaccaugcccaacaacgagaaguucgacaagcucuacaucuggggcguccaccaccccggcaccgacuccgaccagaucucccucuacgcccaggcccccggccgcaucaccgucuccaccaagcgcucccagcagaccgucauccccaacaucggcucccgcccccgcguccgcgacaucuccucccgcaucuccaucuacuggaccaucgucaagcccggcgacauccuccucaucaacuccaccggcaaccucaucgccccccgcggcuacuucaagauccgcuccggcaaguccuccaucaugaaguccgacgcccccaucggccgcugcaacuccgagugcaucacccccaacggcuccauccccaacgacaagcccuuccagaacgucaaccgcaucaccuacggcgccugcccccgcuacgucaagcagaacacccucaagcucgccaccggcaugcgcaacguccccgagaagcagacccgcggcaucuucggcgccaucgccggcuucaucgagaacggcugggagggcauggucgacggcugguacggcuuccgccaccagaacuccgagggcaccggccaggccgccgaccucaaguccacccaggccgccaucaaccagaucaacggcaagcucaaccgccucaucggcaagaccaacgagaaguuccaccagaucgagaaggaguucuccgaggucgagggccgcauccaggaccucgagaaguacgucgaggacaccaagaucgaccucugguccuacaacgccgagcuccucgucgcccucgagaaccagcacaccaucgaccucaccgacuccgagaugaacaagcucuucgagcgcaccaagaagcagcuccgcgagaacgccgaggacaugggcaacggcugcuucaagaucuaccacaagugcgacaacgccugcaucggcuccauccgcaacggcaccuacgaccacgacgucuaccgcgacgaggcccucaacaaccgcuuccagaucaagggcgucgagcucaaguccggcuacaaggacuggauccucuggaucuccuucgccaucuccugccuccuccucugcgucgcccuccucggcuucaucaugugggccugccagaagggcaacauccgcugcaacaucugcaucuga

SEQ ID NO: 97363 - RNA, 1701 nt, Artificial Sequence; identical to SEQ ID NO: 96279
  derived and/or modified CDS sequence (opt2) from hemagglutinin__InfluenzaA__ABI92874

SEQ ID NO: 97364 - RNA, 1701 nt, Artificial Sequence; identical to SEQ ID NO: 96279
  derived and/or modified CDS sequence (opt2) from hemagglutinin__InfluenzaA__ABI92885

SEQ ID NO: 97365 - RNA, 1701 nt, Artificial Sequence
  derived and/or modified CDS sequence (opt2) from hemagglutinin__InfluenzaA__ABI92907
augaagaccaucaucgcccucuccuacauccucugccucgucuucgcccagaagcuccccggcaacgacaacuccaccgccacccucugccucggccaccacgccguccccaacggcaccaucgucaagaccaucaccaacgaccagaucgaggucaccaacgccaccgagcucguccaguccuccuccaccggcggcaucugcgacucccccuaccagauccucgacggcgagaacugcacccucaucgacgcccuccucggcgacccccagugcgacggcuuccagaacaagaagugggaccucuucgucgagcgcuccaaggccuacuccaacugcuaccccuacgacguccccgacuacgucucccuccgcucccucgucgccuccuccggcacccucgaguucaacaacgaguccuucaacuggaccggcgucacccagaacggcaccuccuccgccugcaagcgccgcuccaacaacuccuucuucucccgccucaacuggcucacccaccucaaguucaaguaccccgcccucaacgucaccaugcccaacaacgagaaguucgacaagcucuacaucuggggcguccaccaccccggcaccgacaacgaccagaucucccucuacgcccaggccuccggccgcaucaccgucuccaccaagcgcucccagcagaccgucauccccaacaucggcucccgcccccgcguccgcgacauccccucccgcaucuccaucuacuggaccaucgucaagcccggcgacauccuccucaucaacuccaccggcaaccucaucgccccccgcggcuacuucaagauccgcuccggcaaguccuccaucaugcgcuccgacgcccccaucggcaagugcaacuccgagugcaucacccccaacggcuccauccccaacgacaagcccuuccagaacgucaaccgcaucaccuacggcgccugcccccgcuacgucaagcagaacacccucaagcucgccaccggcaugcgcaacguccccgagaagcagacccgcggcaucuucggcgccaucgccggcuucaucgagaacggcugggagggcauggucgacggcugguacggcuuccgccaccagaacuccgagggcaucggccaggccgccgaccucaaguccacccaggccgccaucaaccagaucaacggcaagcucaaccgccucaucggcaagaccaacgagaaguuccaccagaucgagaaggaguucuccgaggucgagggccgcauccaggaccucgagaaguacgucgaggacaccaagaucgaccucugguccuacaacgccgagcuccucgucgcccucgagaaccagcacaccaucgaccucaccgacuccgagaugaacaagcucuucgagcgcaccaagaagcagcuccgcgagaacgccgaggacaugggcaacggcugcuucaagaucuaccacaagugcgacaacgccugcaucggcuccauccgcaacggcaccuacgaccacgacgucuaccgcgacgaggcccucaacaaccgcuuccagaucaagggcgucgagcucaaguccggcuacaaggacuggauccucuggaucuccuucgccaucuccugcuuccuccucugcgucgcccuccucggcuucaucaugugggccugccagaagggcaacauccgcugcaacaucugcaucuga

SEQ ID NO: 97366 - RNA, 1701 nt, Artificial Sequence; identical to SEQ ID NO: 96279
  derived and/or modified CDS sequence (opt2) from hemagglutinin__InfluenzaA__ABI92918

SEQ ID NO: 97367 - RNA, 1701 nt, Artificial Sequence; identical to SEQ ID NO: 97365
  derived and/or modified CDS sequence (opt2) from hemagglutinin__InfluenzaA__ABI92929

SEQ ID NO: 97368 - RNA, 1701 nt, Artificial Sequence
  derived and/or modified CDS sequence (opt2) from hemagglutinin__InfluenzaA__ABI92940
augaagaccaucaucgccuucaacuacauccucugccucgucuucgcccagaagcuccccggcaacgacaacuccaccgccacccucugccucggccaccacgccguccccaacggcaccaucgucaagaccaucaccaacgaccagaucgaggucaccaacgccaccgagcucguccaguccuccuccaccggcggcaucugcgacuccccccaccagauccucgacggcgagaacugcacccucaucgacgcccuccucggcgacccccagugcgacggcuuccagaacaagaagugggaccucuucgucgagcgcuccaaggccuacuccaacugcuaccccuacgacguccccgacuacgccucccuccgcucccucgucgccuccuccggcacccucgaguucaacaacgagaucuucaacuggaccggcgucacccagaacggcaccuccuccgccugcaagcgccgcuccaacaacuccuucuucucccgccucaacuggcucacccaccucaaguucaaguaccccgcccucaacgucaccaugcccaacaacgagaaguucgacaagcucuacaucuggggcguccaccaccccggcaccgacaacgaccagaucucccucuacgcccaggccuccggccgcaucaccgucuccaccaagcgcucccagcagaccgucauccccaacaucggcucccgcccccgcguccgcgacauccccucccgcaucuccaucuacuggaccaucgucaagcccggcgacauccuccucaucaacuccaccggcaaccucaucgccccccgcggcuacuucaagauccgcuccggcaaguccuccaucaugcgcuccgacgcccccaucggcaagugcaacuccgagugcaucacccccaacggcuccauccccaacgacaagcccuuccagaacgucaaccgcaucaccuacggcgccugcccccgcuacgucaagcagaacacccucaagcucgccaccggcaugcgcaacguccccgagaagcagacccgcggcaucuucggcgccaucgccggcuucaucgagaacggcugggagggcauggucgacggcugguacggcuuccgccaccagaacuccgagggcaccggccaggccgccgaccucaaguccacccaggccgccaucaaccagaucaacggcaagcucaaccgccucaucggcaagaccaacgagaaguuccaccagaucgagaaggaguucuccgaggucgagggccgcauccaggaccucgagaaguacgucgaggacaccaagaucgaccucugguccuacaacgccgagcuccucgucgcccucgagaaccagcacaccaucgaccucaccgacuccgagaugaacaagcucuucgagcgcaccaagaagcagcuccgcgagaacgccgaggacaugggcaacggcugcuucaagaucuaccacaagugcgacaacgccugcaucggcuccauccgcaacggcaccuacgaccacgacgucuaccgcgacgaggcccucaacaaccgcuuccagaucaagggcgucgagcucaaguccggcuacaaggacuggauccucuggaucuccuucgccaucuccugcuuccuccucugcgucgcccuccucggcuucaucaugugggccugccagaagggcaacauccgcugcaacaucugcaucuga

SEQ ID NO: 97369 - RNA, 1701 nt, Artificial Sequence
  derived and/or modified CDS sequence (opt2) from hemagglutinin__InfluenzaA__ABI92951
augaagaccaucaucgcccucuccuacauccucugccucgucuucgcccagaagcuccccggcaacgacaacuccaccgccacccucugccucggccaccacgccguccccaacggcaccaucgucaagaccaucaccaacgaccagaucgaggucaccaacgccaccgagcucguccaguccuccuccaccggcggcaucugcgacuccccccaccagauccucgacggcgagaacugcacccucaucgacgcccuccucggcgacccccagugcgacggcuuccagaacaagaagugggaccucuucgucgagcgcuccaaggccuacuccaacugcuaccccuacgacguccccgacuacgccucccuccgcucccucaucgccuccuccggcacccucgaguucaacaacgaguccuucaacuggaccggcgucacccagaacggcaccuccuccgccugcaagcgccgcuccaacuccuccuucuucucccgccucaacuggcucacccaccucaaguucaaguaccccgcccucaacgucaccaugcccaacaacgaggaguucgacaagcucuacaucuggggcguccaccaccccggcaccuacaacgaccagaucucccucuacgcccaggccuccggccgcaucaccgucuccaccaagcgcucccagcagaccgucauccccaacaucggcucccgcccccgcguccgcgacauccccucccgcaucuccaucuacuggaccaucgucaagcccggcgacauccuccucaucaacuccaccggcaaccucaucgccccccgcggcuacuucaagauccgcuccggcaaguccuccaucaugcgcuccgacgcccccaucggcaagugcaacuccgagugcaucacccccaacggcuccauccccaacgacaagcccuuccagaacgucaaccgcaucaccuacggcgccugcccccgcuacgucaagcagaacacccucaagcucgccaccggcaugcgcaacguccccgagaagcagacccgcggcaucuucggcgccaucgccggcuucaucgagaacggcugggagggcauggucgacggcugguacggcuuccgccaccagaacuccgagggcaucggccaggccgccgaccucaaguccacccaggccgccaucgaccagaucaacggcaagcucaaccgccucaucggcaagaccaacgagaaguuccaccagaucgagaaggaguucuccgaggucgagggccgcauccaggaccucgagaaguacgucgaggacaccaagaucgaccucugguccuacaacgccgagcuccucgucgcccucgagaaccagcacaccaucgaccucaccgacuccgagaugaacaagcucuucgagcgcaccaagaagcagcuccgcgagaacgccgaggacaugggcaacggcugcuucaagaucuaccacaagugcgacaacuccugcaucggcuccauccgcaacggcaccuacgaccacgacgucuaccgcgacgaggcccucaacaaccgcuuccagaucaagggcgucgagcucaaguccggcuacaaggacuggauccucuggaucuccuucgccaucuccugcuuccuccucugcgucgcccuccucggcuucaucaugugggccugccagaagggcaacauccgcugcaacaucugcaucuga

SEQ ID NO: 97370 - RNA, 1701 nt, Artificial Sequence
  derived and/or modified CDS sequence (opt2) from hemagglutinin__InfluenzaA__ABI92962
augaagaccaucaucgcccucuccuacauccucugccucgucuucgcccagaagcuccccggcaacgacaacuccaccgccacccucugccucggccaccacgccguccccaacggcaccaucgucaagaccaucaccaacgaccagaucgaggucaccaacgccaccgagcucguccaguccuccuccaccggcggcaucugcgacuccccccaccagauccucgacggcgagaacugcacccucaucgacgcccuccucggcgacccccagugcgacggcuuccagaacaagaagugggaccucuucgucgagcgcaacaaggccuacuccaacugcuaccccuacgacguccccgacuacgccucccuccgcucccucaucgccuccuccggcacccucgaguucaacaacgaguccuucaacuggaccggcgucacccagaacggcaccuccuccgccugcaagcgccgcuccaacuccuccuucuucucccgccucaacuggcucacccaccucaaguucaaguaccccgcccucaacgucaccaugcccaacaacgaggaguucgacaagcucuacaucuggggcguccaccaccccggcaccuacaacgaccagaucucccucuacgcccaggccuccggccgcaucaccgucuccaccaagcgcucccagcagaccgucauccccaacaucggcucccgcccccgcguccgcgacauccccucccgcaucuccaucuacuggaccaucgucaagcccggcgacauccuccucaucaacuccaccggcaaccucaucgccccccgcggcuacuucaagauccgcuccggcaaguccuccaucaugcgcuccgacgcccccaucggcaagugcaacuccgagugcaucacccccaacggcuccauccccaacgacaagcccuuccagaacgucaaccgcaucaccuacggcgccugcccccgcuacgucaagcagaacacccucaagcucgccaccggcaugcgcaacguccccgagaagcagacccgcggcaucuucggcgccaucgccggcuucaucgagaacggcugggagggcauggucgacggcugguacggcuuccgccaccagaacuccgagggcaucggccaggccgccgaccucaaguccacccaggccgccaucgaccagaucaacggcaagcucaaccgccucaucggcaagaccaacgagaaguuccaccagaucgagaaggaguucuccgaggucgagggccgcauccaggaccucgagaaguacgucgaggacaccaagaucgaccucugguccuacaacgccgagcuccucgucgcccucgagaaccagcacaccaucgaccucaccgacuccgagaugaacaagcucuucgagcgcaccaagaagcagcuccgcgagaacgccgaggacaugggcaacggcugcuucaagaucuaccacaagugcgacaacgccugcaucggcuccauccgcaacggcaccuacgaccacgacgucuaccgcgacgaggcccucaacaaccgcuuccagaucaagggcgucgagcucaaguccggcuacaaggacuggauccucuggaucuccuucgccaucuccugcuuccuccucugcgucgcccuccucggcuucaucaugugggccugccagaagggcaacauccgcugcaacaucugcaucuga

SEQ ID NO: 97371 - RNA, 1701 nt, Artificial Sequence; identical to SEQ ID NO: 96669
  derived and/or modified CDS sequence (opt2) from hemagglutinin__InfluenzaA__ABI92973

SEQ ID NO: 97372 - RNA, 1701 nt, Artificial Sequence; identical to SEQ ID NO: 96669
  derived and/or modified CDS sequence (opt2) from hemagglutinin__InfluenzaA__ABI92984

SEQ ID NO: 97373 - RNA, 1701 nt, Artificial Sequence
  derived and/or modified CDS sequence (opt2) from hemagglutinin__InfluenzaA__ABI92995
augaagaccaucaucgcccucuccuacauccucugccucgucuucgcccagaagcuccccggcaacgacaacuccaccgccacccucugccucggccaccacgccguccccaacggcaccaucgucaagaccaucaccaacgaccagaucgaggucaccaacgccaccgagcucguccaguccuccuccaccggcggcaucugcgacuccccccaccagauccucgacggcgagaacugcacccucaucgacgcccuccucggcgacccccagugcgacggcuuccagaacaagaagugggaccucuucgucgagcgcuccaaggccuacuccaacugcuaccccuacgacguccccgacuacgccucccuccgcucccucaucgccuccuccggcacccucgaguucaacaacgaguccuucaacuggaccggcgucacccagaacggcaccuccuccgccugcaagcgccgcuccaacuccuccuucuucucccgccucaacuggcucacccaccucaaguucaaguaccccgcccucaacgucaccaugcccaacaacgaggaguucgacaagcucuacaucuggggcguccaccaccccggcaccuacaacgaccagaucucccucuacgcccaggccuccggccgcaucaccgucuccaccaagcgcucccagcagaccgucauccccaacaucggcucccgcccccgcauccgcgacauccccucccgcaucuccaucuacuggaccaucgucaagcccggcgacauccuccucaucaacuccaccggcaaccucaucgccccccgcggcuacuucaagauccgcuccggcaaguccuccaucaugcgcuccgacgcccccaucggcaagugcaacuccgagugcaucacccccaacggcuccauccccaacgacaagcccuuccagaacgucaaccgcaucaccuacggcgccugccccaaguacgucaagcagaacacccucaagcucgccaccggcaugcgcaacguccccgagaagcagacccgcggcaucuucggcgccaucgccggcuucaucgagaacggcugggagggcauggucgacggcugguacggcuuccgccaccagaacuccgagggcaucggccaggccgccgaccucaaguccacccaggccgccaucgaccagaucaacggcaagcucaaccgccucaucggcaagaccaacgagaaguuccaccagaucgagaaggaguucuccgaggucgagggccgcauccaggaccucgagaaguacgucgaggacaccaagaucgaccucugguccuacaacgccgagcuccucgucgcccucgagaaccagcacaccaucgaccucaccgacuccgagaugaacaagcucuucgagcgcaccaagaagcagcuccgcgagaacgccgaggacaugggcaacggcugcuucaagaucuaccacaagugcgacaacgccugcaucggcuccauccgcaacggcaccuacgaccacgacgucuaccgcgacgaggcccucaacaaccgcuuccagaucaagggcgucgagcucaaguccggcuacaaggacuggauccucuggaucuccuucgccaucuccugcuuccuccucugcgucgcccuccucggcuucaucaugugggccugccagaagggcaacauccgcugcaacaucugcaucuga

SEQ ID NO: 97374 - RNA, 1701 nt, Artificial Sequence; identical to SEQ ID NO: 96669
  derived and/or modified CDS sequence (opt2) from hemagglutinin__InfluenzaA__ABI93006

SEQ ID NO: 97375 - RNA, 1701 nt, Artificial Sequence; identical to SEQ ID NO: 96669
  derived and/or modified CDS sequence (opt2) from hemagglutinin__InfluenzaA__ABI93017

SEQ ID NO: 97376 - RNA, 1698 nt, Artificial Sequence; identical to SEQ ID NO: 97268
  derived and/or modified CDS sequence (opt2) from hemagglutinin__InfluenzaA__ABI93028

SEQ ID NO: 97377 - RNA, 1701 nt, Artificial Sequence; identical to SEQ ID NO: 97002
  derived and/or modified CDS sequence (opt2) from hemagglutinin__InfluenzaA__ABI93039

SEQ ID NO: 97378 - RNA, 1701 nt, Artificial Sequence
  derived and/or modified CDS sequence (opt2) from hemagglutinin__InfluenzaA__ABI93061
augaagaccaucaucgcccucuccuacauccucugccucgucuucgcccagaagcuccccggcaacgacaacuccaccgccacccucugccucggccaccacgccguccccaacggcacccucgucaagaccaucaccaacgaccagaucgaggucaccaacgccaccgagcucguccaguccuccuccaccggccgcaucugcgacuccccccaccagauccucgacggcgagaacugcacccucaucgacgcccuccucggcgacccccacugcgacggcuuccagaacaaggagugggaccucuucgucgagcgcuccaaggccuacuccaacugcuaccccuacgacguccccgacuacgccucccuccgcucccucgucgccuccuccggcacccucgaguucaacaacgaguccuucaacuggaccggcgucgcccagaacggcaccuccuccgccugcaagcgccgcuccaacaaguccuucuucucccgccucaacuggcuccaccagcucaaguacaaguaccccgcccucaacgucaccaugcccaacaacgagaaguucgacaagcucuacaucuggggcguccaccaccccuccaccgacuccgaccagaucucccucuacgcccaggccuccggccgcgucaccgucuccaccaagcgcucccagcagaccgucauccccaacaucggcucccgccccuggguccgcggcgucuccucccgcaucuccaucuacuggaccaucgucaagcccggcgacauccuccucaucaacuccaccggcaaccucaucgccccccgcggcuacuucaagauccgcuccggcaaguccuccaucaugcgcuccgacgccuccaucggcaagugcaacuccgagugcaucacccccaacggcuccauccccaacgacaagcccuuccagaacgucaaccgcaucaccuacggcgccugcccccgcuacgucaagcagaacacccucaagcucgccaccggcaugcgcaacguccccgagaagcagacccgcggcaucuucggcgccaucgccggcuucaucgagaacggcugggagggcauggucgacggcugguacggcuuccgccaccagaacuccgagggcaccggccaggccgccgaccucaaguccacccaggccgccaucaaccagaucaacggcaagcucaaccgccucaucgagaagaccaacgagaaguuccaccagaucgagaaggaguucuccgaggucgagggccgcauccaggaccucgagaaguacgucgaggacaccaagaucgaccucugguccuacaacgccgagcuccucgucgcccucgagaaccagcacaccaucgaccucaccgacuccgagaugaacaagcucuucgagcgcaccaagaagcagcuccgcgagaacgccgaggacaugggcaacggcugcuucaagaucuaccacaagugcgacaacgccugcaucggcuccauccgcaacggcaccuacgaccacgacgucuaccgcgacgaggcccucaacaaccgcuuccagaucaagggcgucgagcucaaguccggcuacaaggacuggauccucuggaucuccuucgccaucuccugcuuccuccucugcgucguccuccucggcuucaucaugugggccugccagaagggcaacauccgcugcaacaucugcaucuga

SEQ ID NO: 97379 - RNA, 1701 nt, Artificial Sequence; identical to SEQ ID NO: 96686
  derived and/or modified CDS sequence (opt2) from hemagglutinin__InfluenzaA__ABI93072

SEQ ID NO: 97380 - RNA, 1701 nt, Artificial Sequence; identical to SEQ ID NO: 96686
  derived and/or modified CDS sequence (opt2) from hemagglutinin__InfluenzaA__ABI93083

SEQ ID NO: 97381 - RNA, 1701 nt, Artificial Sequence; identical to SEQ ID NO: 96686
  derived and/or modified CDS sequence (opt2) from hemagglutinin__InfluenzaA__ABI93094

SEQ ID NO: 97382 - RNA, 1701 nt, Artificial Sequence; identical to SEQ ID NO: 96686
  derived and/or modified CDS sequence (opt2) from hemagglutinin__InfluenzaA__ABI93105

SEQ ID NO: 97383 - RNA, 1701 nt, Artificial Sequence
  derived and/or modified CDS sequence (opt2) from hemagglutinin__InfluenzaA__ABI93116
augaagaccaucaucgcccucuccuacauccucugccucgucuucgcccagaagcuccccggcaacgacaacuccaccgccacccucugccucggccaccacgccguccccaacggcacccucgucaagaccaucaccaacgaccagaucgaggucaccaacgccaccgagcucguccaguccuccuccaccggcggcaucugcgacuccccccaccagauccucgacggcgagaacugcacccucaucgacgcccuccucggcgacccccacugcgacggcuuccagaacaaggagugggaccucuucgucgagcgcuccaaggccuacuccaacugcuaccccuacgacguccccgacuacgccucccuccgcucccucgucgccuccuccggcacccucgaguucaacaacgaguccuucaacuggaccggcgucgcccagaacggcaccuccuccgccugcaagcgccgcuccaacaaguccuucuucucccgccucaacuggcuccaccagcucaaguacaaguaccccgcccucaacgucaccaugcccaacaacgagaaguucgacaagcucuacaucuggggcguccaccaccccuccaccgacuccgaccagaucucccucuacgcccaggcccccggccgcgucaccgucuccaccaagcgcucccagcagaccgucauccccaacaucggcucccgccccuggguccgcggcgucuccucccgcaucuccaucuacuggaccaucgucaagcccggcgacauccuccucaucaacugcaccggcaaccucaucgccccccgcggcuacuucaagaugcgcuccggcaaguccuccaucaugcgcuccgacgccuccaucggcaagugcaacuccgagugcaucacccccaacggcuccauccccaacgacaagcccuuccagaacgucaaccgcaucaccuacggcgccugcccccgcuacgucaagcagaacacccucaagcucgccaccggcaugcgcaacguccccgagaagcagacccgcggcaucuucggcgccaucgccggcuucaucgagaacggcugggagggcauggucgacggcugguacggcuuccgccaccagaacuccgagggcaccggccaggccgccgaccucaaguccacccaggccgccaucaaccagaucaacggcaagcucaaccgccucaucgagaagaccaacgagaaguuccaccagaucgagaaggaguucuccgaggucgagggccgcauccaggaccucgagaaguacgucgaggacaccaagaucgaccucugguccuacaacgccgagcuccucgucgcccucgagaaccagcacaccaucgaccucaccgacuccgagaugaacaagcucuucgagcgcaccaagaagcagcuccgcgagaacgccgaggacaugggcaacggcugcuucaagaucuaccacaagugcgacaacgccugcaucggcuccauccgcaacggcaccuacgaccacggcgucuaccgcgacgaggcccucaacaaccgcuuccagaucaagggcgucgagcucaaguccggcuacaaggacuggauccucuggaucuccuucgccaucuccugcuuccuccucugcgucguccuccucggcuucaucaugugggccugccagaagggcaacauccgcugcaacaucugcaucuga

SEQ ID NO: 97384 - RNA, 1689 nt, Artificial Sequence
  derived and/or modified CDS sequence (opt2) from hemagglutinin__InfluenzaA__ABI94581
augaacacccagauccucgucuucgcccucgucgccuccauccccaccaacgccgacaagaucugccucggccaccacgccgucuccaacggcaccaaggucaacacccucaccgagcgcggcgucgaggucgucaacgccaccgagaccgucgagcgcaccaacgucccccgcaucugcuccaagggcaagcgcaccgucgaccucggccagugcggccuccucggcaccaucaccggccccccccagugcgaccaguuccucgaguucuccgccgaccucaucaucgagcgccgcgagggcuccgacgucugcuaccccggcaaguucgucaacgaggaggcccuccgccagauccuccgcgaguccggcggcaucgacaaggagaccaugggcuucaccuacuccggcauccgcaccaacggcaccaccuccgccugccgccgcuccggcuccuccuucuacgccgagaugaaguggcuccucuccaacaccgacaacgccgccuucccccagaugaccaaguccuacaagaacacccgcaaggaccccgcccucaucaucuggggcauccaccacuccggcuccaccaccgagcagaccaagcucuacggcuccggcaacaagcucaucaccgucggcuccuccaacuaccagcaguccuucguccccucccccggcgcccgcccccaggucaacggccaguccggccgcaucgacuuccacuggcucauccucaaccccaacgacaccgucaccuucuccuucaacggcgccuucaucgcccccgaccgcgccuccuuccuccgcggcaaguccaugggcauccaguccgagguccaggucgacgccaacugcgagggcgacugcuaccacuccggcggcaccaucaucuccaaccuccccuuccagaacaucaacucccgcgccgucggcaagugcccccgcuacgucaagcaggagucccuccuccucgccaccggcaugaagaacguccccgagauccccaagcgccgccgccgcggccucuucggcgccaucgccggcuucaucgagaacggcugggagggccucaucgacggcugguacggcuuccgccaccagaacgcccagggcgagggcaccgccgccgacuacaaguccacccaguccgccaucgaccagaucaccggcaagcucaaccgccucaucgagaagaccaaccagcaguucgagcucaucgacaacgaguucaccgaggucgagaagcagaucggcaacgucaucaacuggacccgcgacuccaugaccgaggucugguccuacaacgccgagcuccucgucgccauggagaaccagcacaccaucgaccucgccgacuccgagaugaacaagcucuacgagcgcgucaagcgccagcuccgcgagaacgccgaggaggacggcaccggcugcuucgagaucuuccacaagugcgacgacgacugcauggccuccauccgcaacaacaccuacgaccacuccaaguaccgcgaggaggccauccagaaccgcauccagaucgaccccgucaagcucuccuccggcuacaaggacgucauccucugguucuccuucggcgccuccugcuucauccuccucgccaucgccaugggccucgucuucaucugcgucaagaacggcaacaugcgcugcaccaucugcaucuga

SEQ ID NO: 97385 - RNA, 1701 nt, Artificial Sequence; identical to SEQ ID NO: 96802
  derived and/or modified CDS sequence (opt2) from hemagglutinin__InfluenzaA__ABI95228

SEQ ID NO: 97386 - RNA, 1701 nt, Artificial Sequence
  derived and/or modified CDS sequence (opt2) from hemagglutinin__InfluenzaA__ABI95239
augaagaccaucaucgcccucuccuacauccucugccucgucuucgcccagaagcuccccggcaacgacaacuccaccgccacccucugccucggccaccacgccguccccaacggcaccaucgucaagaccaucaccaacgaccagaucgaggucaccaacgccaccgagcucguccaguccuccuccaccggcggcaucugcgacuccccccaccagauccucgacggcgagaacugcacccucaucgacgcccuccucggcgacccccagugcgacggcuuccagaacaagaagugggaccucuucgucgagcgcuccaaggccuacuccaacugcuaccccuacgacguccccgacuacgccucccuccgcucccucgucgccuccuccggcacccucgaguucaacaacgaguccuucaacuggaccggcgucacccagaacggcaccuccuccgccugcaagcgccgcuccaacaacuccuucuucucccgccucaacuggcucacccaccucaaguucaaguaccccgcccucaacgucaccaugcccaacaacgagaaguucgacaagcucuacaucuggggcguccaccaccccggcaccgacaacgaccagaucucccucuacgcccaggccuccggccgcaucaccgucuccaccaagcgcucccagcagaccgucauccccaacaucggcucccgcccccgcguccgcgacauccccucccgcaucuccaucuacuggaccaucgucaagcccggcgacauccuccucaucaacuccaccggcaaccucaucgccccccgcggcuacuucaagauccgcuccggcaaguccuccaucaugcgcuccgacgcccccaucggcaagugcaacuccgagugcaucacccccaacggcuccauccccaacgacaagcccuuccagaacgucaaccgcaucaccuacggcgccugcccccgcuacgucaagcagaacacccucaagcucgccaccggcaugcgcaacguccccgagaagcagacccgcggcaucuucggcgccaucgccggcuucaucgagaacggcugggagggcauggucaacggcugguacggcuuccgccaccagaacuccgagggcaucggccaggccgccgaccucaaguccacccaggccgccaucaaccagaucaacggcaagcucaaccgccucaucggcaagaccaacgagaaguuccaccagaucgagaaggaguucuccgaggucgagggccgcauccaggaccucgagaaguacgucgaggacaccaagaucgaccucugguccuacaacgccgagcuccucgucgcccucgagaaccagcacaccaucgaccucaccgacuccgagaugaacaagcucuucgagcgcaccaagaagcagcuccgcgagaacgccgaggacaugggcaacggcugcuucaagaucuaccacaagugcgacaacgccugcaucggcuccauccgcaacggcaccuacgaccacgacgucuaccgcgacgaggcccucaacaaccgcuuccagaucaagggcgucgagcucaaguccggcuacaaggacuggauccucuggaucuccuucgccaucuccugcuuccuccucugcgucgcccuccucggcuucaucaugugggccugccagaagggcaacauccgcugcaacaucugcaucuga

SEQ ID NO: 97387 - RNA, 1698 nt, Artificial Sequence
  derived and/or modified CDS sequence (opt2) from hemagglutinin__InfluenzaA__ABI95250
augaaggccaagcuccucguccuccucugcaccuucaccgccaccuacgccgacaccaucugcgucggcuaccacgccaacaacuccaccgacaccgucgacaccguccucgagaagaacgucaccgucacccacuccgucaaccuccucgaggacucccacaacggcaagcucugccuccucaagggcaucgccccccuccagcucggcaacugcuccgucgccggcuggauccucggcaaccccgagugcgagucccucaucuccaaggaguccugguccuacaucgucgagacccccaaccccgagaacggcaccugcuaccccggcuacuucgccgacuacgaggagcuccgcgagcagcucuccuccgucuccuccuucgagcgcuucgagaucuuccccaaggaguccuccuggcccaaccacaccgucaccggcgucuccgccuccugcucccacaacggcaaguccuccuucuaccgcaaccuccucuggcucaccgagaagaacggccucuaccccaaccucuccaaguccuacgucaacaacaaggagaaggagguccucguccucuggggcguccaccaccccuccaacaucggcgaccagcgcgccaucuaccacaccgagaacgccuacgucuccgucgucuccucccacuacucccgccgcuucacccccgagaucgccaagcgccccaagguccgcggccaggagggccgcaucaacuacuacuggacccuccucgagcccggcgacaccaucaucuucgaggccaacggcaaccucaucgcccccugguacgccuucgcccucucccgcggcuucggcuccggcaucaucaccuccaacgcccccaugaacgagugcgacgccaagugccagaccccccagggcgccaucaacuccucccuccccuuccagaacguccaccccgucaccaucggcgagugccccaaguacguccgcuccgccaagcuccgcauggucaccggccuccgcaacauccccuccauccagucccgcggccucuucggcgccaucgccggcuucaucgagggcggcuggaccggcaugaucgacggcugguacggcuaccaccaccagaacgagcagggcuccggcuacgccgccgaccagaaguccacccagaacgccaucaacggcaucaccaacaaggucaacuccgucaucgagaagaugaacacccaguucaccgccgucggcaaggaguucaacaagcucgagcgccgcauggagaaccucaacaagaaggucgacgacggcuuccucgacaucuggaccuacaacgccgagcuccucguccuccucgagaacgagcgcacccucgacuuccacgacuccaacgucaagaaccucuacgagaaggucaagucccagcucaagaacaacgccaaggagaucggcaacggcugcuucgaguucuaccacaagugcaacaacgagugcauggaguccgucaagaacggcaccuacgacuaccccaaguacuccgaggaguccaagcucaaccgcgagaagaucgacggcgucaagcucgaguccaugggcgucuaccagauccucgccaucuacuccaccgucgccuccucccucguccuccucgucucccucggcgccaucuccuucuggaugugcuccaacggcucccuccagugccgcaucugcaucuga

SEQ ID NO: 97388 - RNA, 1698 nt, Artificial Sequence
  derived and/or modified CDS sequence (opt2) from hemagglutinin__InfluenzaA__ABI95261
augaaggccaagcuccucguccuccucugcaccuucaccgccaccuacgccgacaccaucugcaucggcuaccacgccaacaacuccaccgacaccgucgacaccguccucgagaagaacgucaccgucacccacuccgucaaccuccucgaggacucccacaacggcaagcucugccuccucaagggcaucgccccccuccagcucggcaacugcuccgucgccggcuggauccucggcaaccccgagugcgagucccucaucuccaaggaguccugguccuacaucgucgagacccccaaccccgagaacggcaccugcuaccccggcuacuucgccgacuacgaggagcuccgcgagcagcucuccuccgucuccuccuucgagcgcuucgagaucuuccccaaggaguccuccuggcccaaccacaccgucaccggcgucuccgccuccugcucccacaacggcaaguccuccuucuaccgcaaccuccucuggcucaccgagaagaacggccucuaccccaaccucuccaaguccuacgucaacaacaaggagaaggagguccucguccucuggggcguccaccaccccuccaacaucggcguccagcgcgccaucuaccacaccgagaacgccuacgucuccgucgucuccucccacuacucccgccgcuucacccccgagaucgccaagcgccccaagguccgcgaccaggagggccgcaucaacuacuacuggacccuccucgagcccggcgacaccaucaucuucgaggccaacggcaaccucaucgcccccugguacgccuucgcccucucccgcggcuucgaguccggcaucaucaccuccaacgcccccaugaacgagugcgacgccaagugccagaccccccagggcgccaucaacuccucccuccccuuccagaacguccaccccgucaccaucggcgagugccccaaguacguccgcuccgccaagcuccgcauggucaccggccuccgcaacauccccuccauccagucccgcggccucuucggcgccaucgccggcuucaucgagggcggcuggaccggcaugaucgacggcugguacggcuaccaccaccagaacgagcagggcuccggcuacgccgccgaccagaaguccacccagaacgccaucaacggcaucaccaacaaggucaacuccgucaucgagaagaugaacacccaguucaccgccgucggcaaggaguucaacaagcucgagcgccgcauggagaaccucaacaagaaggucgacgacggcuuccucgacaucuggaccuacaacgccgagcuccucguccuccucgagaacgagcgcacccucgacuuccacgacuccaacgucaagaaccucuacgagaaggucaagucccagcucaagaacaacgccaaggagaucggcaacggcugcuucgaguucuaccacaagugcaacaacgagugcauggaguccgucaagaacggcaccuacgacuaccccaaguacuccgaggaguccaagcucaaccgcgagaagaucgacggcgucaagcucgaguccaugggcgucuaccagauccucgccaucuacuccaccgucgccuccucccucguccuccucgucucccucggcgccaucuccuucuggaugugcuccaacggcucccuccagugccgcaucugcaucuga

SEQ ID NO: 97389 - RNA, 1698 nt, Artificial Sequence; identical to SEQ ID NO: 97268
  derived and/or modified CDS sequence (opt2) from hemagglutinin__InfluenzaA__ABI95272

SEQ ID NO: 97390 - RNA, 1698 nt, Artificial Sequence; identical to SEQ ID NO: 97268
  derived and/or modified CDS sequence (opt2) from hemagglutinin__InfluenzaA__ABI95283

SEQ ID NO: 97391 - RNA, 1698 nt, Artificial Sequence; identical to SEQ ID NO: 96332
  derived and/or modified CDS sequence (opt2) from hemagglutinin__InfluenzaA__ABI95294

SEQ ID NO: 97392 - RNA, 1698 nt, Artificial Sequence
  derived and/or modified CDS sequence (opt2) from hemagglutinin__InfluenzaA__ABI96104
augaaggucaagcuccucauccuccucugcaccuucaccgccaccuacgccgacaccaucugcaucggcuaccacgccaacaacuccaccgacaccgucgacaccguccucgagaagaacgucaccgucacccacuccgucaaccuccucgaggacucccacaacggcaagcucugccuccucaagggcaucgccccccuccagcucggcaacugcuccgucgccggcuggauccucggcaaccccgagugcgagcuccucaucuccaaggaguccugguccuacaucgucgagacccccaaccccgagaacggcgccugcuaccccggcuacuucgccgacuacgaggagcuccgcgagcagcucuccuccgucuccuccuucgagcgcuucgagaucuuccccaaggaguccuccuggcccaaccacaccgucaccggcgucuccgccuccugcucccacaacggcaaguccuccuucuaccgcaaccuccucuggcucaccggcaagaacggccucuaccccaaccucaucaaguccuacgccaacaacaaggagaaggagguccucauccucuggggcguccaccacccccccaacaucggcgaccagcgcacccucuaccacaccgagaacgccuacgucuccgucgucuccucccacuacucccgccgcuucacccccgagaucaccaagcgccccaagguccgcgaccaggagggccgcaucaacuacuacuggacccuccucgagcccggcgacaccaucaucuucgaggccaacggcaaccucaucgcccccugguacgccuucgcccucucccgcggcuucggcuccggcaucaucaccuccaacgcccccauggacgagugcgacgccaagugccagaccccccagggcgccaucaacuccucccuccccuuccagaacguccaccccgucaccaucggcgagugccccaaguacguccgcuccgccaagcuccgcauggucaccggccuccgcaacauccccuccauccagucccgcggccucuucggcgccaucgccggcuucaucgagggcggcuggaccggcauggucgacggcugguacggcuaccaccaccagaacgagcagggcuccggcuacgccgccgaccagaaguccacccagaacgccaucaacggcaucaccaacaaggucaacuccgucaucgagaagaugaacacccaguucaccgccgucggcaaggaguucaacaagcucgagcgccgcauggagaaccucaacaagaaggucgacgacggcuuccucgacaucuggaccuacaacgccgagcuccucguccuccucgagaacgagcgcacccucgacuuccacgacuccaacgucaagaaccucuacgagaaggucaagucccagcucaagaacaacgccaaggagaucggcaacggcugcuucgaguucuaccacaagugcaacaacgagugcauggaguccgucaagaacggcaccuacgacuaccccaaguacuccgaggaguccaagcucaaccgcgagaagaucgacggcgucaagcucgacuccaugggcgucuaccagauccucgccaucuacuccaccgucgccuccucccucguccuccucgucucccucggcgccaucuccuucuggaugugcuccaacggcucccuccagugccgcaucugcaucuga

SEQ ID NO: 97393 - RNA, 1701 nt, Artificial Sequence; identical to SEQ ID NO: 96686
  derived and/or modified CDS sequence (opt2) from hemagglutinin__InfluenzaA__ABJ09107

SEQ ID NO: 97394 - RNA, 1701 nt, Artificial Sequence
  derived and/or modified CDS sequence (opt2) from hemagglutinin__InfluenzaA__ABJ09140
augaagaccaucaucgcccucuccuacauccucugccucgucuucgcccagaagcuccccggcaacgacaacuccaccgccacccucugccucggccaccacgccguccccaacggcacccucgucaagaccaucaccaacgaccagaucgaggucaccaacgccaccgagcucguccaguccuccuccaccggccgcaucugcgacuccccccaccgcauccucgacggcaagaacugcacccucaucgacgcccuccucggcgacccccacugcgacggcuuccagaacaaggagugggaccucuucgucgagcgcuccaaggccuacuccaacugcuaccccuacgacguccccgacuacgccucccuccgcucccucgucgccuccuccggcacccucgaguucaucaacgaggacuucaacuggaccggcgucgcccaggacggcaaguccuacuccugcaagcgcggcuccgucaacuccuucuucucccgccucaacuggcuccacaagcucgaguacaaguaccccgcccucaacgucaccaugcccaacaacggcaaguucgacaagcucuacaucuggggcguccaccaccccuccaccgacuccgaccagaccucccucuacguccgcgccuccggccgcgucaccgucuccaccaagcgcucccagcagaccgucauccccaacaucggcuuccgccccuggguccgcggccucuccucccgcaucuccaucuacuggaccaucgucaagcccggcgacauccuccucaucaacuccaccggcaaccucaucgccccccgcggcuacuucaagauccgcaacggcaaguccuccaucaugcgcuccgacgcccccaucggcaacugcuccuccgagugcaucacccccaacggcuccauccccaacgacaagcccuuccagaacgucaaccgcaucaccuacggcgccugcccccgcuacgucaagcagaacacccucaagcucgccaccggcaugcgcaacguccccgagaagcagacccgcggcaucuucggcgccaucgccggcuucaucgagaacggcugggagggcauggucgacggcugguacggcuuccgccaccagaacuccgagggcaccggccaggccgccgaccucaaguccacccaggccgccaucgaccagaucaacggcaagcucaaccgccucaucgagaagaccaacgagaaguuccaccagaucgagaaggaguucuccgaggucgagggccgcauccaggaccucgagaaguacgucgaggacaccaagaucgaccucugguccuacaacgccggccuccucgucgcccucgagaaccagcacaccaucgaccucaccgacuccgagaugaacaagcucuucgagcgcacccgcaagcagcuccgcgagaacgccgaggacaugggcaacggcugcuucaagaucuaccacaagugcgacaacgccugcaucggcuccauccgcaacggcaccuacgaccacgacgucuaccgcgacgaggcccucaacaaccgcuuccagaucaagggcgucgagcucaaguccggcuacaaggacuggauccucuggaucuccuucgccaucuccugcuuccuccucugcgucguccuccucggcuucaucaugugggccugccagaagggcaacauccgcugcaacaucugcaucuga

SEQ ID NO: 97395 - RNA, 1698 nt, Artificial Sequence
  derived and/or modified CDS sequence (opt2) from hemagglutinin__InfluenzaA__ABJ09151
augaaggccaagcuccucguccuccucugcaccuucaccgccaccuacgccgacaccaucugcaucggcuaccacgccaacaacuccaccgacaccgucgacaccguccucgagaagaacgucaccgucacccacuccgucaaccuccucgaggacucccacaacggcaagcucugccuccucaagggcaucgccccccuccagcucggcaacugcuccgucgccggcuggauccucggcaaccccgagugcgagcuccucaucuccaaggaguccugguccuacaucgucgagacccccaaccccgagaacggcaccugcuaccccggcuacuucgccgacuacgaggagcuccgcgagcagcucuccuccgucuccuccuucgagcgcuucgagaucuuccccaagggcuccuccuggcccaaccacaccgucaccggcgucuccgccuccugcucccacaacggcaaguccuccuucuaccgcaaccuccucuggcucaccggcaagaacggccucuaccccaaccucuccauguccuacgucaacaacaagggcaaggagguccucguccucuggggcguccaccacccccccaacaucggcgaccagcgcgcccucuaccacaccgagaacgccuacgucuccgucgucuccucccacuacucccgccgcuucacccccgagaucgccaagcgccccaagguccgcgaccaggagggccgcaucaacuacuacuggacccuccucgagcccggcgacaccaucaucuucgaggccaacggcaaccucaucgcccccugguacgccuucgcccucucccgcggcuucggcuccggcaucaucaccuccaacgcccccaugggcgagugcgacgccaagugccagaccccccagggcgccaucaacuccucccuccccuuccagaacguccaccccgucaccaucggcgagugccccaaguacguccgcuccgccaagcuccgcauggucaccggccuccgcaacauccccuccauccagucccgcggccucuucggcgccaucgccggcuucaucgagggcggcuggaccggcauggucgacggcugguacggcuaccaccaccagaacgagcagggcuccggcuacgccgccgaccagaaguccacccagaacgccaucaacggcaucaccaacaaggucaacuccgucaucgagaagaugaacacccaguucaccgccgucggcaaggaguucaacaagcucgagcgccgcauggagaaccucaacaagaaggucgacgacggcuuccucgacaucuggaccuacaacgccgagcuccucguccuccucgagaacgagcgcacccucgacuuccacgacuccaacgucaagaaccucuacgagaaggucaagucccagcucaagaacaacgccaaggagaucggcaacggcugcuucgaguucuaccacaagugcaacaacgagugcauggaguccgucaagaacggcaccuacgacuaccccaaguacuccaaggaguccaagcucaaccgcgagaagaucgacggcgucaagcucgaguccaugggcgucuaccagauccucgccaucuacuccaccgucgccuccucccucguccuccucgucucccucggcgccaucuccuucuggaugugcuccaacggcucccuccagugccgcaucugcaucuga

SEQ ID NO: 97396 - RNA, 1701 nt, Artificial Sequence
  derived and/or modified CDS sequence (opt2) from hemagglutinin__InfluenzaA__ABJ09162
augaagaccaucaucgcccucuccuacauccucugccucgucuucgcccagaagcuccccggcaacgacaacuccaccgccacccucugccucggccaccacgccguccccaacggcaccaucgucaagaccaucaccaacgaccagaucgaggucaccaacgccaccgagcucguccaguccuccuccaccggcggcaucugcgacuccccccaccagauccucgacggcgagaacugcacccucaucgacgcccuccucggcgacccccagugcgacggcuuccagaacaagaagugggaccucuucgucgagcgcuccaaggccuacuccaacugcuaccccuacgacguccccgacuacgccucccuccgcucccucgucgccuccuccggcacccucgaguucaacaacgaguccuucaacuggaccggcgucacccagaacggcaccuccuccgccugcaagcgccgcuccaacaacuccuucuucucccgccucaacuggcucacccaccucaaguucaaguaccccgcccucaacgucaccaugcccaacaacgagaaguucgacaagcucuacaucuggggcguccaccaccccggcaccaacaacgaccagaucucccucuacgcccaggccuccggccgcaucaccgucuccaccaagcgcucccagcagaccgucauccccaacaucggcucccgcccccgcguccgcgacauccccucccgcaucuccaucuacuggaccaucgucaagcccggcgacauccuccucaucaacuccaccggcaaccucaucgccccccgcggcuacuucaagauccgcuccggcaaguccuccaucaugcgcuccgacgcccccaucggcaagugcaacuccgagugcaucacccccaacggcuccauccccaacgacaagcccuuccagaacgucaaccgcaucaccuacggcgccugcccccgcuacgucaagcagaacacccucaagcucgccaccggcaugcgcaacguccccgagaagcagacccgcggcaucuucggcgccaucgccggcuucaucgagaacggcugggagggcauggucgacggcugguacggcuuccgccaccagaacuccgagggcaucggccaggccgccgaccucaaguccacccaggccgccaucaaccagaucaacggcaagcucaaccgccucaucggcaagaccaacgagaaguuccaccagaucgagaaggaguucuccgaggucgagggccgcauccaggaccucgagaaguacgucgaggacaccaagaucgaccucugguccuacaacgccgagauccucgucgcccucgagaaccagcacaccaucgaccucaccgacuccgagaugaacaagcucuucgagcgcaccaagaagcagcuccgcgagaacgccgaggacaugggcaacggcugcuucaagaucuaccacaagugcgacaacgccugcaucggcuccauccgcaacggcaccuacgaccacgacgucuaccgcgacgaggcccucaacaaccgcuuccagaucaagggcgucgagcucaaguccggcuacaaggacuggauccucuggaucuccuucgccaucuccugcuuccuccucugcgucgcccuccucggcuucaucaugugggccugccagaagggcaacauccgcugcaacaucugcaucuga

SEQ ID NO: 97397 - RNA, 1701 nt, Artificial Sequence; identical to SEQ ID NO: 96279
  derived and/or modified CDS sequence (opt2) from hemagglutinin__InfluenzaA__ABJ09173

SEQ ID NO: 97398 - RNA, 1698 nt, Artificial Sequence
  derived and/or modified CDS sequence (opt2) from hemagglutinin__InfluenzaA__ABJ09184
augaaggucaagcuccucguccuccucugcaccuucaccgccaccuacgccgacaccaucugcaucggcuaccacgccaacaacuccaccgacaccgucgacaccguccucgagaagaacgucaccgucacccacuccgucaaccuccucgaggacucccacaacggcaagcucugccuccucaagggcaucgccccccuccagcucggcaacugcuccgucgccggcuggauccucggcaaccccgagugcgagcuccucaucuccaaggaguccugguccuacaucgucgagacccccaaccccgagaacggcaccugcuaccccggcuacuucgccgacuacgaggagcuccgcgagcagcucuccuccgucuccuccuucgagcgcuucgagaucuuccccaaggaguccuccuggcccaaccacaccgucaccggcgucuccgccuccugcucccacaacggcaaguccuccuucuaccgcaaccuccucuggcucaccggcaagaacggccucuaccccaaccucuccaaguccuacgccaacaacaaggagaaggagguccucguccucuggggcguccaccacccccccaacaucggcgaccagcgcgcccucuaccacaccgagaacgccuacgucuccgucgucuccucccacuacucccgccgcuucacccccgagaucgccaagcgccccaagguccgcgaccaggagggccgcaucaacuacuacuggacccuccucgaggccggcgacaccaucaucuucgaggccaacggcaaccucaucgccccccgcuucgccuucgcccucucccgcggcuucggcuccggcaucaucaccuccaacgcccccauggacgagugcgacgccaagugccagaccccccagggcgccaucaacuccucccuccccuuccagaacguccaccccgucaccaucggcgagugccccaaguacguccgcuccgccaagcuccgcauggccaccggccuccgcaacauccccuccauccagucccgcggccucuucggcgccaucgccggcuucaucgagggcggcuggaccggcauggucgacggcugguacggcuaccaccaccagaacgagcagggcuccggcuacgccgccgaccagaaguccacccagaacgccaucaacggcaucaccaacaaggucaacuccgucaucgagaagaugaacacccaguucaccgccgucggcaaggaguucuccaagcucgagcgccgcauggagaaccucaacaagaaggucgacgacggcuuccucgacaucuggaccuacaacgccgagcuccucguccuccucgagaacgagcgcacccucgacuuccacgacuccaacgucaagaaccucuacgagaaggucaagucccagcucaagaacaacgccaaggagaucggcaacggcugcuucgaguucuaccacaagugcaacgacgagugcauggaguccgucaagaacggcaccuacgacuaccccaaguacuccgaggaguccaagcucaaccgcgagaagaucgacggcgucaagcucgaguccaugggcgucuaccagauccucgccaucuacuccaccgucgccuccucccucguccuccucgucucccucggcgccaucuccuucuggaugugcuccaacggcucccuccagugccgcaucugcaucuga

SEQ ID NO: 97399 - RNA, 1701 nt, Artificial Sequence; identical to SEQ ID NO: 96669
  derived and/or modified CDS sequence (opt2) from hemagglutinin__InfluenzaA__ABJ09195

SEQ ID NO: 97400 - RNA, 1701 nt, Artificial Sequence; identical to SEQ ID NO: 96669
  derived and/or modified CDS sequence (opt2) from hemagglutinin__InfluenzaA__ABJ09206

SEQ ID NO: 97401 - RNA, 1701 nt, Artificial Sequence; identical to SEQ ID NO: 97249
  derived and/or modified CDS sequence (opt2) from hemagglutinin__InfluenzaA__ABJ09217

SEQ ID NO: 97402 - RNA, 1701 nt, Artificial Sequence; identical to SEQ ID NO: 96686
  derived and/or modified CDS sequence (opt2) from hemagglutinin__InfluenzaA__ABJ09228

SEQ ID NO: 97403 - RNA, 1701 nt, Artificial Sequence
  derived and/or modified CDS sequence (opt2) from hemagglutinin__InfluenzaA__ABJ09239
augaagaccaucaucgcccucuccuacauccucugccucgucuucgcccagaagcuccccggcaacgacaacuccaccgccacccucugccucggccaccacgccguccccaacggcacccucgucaagaccaucaccaacgaccagaucgaggucaccaacgccaccgagcucguccaguccuccuccaccggcggcaucugcgacuccccccaccagauccucgacggcgagaacugcacccucaucgacgcccuccucggcgacccccacugcgacggcuuccagaacaaggagugggaccucuucgucgagcgcuccaaggccuacuccaacugcuaccccuacgacguccccgacuacgccucccuccgcucccucgucgccuccuccggcaccauggaguucaacaacgaguccuucaacuggaccggcgucgcccagaacggcaccuccuccgccugcaagcgccgcuccaacaaguccuucuucucccgccucaacuggcuccaccagcucaaguacaaguaccccgcccucaacgucaccaugcccaacaacgagaaguucgacaagcucuacaucuggggcguccaccaccccuccaccgacuccgaccagaucucccucuacgcccaggcccccggccgcgucaccgucuccaccaagcgcucccagcagaccgucauccccaacaucggcucccgccccuggguccgcggcgucuccucccgcaucuccaucuacuggaccaucgucaagcccggcgacauccuccucaucaacugcaccggcaaccucaucgccccccgcggcuacuucaagauccgcuccggcaaguccuccaucaugcgcuccgacgccuccaucggcaagugcaacuccgagugcaucacccccaacggcuccauccccaacgacaagcccuuccagaacgucaaccgcaucaccuacggcgccugcccccgcuacgucaagcagaacacccucaagcucgccaccggcaugcgcaacguccccgagaagcagacccgcggcaucuucggcgccaucgccggcuucaucgagaacggcugggagggcauggucgacggcugguacggcuuccgccaccagaacuccgagggcaccggccaggccgccgaccucaaguccacccaggccgccaucaaccagaucaacggcaagcucaaccgccucaucgagaagaccaacgagaaguuccaccagaucgagaaggaguucuccgaggucgagggccgcauccaggaccucgagaaguacgucgaggacaccaagaucgaccucugguccuacaacgccgagcuccucgucgcccucgagaaccagcacaccaucgaccucaccgacuccgagaugaacaagcucuucgagcgcaccaagaagcagcuccgcgagaacgccgaggacaugggcaacggcugcuucaagaucuaccacaagugcgacaacgccugcaucggcuccauccgcaacggcaccuacgaccacgacgucuaccgcgacgaggcccucaacaaccgcuuccagaucaagggcgucgagcucaaguccggcuacaaggacuggauccucuggaucuccuucgccaucuccugcuuccuccucugcgucguccuccucggcuucaucaugugggccugccagaagggcaacauccgcugcaacaucugcaucuga

SEQ ID NO: 97404 - RNA, 1701 nt, Artificial Sequence
  derived and/or modified CDS sequence (opt2) from hemagglutinin__InfluenzaA__ABJ09250
augaagaccaucaucgcccucuccuacauccucugccucgucuucgcccagaagcuccccggcaacgacaacuccaccgccacccucugccucggccaccacgccguccccaacggcacccucgucaagaccaucaccaacgaccagaucgaggucaccaacgccaccgagcucguccaguccuccuccaccggccgcaucugcgacuccccccaccagauccucgacggcgagaacugcacccucaucgacgcccuccucggcgacccccacugcgacggcuuccagaacaaggagugggaccucuucgucgagcgcuccaaggccuacuccaacugcuaccccuacgacguccccgacuacgccucccuccgcucccucgucgccuccuccggcacccucgaguucaacaacgaguccuucaacuggaccggcgucgcccagaacggcaccuccuccgccugcaagcgccgcuccaacaaguccuucuucucccgccucaacuggcuccaccagcucaaguacaaguaccccgcccucaacgucaccaugcccaacaacgagaaguucgacaagcucuacaucuggggcauccaccaccccuccaccgacuccgaccagaucucccucuacgcccaggccuccggccgcgucaccgucuccaccaagcgcucccagcagaccgucauccccaacaucggcucccgccccuggguccgcggcgucuccucccgcaucuccaucuacuggaccaucgucaagcccggcgacauccuccucaucaacuccaccggcaaccucaucgccccccgcggcuacuucaagauccgcuccggcaaguccuccaucaugcgcuccgacgcccccaucggcaagugcaacuccgagugcaucacccccaacggcuccauccccaacgacaagcccuuccagaacgucaaccgcaucaccuacggcgccugcccccgcuacgucaagcagaacacccucaagcucgccaccggcaugcgcaacguccccgagaagcagacccgcggcaucuucggcgccaucgccggcuucaucgagaacggcugggagggcauggucgacggcugguacggcuuccgccaccagaacuccgagggcaccggccaggccgccgaccucaaguccacccaggccgccaucaaccagaucaacggcaagcucaaccgccucaucgagaagaccaacgagaaguuccaccagaucgagaaggaguucuccgaggucgagggccgcauccaggaccucgagaaguacgucgaggacaccaagaucgaccucugguccuacaacgccgagcuccucgucgcccucgagaaccagcacaccaucgaccucaccgacuccgagaugaacaagcucuucgagcgcaccaagaagcagcuccgcgagaacgccgaggacaugggcaacggcugcuucaagaucuaccacaagugcgacaacgccugcaucggcuccauccgcaacgagaccuacgaccacgacgucuaccgcgacgaggcccucaacaaccgcuuccagaucaagggcgucgagcucaaguccggcuacaaggacuggauccucuggaucuccuucgccaucuccugcuuccuccucugcgucguccuccucggcuucaucaugugggccugccagaagggcaacauccgcugcaacaucugcaucuga

SEQ ID NO: 97405 - RNA, 1701 nt, Artificial Sequence
  derived and/or modified CDS sequence (opt2) from hemagglutinin__InfluenzaA__ABJ09261
augaagaccaucaucgcccucuccuacauccucugccucgucuucgcccagaagcuccccggcaacgacaacuccaccgccacccucugccucggccaccacgccguccccaacggcacccucgucaagaccaucaccaacgaccagaucgaggucaccaacgccaccgagcucguccaguccuccuccaccggcaagaucugcgacuccccccaccagauccucgacggcgagaacugcacccucaucgacgcccuccucggcgacccccacugcgacggcuuccagaacaaggagugggaccucuucgucgagcgcuccaaggccuacuccaacugcuaccccuacgacguccccgacuacgccucccuccgcucccucgucgccuccuccggcacccucgaguucaacaacgaguccuucaacuggaccggcgucgcccagaacggcaccuccuccgccugcaagcgccgcuccaucaaguccuucuucucccgccucaacuggcuccaccagcucaaguacaaguaccccgcccucaacgucaccaugcccaacaacgagaaguucgacaagcucuacaucuggggcguccaccaccccuccaccgacuccgaccagaccucccucuacgcccaggccuccggccgcgucaccgucuccaccaagcgcucccagcagaccgucauccccaacaucggcucccgccccuggguccgcggcgucuccucccgcaucuccaucuacuggaccaucgucaagcccggcgacauccuccucaucaacuccaccggcaaccucaucgccccccgcggcuacuucaagauccgcuccggcaaguccuccaucaugcgcuccgacgcccccaucggcaagugcaacuccgagugcaucacccccaacggcuccauccccaacgacaagcccuuccagaacgucaaccgcaucaccuacggcgccugcccccgcuacgucaagcagaacacccucaagcucgccaccggcaugcgcaacguccccgagaagcagacccgcggcaucuucggcgccaucgccggcuucaucgagaacggcugggagggcauggucgacggcugguacggcuuccgccaccagaacuccgagggcaccggccaggccgccgaccucaaguccacccaggccgccaucaaccagaucaacggcaagcucaaccgccucaucgagaagaccaacgagaaguaccaccagaucgagaaggaguucuccgaggucgagggccgcauccaggaccucgagaaguacgucgaggacaccaagaucgaccucugguccuacaacgccgagcuccucgucgcccucgagaaccagcacaccaucgaccucaccgacuccgagaugaacaagcucuucgagcgcacccgcaagcagcuccgcgagaacgccgaggacaugggcaacggcugcuucaagaucuaccacaagugcgacaacgccugcaucggcuccauccgcaacggcaccuacgaccacgacgucuaccgcgacgaggcccucaacaaccgcuuccagaucaagggcgucgagcucaaguccggcuacaaggacuggauccucuggaucuccuucgccaucuccugcuuccuccucugcgucguccuccucggcuucaucaugugggccugccagaagggcaacauccgcugcaacaucugcaucuga

SEQ ID NO: 97406 - RNA, 1701 nt, Artificial Sequence
  derived and/or modified CDS sequence (opt2) from hemagglutinin__InfluenzaA__ABJ09272
augaagaccaucaucgcccucuccuacauccucugccucgucuucgcccagaagcuccccggcaacgacaacuccaccgccacccucugccucggccaccacgccguccccaacggcacccucgucaagaccaucaccaacgaccagaucgaggucaccaacgccaccgagcucguccaguccuccuccaccggccgcaucugcaacuccccccaccagauccucgacggcgagaacugcacccucaucgacgcccuccucggcgacccccacugcgacggcuuccagaacaaggagugggaccucuucgucgagcgccgcaaggccuacuccaacugcuaccccuacgacguccccgacuacgccucccuccgcucccucgucgccuccuccggcacccucgaguucaacaacgaguccuucaacuggaccggcgucgcccagaacggcaccuccuccgccugcaagcgccgcuccaucaaguccuucuucucccgccucaacuggcuccaccagcucaaguacaaguaccccgcccucaacgucaccaugcccaacaacgagaaguucgacaagcucuacaucuggggcguccaccaccccuccaccgacuccgaccagaucucccucuacgcccaggccuccggccgcgucaccgucuccaccaagcgcucccagcagaccgucauccccaacaucggcucccgccccuggguccgcggcgucuccucccgcaucuccaucuacuggaccaucgucaagcccggcgacauccuccucaucaacuccaccggcaaccucaucgccccccgcggcuacuucaagauccgcuccggcaaguccuccaucaugcgcuccgacgcccccaucggcaagugcaacuccgagugcaucacccccaacggcuccauccccaacgacaagcccuuccagaacgucaaccgcaucaccuacggcgccugcccccgcuacgucaagcagaacacccucaagcucgccaccggcaugcgcaacguccccgagaagcagacccgcggcaucuucggcgccaucgccggcuucaucgagaacggcugggagggcauggucgacggcugguacggcuuccgccaccagaacuccgagggcaccggccaggccgccgaccucaaguccacccaggccgccaucaaccagaucaacggcaagcucaaccgccucaucgagaagaccaacgagaaguuccaccagaucgagaaggaguucuccgaggucgagggccgcauccaggaccucgagaaggacgucgaggacaccaagaucgaccucugguccuacaacgccgagcuccucgucgcccucgagaaccagcacaccaucgaccucaccgacuccgagaugaacaagcucuucgagcgcaccaagaagcagcuccgcgagaacgccgaggacaugggcaacggcugcuucaagaucuaccacaagugcgacaacgccugcaucggcuccauccgcaacggcaccuacgaccacgacgucuaccgcgacgaggcccucaacaaccgcuuccagaucaagggcgucgagcucaaguccggcuacaaggacuggauccucuggaucuccuucgccaucuccugcuuccuccucugcgucguccuccucggcuucaucaugugggccugccagaagggcaacauccgcugcaacaucugcaucuga

SEQ ID NO: 97407 - RNA, 1701 nt, Artificial Sequence; identical to SEQ ID NO: 96108
  derived and/or modified CDS sequence (opt2) from hemagglutinin__InfluenzaA__ABJ09294

SEQ ID NO: 97408 - RNA, 1701 nt, Artificial Sequence
  derived and/or modified CDS sequence (opt2) from hemagglutinin__InfluenzaA__ABJ09305
augaagaccaucaucgcccucuccuacauccucugccucgucuucgcccagaagcuccccggcaacgacaacuccaccgccacccucugccucggccaccacgccguccccaacggcacccucgucaagaccaucaccaacgaccagaucgaggucaccaacgccaccgagcucguccaguccuccuccaccggccgcaucugcgacuccccccaccagauccucgacggcgagaacugcacccucaucgacgcccuccucggcgacccccacugcgacggcuuccagaacaaggagugggaccucuucgucgagcgcuccaaggccuacuccaacugcuaccccuacgacguccccgacuacgccucccuccgcucccucgucgccuccuccggcacccucgaguucaacaacgaguccuucaacuggaccggcgucgcccagaacggcaccuccuccgccugcaagcgccgcuccaacaaguccuucuucucccgccucaacuggcuccaccagcucaaguacaaguaccccgcccucaacgucaccaugcccaacaacgagaaguucgacaagcucuacaucuggggcguccaccaccccuccaccgacuccgaccagaucucccucuacgcccaggccuccggccgcgucaccgucuccaccaagcgcucccagcagaccgucauccccaacaucggcucccgccccuggguccgcggcgucuccucccgcaucuccaucuacuggaccaucgucaagcccggcgacauccuccucaucaacuccaccggcaaccucaucgccccccgcggcuacuucaagauccgcuccggcaaguccuccaucaugcgcuccgacgcccccaucggcaagugcaacuccgagugcaucacccccaacggcuccauccccaacgacaagcccuuccagaacgucaaccgcaucaccuacggcgccugcccccgcuacgucaagcagaacacccucaagcucgccaccggcaugcgcaacguccccgagaagcagacccgcggcaucuucggcgccaucgccggcuucaucgagaacggcugggagggcauggucgacggcugguacggcuuccgccaccagaacuccgagggcaccggccaggccgccgaccucaaguccacccaggccgccaucaaccagaucaacggcaagcucaaccgccucaucgagaagaccaacgagaaguuccaccagaucgagaaggaguucuccgaggucgagggccgcauccaggaccucgagaaguacgucgaggacaccaagaucgaccucugguccuacaacgccgagcuccucgucgcccucgagaaccagcacaccaucgaccucaccgacuccgagaugaacaagcucuucgagcgcaccaagaagcagcuccgcgagaacgccgaggacaugggcaacggcugcuucaagaucuaccacaagugcgacaacgccugcaucggcuccauccgcaacgagaccuacgaccacgacgucuaccgcgacgaggcccucaacaaccgcuuccagaucaagggcgucgagcucaaguccggcuacaaggacuggauccucuggaucuccuucgccaucuccugcuuccuccucugcgucguccuccucggcuucaucaugugggccugccagaagggcaacauccgcugcaacaucugcaucuga

SEQ ID NO: 97409 - RNA, 1701 nt, Artificial Sequence
  derived and/or modified CDS sequence (opt2) from hemagglutinin__InfluenzaA__ABJ09316
augaagaccaucaucgcccucuccuacauccucugccucgucuucgcccagaagcuccccggcaacgacaacuccaccgccacccucugccucggccaccacgccguccccaacggcacccucgucaagaccaucaccaacgaccagaucgaggucaccaacgccaccgagcucguccaguccuccuccaccggccgcaucugcgacuccccccaccagauccucgacggcgagaacugcacccucaucgacgcccuccucggcgacccccacugcgacggcuuccagaacaaggagugggaccucuucgucgagcgcuccaaggccuacuccaacugcuaccccuacgacguccccgacuacgccucccuccgcucccucgucgccuccuccggcacccucgaguucaacaacgaguccuucaacuggaccggcgucgcccagaacggcaccuccuccgccugcaagcgccgcuccaacaaguccuucuucucccgccucaacuggcuccaccagcucaaguacaaguaccccgcccucaacgucaccaugcccaacaacgagaaguucgacaagcucuacaucuggggcguccaccaccccuccaccgacuccgaccagaucucccucuacgcccaggccuccggccgcgucaccgucuccaccaagcgcucccagcagaccgucauccccaacaucggcucccgccacuggguccgcggcgucuccucccgcaucuccaucuacuggaccaucgucaagcccggcgacauccuccucaucaacuccaccggcaaccucaucgccccccgcggcuacuucaagauccgcuccggcaaguccuccaucaugcgcuccgacgccuccaucggcaagugcaacuccgagugcaucacccccaacggcuccauccccaacgacaagcccuuccagaacgucaaccgcaucaccuacggcgccugcccccgcuacgucaagcagaacacccucaagcucgccaccggcaugcgcaacguccccgagaagcagacccgcggcaucuucggcgccaucgccggcuucaucgagaacggcugggagggcauggucgacggcugguacggcuuccgccaccagaacuccgagggcaccggccaggccgccgaccucaaguccacccaggccgccaucaaccagaucaacggcaagcucaaccgccucaucgagaagaccaacgagaaguuccaccagaucgagaaggaguucuccgaggucgagggccgcauccaggaccucgagaaguacgucgaggacaccaagaucgaccucugguccuacaacgccgagcuccucgucgcccucgagaaccagcacaccaucgaccucaccgacuccgagaugaacaagcucuucgagcgcaccaagaagcagcuccgcgagaacgccgaggacaugggcaacggcugcuucaagaucuaccacaagugcgacaacgccugcaucggcuccauccgcaacggcaccuacgaccacgacgucuaccgcgacgaggcccucaacaaccgcuuccagaucaagggcgucgagcucaaguccggcuacaaggacuggauccucuggaucuccuucgccaucuccugcuuccuccucugcgucguccuccucggcuucaucaugugggccugccagaagggcaacauccgcugcaacaucugcaucuga

SEQ ID NO: 97410 - RNA, 1701 nt, Artificial Sequence; identical to SEQ ID NO: 96686
  derived and/or modified CDS sequence (opt2) from hemagglutinin__InfluenzaA__ABJ09338

SEQ ID NO: 97411 - RNA, 1701 nt, Artificial Sequence
  derived and/or modified CDS sequence (opt2) from hemagglutinin__InfluenzaA__ABJ09349
augaagaccaucaucgcccucuccuacauccucugccucgucuucgcccagaagcuccccggcaacgacaacuccaccgccacccucugccucggccaccacgccguccccaacggcacccucgucaagaccaucaccaacgaccagaucgaggucaccaacgccaccgagcucauccaguccuccuccaccggcggcaucugcgacuccccccaccagauccucgacggcgagaacugcacccucaucgacgcccuccucggcgacccccacugcgacggcuuccagaacaaggagugggaccucuucgucgagcgcuccaaggccuacuccaacugcuaccccuacgacguccccgacuacgccucccuccgcucccucgucgccuccuccggcacccucgaguucaacaacgaguccuucaacuggaccggcgucgcccagaacggcaccuccuccgccugcaagcgccgcuccaacaaguccuucuucucccgccucaacuggcuccaccagcucaaguacaaguaccccgcccucaacgucaccaugcccaacaacgagaaguucgacaagcucuacaucuggggcguccaccaccccuccaccgacuccgaccagaucucccucuacgcccaggcccccggccgcgucaccgucuccaccaagcgcucccagcagaccgucauccccaacaucggcucccgccccuggguccgcggcgucuccucccgcaucuccaucuacuggaccaucgucaagcccggcgacauccuccucaucaacugcaccggcaaccucaucgccccccgcggcuacuucaagauccgcuccggcaaguccuccaucaugcgcuccgacgccuccaucggcaagugcaacuccgagugcaucacccccaacggcuccauccccaacgacaagcccuuccagaacgucaaccgcaucaccuacggcgccugcccccgcuacgucaagcagaacacccucaagcucgccaccggcaugcgcaacguccccgagaagcagacccgcggcaucuucggcgccaucgccggcuucaucgagaacggcugggagggcauggucgacggcugguacggcuuccgccaccagaacuccgagggcaccggccaggccgccgaccucaaguccacccaggccgccaucaaccagaucaacggcaagcucaaccgccucaucgagaagaccaacgagaaguuccaccagaucgagaaggaguucuccgaggucgagggccgcauccaggaccucgagaaguacgucgaggacaccaagaucgaccucugguccuacaacgccgagcuccucgucgcccucgagaaccagcacaccaucgaccucaccgacuccgagaugaacaagcucuucgagcgcaccaagaagcagcuccgcgagaacgccgaggacaugggcaacggcugcuucaagaucuaccacaagugcgacaacgccugcaucggcuccauccgcaacggcaccuacgaccacgacgucuaccgcgacgaggcccucaacaaccgcuuccagaucaagggcgucgagcucaaguccggcuacaaggacuggauccucuggaucuccuucgccaucuccugcuuccuccucugcgucguccuccucggcuucaucaugugggccugccagaagggcaacauccgcugcaacaucugcaucuga

SEQ ID NO: 97412 - RNA, 1701 nt, Artificial Sequence; identical to SEQ ID NO: 96686
  derived and/or modified CDS sequence (opt2) from hemagglutinin__InfluenzaA__ABJ09360

SEQ ID NO: 97413 - RNA, 1701 nt, Artificial Sequence
  derived and/or modified CDS sequence (opt2) from hemagglutinin__InfluenzaA__ABJ09371
augaagaccaucaucgcccucuccuacauccucugccucgucuucgcccagaagcuccccggcaacgacaacuccaccgccacccucugccucggccaccacgccguccccaacggcaccaucgucaagaccaucaccaacgaccagaucgaggucaccaacgccaccgagcucguccaguccuccuccaccggcggcaucugcgacuccccccaccagauccucgacggcgagaacugcacccucaucgacgcccuccucggcgacccccagugcgacggcuuccagaacaagaagugggaccucuucgucgagcgcuccaaggccuacuccaacugcuaccccuacgacguccccgacuacgccucccuccgcucccucaucgccuccuccggcacccucgaguucaacaacgaguccuucaacuggaccggcgucacccagaacggcaccuccuccgccugcaagcgccgcuccaacuccuccuucuucucccgccucaacuggcucacccaccucaaguucaaguaccccgcccucaacgucaccaugcccaacaacgaggaguucgacaagcucuacaucuggggcguccaccaccccggcaccuacaacgaccagaucucccucuacgcccaggccuccggccgcaucaccgucuccaccaagcgcucccagcagaccgucauccccaacaucggcucccgccuccgcguccgcgacauccccucccgcaucuccaucuacuggaccaucgucaagcccggcgacauccuccucaucaacuccaccggcaaccucaucgccccccgcggcuacuucaagauccgcuccggcaaguccuccaucaugcgcuccgacgcccccaucggcaagugcaacuccgagugcaucacccccaacggcuccauccccaacgacaagcccuuccagaacgucaaccgcaucaccuacggcgccugcccccgcuacgucaagcagaacacccucaagcucgccaccggcaugcgcaacguccccgagaagcagacccgcggcaucuucggcgccaucgccggcuucaucgagaacggcugggagggcauggucgacggcugguacggcuuccgccaccagaacuccgagggcaucggccaggccgccgaccucaaguccacccaggccgccaucgaccagaucaacggcaagcucaaccgccucaucggcaagaccaacgagaaguuccaccagaucgagaaggaguucuccgaggucgagggccgcauccaggaccucgagaaguacgucgaggacaccaagaucgaccucugguccuacaacgccgagcuccucgucgcccucgagaaccagcacaccaucgaccucaccgacuccgagaugaacaagcucuucgagcgcaccaagaagcagcuccgcgagaacgccgaggacaugggcaacggcugcuucaagaucuaccacaagugcgacaacgccugcaucggcuccauccgcaacggcaccuacgaccacgacgucuaccgcgacgaggcccucaacaaccgcuuccagaucaagggcgucgagcucaaguccggcuacaaggacuggauccucuggaucuccuucgccaucuccugcuuccuccucugcgucgcccuccucggcuucaucaugugggccugccagaagggcaacauccgcugcaacaucugcaucuga

SEQ ID NO: 97414 - RNA, 1701 nt, Artificial Sequence; identical to SEQ ID NO: 96669
  derived and/or modified CDS sequence (opt2) from hemagglutinin__InfluenzaA__ABJ09382

SEQ ID NO: 97415 - RNA, 1701 nt, Artificial Sequence
  derived and/or modified CDS sequence (opt2) from hemagglutinin__InfluenzaA__ABJ16587
augaagaccaucaucgcccucuccuacaucuccugccucgucuucgcccagaagcuccccggcaacgacaacuccaccgccacccucugccucggccaccacgccguccccaacggcacccucgucaagaccaucaccaacgaccagaucgaggucaccaacgccaccgagcucguccaguccuccuccaccggccgcaucugcgacuccccccaccagauccucgacggcgagaacugcacccucaucgacgcccuccucggcgacccccacugcgacggcuuccagaacaaggagugggaccucuucgucgagcgcuccaaggccuacuccaacugcuaccccuacgacguccccgacuacgccucccuccgcucccucgucgccuccuccggcacccucgaguucaacaacgaguccuucaacuggaccggcgucgcccagaacggcaccuccuccgccugcaagcgccgcuccaucaaguccuucuucucccgccucaacuggcuccaccagcucaaguaccgcuaccccgcccucaacgucaccaugcccaacaacgacaaguucgacaagcucuacaucuggggcguccaccaccccuccaccgacuccgaccagaccucccucuacgcccaggccuccggccgcgucaccgucuccaccaagcgcucccagcagaccgucauccccaacaucggcucccgccccuggguccgcggcgucuccucccgcaucuccaucuacuggaccaucgucaagcccggcgacauccuccucaucaacuccaccggcaaccucaucgccccccgcggcuacuucaagauccgcuccggcaaguccuccaucaugcgcuccgacgcccccaucggcaagugcaacuccgagugcaucacccccaacggcuccauccccaacgacaagcccuuccagaacgucaaccgcaucaccuacggcgccugcccccgcuacgucaagcagaacacccucaagcucgccaccggcaugcgcaacguccccgagaagcagacccgcggcaucuucggcgccaucgccggcuucaucgagaacggcugggagggcaugauggacggcugguacggcuuccgccaccagaacuccgagggcaccggccaggccgccgaccucaaguccacccaggccgccaucaaccagaucaacggcaagcucaaccgccucaucgagaagaccaacgagaaguuccaccagaucgagaaggaguucuccgaggucgagggccgcauccaggaccucgagaaguacgucgaggacaccaagaucgaccucugguccuacaacgccgagcuccucgucgcccucgagaaccagcacaccaucgaccucaccgacuccgagaugaacaagcucuucgagcgcacccgcaagcagcuccgcgagaacgccgaggacaugggcaacggcugcuucaagaucuaccacaagugcgacaacgccugcaucggcuccauccgcaacggcaccuacgaccacgacgucuaccgcgacgaggcccucaacaaccgcuuccagaucaagggcgucgagcucaaguccggcuacaaggacuggauccucuggaucuccuucgccaucuccugcuuccuccucugcgucguccuccucggcuucaucaugugggccugccagaagggcaacauccgcugcaacaucugcaucuga

SEQ ID NO: 97416 - RNA, 1701 nt, Artificial Sequence
  derived and/or modified CDS sequence (opt2) from hemagglutinin__InfluenzaA__ABJ16598
augaagaccaucaucgcccucuccuacauccucugccucgucuucgcccagaagcuccccggcaacgacaacuccaccgccacccucugccucggccaccacgccguccccaacggcacccucgucaagaccaucaccaacgaccagaucgaggucaccaacgccaccgagcucguccaguccuccuccaccggccgcaucugcaacuccccccaccagauccucgacggcgagaacugcacccucaucgacgcccuccucggcgacccccacugcgacggcuuccagaacaaggagugggaccucuucgucgagcgcuccaaggccuacuccaacugcuaccccuacgacguccccgacuacgccucccuccgcucccucgucgccuccuccggcacccucgaguucaacaacgaguccuucaacuggaccggcgucgcccagaacggcaccuccuccgccugcaagcgccgcuccaucaaguccuucuucucccgccucaacuggcuccaccagcucaaguacaaguaccccgcccucaacgucaccaugcccaacaacgagaaguucgacaagcucuacaucuggggcguccaccaccccuccaccgacuccgaccagaucucccucuacgcccaggccuccggccgcgucaccgucuccaccaagcgcucccagcagaccgucauccccaacaucggcucccgccccuggguccgcggcgucuccucccgcaucuccaucuacuggaccaucgucaagcccggcgacauccuccucaucaacuccaccggcaaccucaucgccccccgcggcuacuucaagauccgcuccggcaaguccuccaucaugcgcuccgacgcccccaucggcaagugcaacuccgagugcaucacccccaacggcuccauccccaacgacaagcccuuccagaacgucaaccgcaucaccuacggcgccugcccccgcuacgucaagcagaacacccucaagcucgccaccggcaugcgcaacguccccgagaagcagacccgcggcaucuucggcgccaucgccggcuucaucgagaacggcugggagggcauggucgacggcugguacggcuuccgccaccagaacuccgagggcaccggccaggccgccgaccucaaguccacccaggccgccaucaaccagaucaacggcaagcucaaccgccucaucgagaagaccaacgagaaguuccaccagaucgagaaggaguucuccgaggucgagggccgcauccaggaccucgagaaguacgucgaggacaccaagaucgaccucugguccuacaacgccgagcuccucgucgcccucgagaaccagcacaccaucgaccucaccgacuccgagaugaacaagcucuucgagcgcaccaagaagcagcuccgcgagaacgccgaggacaugggcaacggcugcuucaagaucuaccacaagugcgacaacgccugcaucggcuccauccgcaacggcaccuacgaccacgacgucuaccgcgacgaggcccucaacaaccgcuuccagaucaagggcgucgagcucaaguccggcuacaaggacuggauccucuggaucuccuucgccaucuccugcuuccuccucugcgucguccuccucggcuucaucaugugggccugccagaagggcaacauccgcugcaacaucugcaucuga

SEQ ID NO: 97417 - RNA, 1701 nt, Artificial Sequence
  derived and/or modified CDS sequence (opt2) from hemagglutinin__InfluenzaA__ABJ16620
augaagaccaucaucgcccucuccuacauccucugccucgucuucgcccagaagcuccccggcaacgacaacuccaccgccacccucugccucggccaccacgccguccccaacggcacccucgucaagaccaucaccaacgaccagaucgaggucaccaacgccaccgagcucguccaguccuccuccaccggccgcaucugcaacuccccccaccagauccucgacggcgagaacugcacccucaucgacgcccuccucggcgacccccacugcgacggcuuccagaacaaggagugggaccucuucgucgagcgcaacaaggccuacuccaacugcuaccccuacgacguccccgacuacgccucccuccgcucccucgucgccuccuccggcacccucgaguucaacaacgaguccuucaacuggaccggcgucgcccagaacggcaccuccuccgccugcaagcgccgcuccaucaaguccuucuucucccgccucaacuggcuccaccagcucaaguacaaguaccccgcccucaacgucaccaugcccaacaacgagaaguucgacaagcucuacaucuggggcguccaccaccccuccaccgacuccgaccagaucucccucuacgcccaggccuccggccgcgucaccgucuccaccaagcgcucccagcagaccgucauccccaacaucggcucccgccccuggguccgcggcgucuccucccgcaucuccaucuacuggaccaucgucaagcccggcgacauccuccucaucaacuccaccggcaaccucaucgccccccgcggcuacuucaagauccgcuccggcaaguccuccaucaugcgcuccgacgcccccaucggcaagugcaacuccgagugcaucacccccaacggcuccauccccaacgacaagcccuuccagaacgucaaccgcaucaccuacggcgccugcccccgcuacgucaagcagaacacccucaagcucgccaccggcaugcgcaacguccccgagaagcagacccgcggcaucuucggcgccaucgccggcuucaucgagaacggcugggagggcauggucgacggcugguacggcuuccgccaccagaacuccgagggcaccggccaggccgccgaccucaaguccacccaggccgccaucaaccagaucaacggcaagcucaaccgccucaucgagaagaccaacaagaaguuccaccagaucgagaaggaguucuccgaggucgagggccgcauccaggaccucgagaaguacgucgaggacaccaagaucgaccucugguccuacaacgccgagcuccucgucgcccucgagaaccagcacaccaucgaccucaccgacuccgagaugaacaagcucuucgagcgcaccaagaagcagcuccgcgagaacgccgaggacaugggcaacggcugcuucaagaucuaccacaagugcgacaacgccugcaucggcuccauccgcaacggcaccuacgaccacgacgucuaccgcgacgaggcccucaacaaccgcuuccagaucaagggcgucgagcucaaguccggcuacaaggacuggauccucuggaucuccuucgccaucuccugcuuccuccucugcgucguccuccucggcuucaucaugugggccugccagaagggcaacauccgcugcaacaucugcaucuga

SEQ ID NO: 97418 - RNA, 1701 nt, Artificial Sequence
  derived and/or modified CDS sequence (opt2) from hemagglutinin__InfluenzaA__ABJ16631
augaagaccaucaucgcccucuccuacauccucugccucgucuucgcccagaagcuccccggcaacgacaacuccaccgccacccucugccucggccaccacgccguccccaacggcaccaucgucaagaccaucaccaacgaccagaucgaggucaccaacgccaccgagcucguccaguccuccuccaccggcggcaucugcgacuccccccaccagauccucgacggcgagaacugcacccucaucgacgcccuccucggcgacccccagugcgacggcuuccagaacaagaagugggaccucuucgucgagcgcuccaaggccuacuccaacugcuaccccuacgacguccccgacuacgccucccuccgcucccucaucgccuccuccggcacccucgaguucaacaacgaguccuucaacuggaccggcgucacccagaacggcaccuccuccgccugcaagcgccgcuccaacuccuccuucuucucccgccucaacuggcucacccaccucaaguucaaguaccccgcccucaacgucaccaugcccaacaacgaggaguucgacaagcucuacaucuggggcguccaccaccccggcaccuacaacgaccagaucucccucuacgcccaggccuccggccgcaucaccgucuccaccaagcgcucccagcagaccgucauccccaacaucggcucccgcccccgcguccgcgacauccccucccgcaucuccaucuacuggaccaucgucaagcccggcgacauccuccucaucaacuccaccggcaaccucaucgccccccgcggcuacuucaagauccgcuccggcaaguccuccaucaugcgcuccgacgcccccaucggcaagugcaacuccgagugcaucacccccaacggcuccauccccaacgacaagcccuuccagaacgucaaccgcaucaccuacggcgccugcccccgcuacgucaagcagaacacccucaagcucgccaccggcaugcgcaacguccccgagaagcagacccgcggcaucuucggcgccaucgccggcuucaucgagaacggcugggagggcauggucgacggcugguacggcuuccgccaccagaacuccgagggcaucggccaggccgccgaccucaaguccacccaggccgccaucgaccagaucaacggcaagcucaaccgccucaucggcaagaccaacgagaaguuccaccagaucgagaaggaguucuccgaggucgagggccgcauccaggaccucgagaaguacgucgaggacaccaagaucgaccucugguccuacaacgccgagcuccucgucgcccucgagaaccagcacaccaucgaccucaccgacuccgagaugaacaagcucuucgagaagaccaagaagcagcuccgcgagaacgccgaggacaugggcaacggcugcuucaagaucuaccacaagugcgacaacgccugcaucggcuccauccgcaacggcaccuacgaccacgacgucuaccgcgacgaggcccucaacaaccgcuuccagaucaagggcgucgagcucaaguccggcuacaaggacuggauccucuggaucuccuucgccaucuccugcuuccuccucugcgucgcccuccucggcuucaucaugugggccugccagaagggcaacauccgcugcaacaucugcaucuga

SEQ ID NO: 97419 - RNA, 1698 nt, Artificial Sequence
  derived and/or modified CDS sequence (opt2) from hemagglutinin__InfluenzaA__ABJ16664
augaaggucaagcuccucguccuccucugcaccuucaccgccaccuacgccgacaccaucugcaucggcuaccacgccaacaacuccaccgacaccgucgacaccguccucgagaagaacgucaccgucacccacuccgucaaccuccucgaggacucccacaacggcaagcucugccuccucaagggcaucgccccccuccagcucggcaacugcuccgucgccggcuggauccucggcaaccccgagugcgagcuccucaucuccaaggaguccugguccuacaucgucgagacccccaaccccgagaacggcaccugcuaccccggccacuucgccgacuacgaggagcuccgcgagcagcucuccuccgucuccuccuucgagcgcuucgagaucuuccccaaggaguccuccuggcccaaccacaccgucaccggcgucuccgccuccugcucccacaacggcaaguccuccuucuaccgcaaccuccucuggcucaccggcaagaacggccucuaccccaaccucuccaaguccuacgccaacaacaaggagaaggagguccucguccucuggggcguccaccacccccccaacaucggcgaccagcgcgcccucuaccacaccgagaacgccuacgucuccgucgucuccucccacuacucccgccgcuucacccccgagaucgccaagcgccccaagguccgcgaccaggagggccgcaucaacuacuacuggacccuccucgagcccggcgacaccaucaucuucgaggccaacggcaaccucaucgccccccgcuucgccuucgcccucucccgcggcuucggcuccggcaucaucaccuccaacgcccccauggacgagugcgacgccaagugccagaccccccagggcgccaucaacuccucccuccccuuccagaacguccaccccgucaccaucggcgagugccccaaguacguccgcuccgccaagcuccgcauggucaccggccuccgcaacauccccuccauccagucccgcggccucuucggcgccaucgccggcuucaucgagggcggcuggaccggcauggucgacggcugguacggcuaccaccaccagaacgagcagggcuccggcuacgccgccgaccagaaguccacccagaacgccaucaacggcaucaccaacaaggucaacuccgucaucgagaagaugaacacccaguucaccgccgucggcaaggaguucaacaagcucgagcgccgcauggagaaccucaacaagaaggucgacgacggcuuccucgacaucuggaccuacaacgccgagcuccucguccuccucgagaacgagcgcacccucgacuuccacgacuccaacgucaagaaccucuacgagaaggucaagucccagcucaagaacaacgccaaggagaucggcaacggcugcuucgaguucuaccacaagugcaacgacgagugcauggaguccgucaagaacggcaccuacgacuaccccaaguacuccgaggaguccaagcucaaccgcgagcgcaucgacggcgucaagcucgaguccaugggcgucuaccagauccucgccaucuacuccaccgucgccuccucccucguccuccucgucucccucggcgccaucuccuucuggaugugcuccaacggcucccuccagugccgcaucugcaucuga

SEQ ID NO: 97420 - RNA, 1698 nt, Artificial Sequence; identical to SEQ ID NO: 97240
  derived and/or modified CDS sequence (opt2) from hemagglutinin__InfluenzaA__ABJ16675

SEQ ID NO: 97421 - RNA, 1698 nt, Artificial Sequence
  derived and/or modified CDS sequence (opt2) from hemagglutinin__InfluenzaA__ABJ16686
augaaggucaagcuccucguccuccucugcaccuucaccgccaccuacgccgacaccaucugcaucggcuaccacgccaacaacuccaccgacaccgucgacaccguccucgagaagaacgucaccgucacccacuccgucaaccuccucgaggacucccacaacggcaagcucugccuccucaagggcaucgccccccuccagcucggcaacugcuccgucgccggcuggauccucggcaaccccgagugcgagcuccucaucuccaaggaguccugguccuacaucgucgagacccccaaccccgagaacggcaccugcuaccccggcuacuucgccgacuacgaggagcuccgcgagcagcucuccuccgucuccuccuucgagcgcuucgagaucuuccccaaggaguccuccuggcccaaccacaccgucaccggcgucuccgccuccugcucccacaacggcaaguccuccuucuaccgcaaccuccucuggcucaccggcaagaacggccucuaccccaaccucuccaaguccuacgccaacaacaaggagaaggagguccucguccucuggggcguccaccacccccccaacaucggcgaccagcgcgcccucuaccacaccgagaacgccuacgucuccgucgucuccucccacuacucccgccgcuucacccccgagaucgccaagcgccccaagguccgcgaccaggagggccgcaucaacuacuacuggacccuccucgagcccggcgacaccaucaucuucgaggccaacggcaaccucaucgccccccgcuucgccuucgcccucucccgcggcuucggcuccggcaucaucaccuccaacgcccccauggacgagugcgacgccaagugccagaccccccagggcgccaucaacuccucccuccccuuccagaacguccaccccgucaccaucggcgagugccccaaguacguccgcuccgccaagcuccgcauggccaccggccuccgcaacauccccuccauccagucccgcggccucuucggcgccaucgccggcuucaucgagggcggcuggaccggcauggucgacggcugguacggcuaccaccaccagaacgagcagggcuccggcuacgccgccgaccagaaguccacccagaacgccaucaacggcaucaccaacaaggucaacuccgucaucgagaagaugaacacccaguucaccgccgucggcaaggaguucuccaagcucgagcgccgcauggagaaccucaacaagaaggucgacgacggcuuccucgacaucuggaccuacaacgccgagcuccucguccuccucgagaacgagcgcacccucgacuuccacgacuccaacgucaagaaccucuacgagaaggucaagucccagcucaagaacaacgccaaggagaucggcaacggcugcuucgaguucuaccacaagugcaacgacgagugcauggaguccgucaagaacggcaccuacgacuaccccaaguacuccgaggaguccaagcucaaccgcgagaagaucgacggcgucaagcucgaguccaugggcgucuaccagauccucgccaucuacuccaccgucgccuccucccucguccuccucgucucccucggcgccaucuccuucuggaugugcuccaacggcucccuccagugccgcaucugcaucuga

SEQ ID NO: 97422 - RNA, 1701 nt, Artificial Sequence
  derived and/or modified CDS sequence (opt2) from hemagglutinin__InfluenzaA__ABJ16697
augaagaccaucaucgcccucuccuacauccucugccucgucuucgcccagaagcuccccggcaacgacaacuccaccgccacccucugccucggccaccacgccguccccaacggcacccucgucaagaccaucaccaacgaccagaucgaggucaccaacgccaccgagcucguccaguccuccuccaccggcggcaucugcgacuccccccaccagauccucgacggcgagaacugcacccucaucgacgcccuccucggcgacccccacugcgacggcuuccagaacaaggagugggaccucuucgucgagcgcuccaaggccuacuccaacugcuaccccuacgacguccccgacuacgccucccuccgcucccucgucgccuccuccggcacccucgaguucaacaacgaguccuucaacuggaccggcgucgcccagaacggcaccuccuccgccugcaagcgccgcuccaacaaguccuucuucucccgccucaacuggcuccaccagcucaaguacaaguaccccgcccucaacgucaccaugcccaacaacgagaaguucgacaagcucuacaucuggggcguccaccaccccuccaccgacuccgaccagaucucccucuacgcccaggcccccggccgcgucaccgucuccaccaagcgcucccagcagaccgucauccccaacaucggcucccgccccuggguccgcggcgucuccucccgcaucuccaucuacuggaccaucgucaagcccggcgacauccuccucaucaacugcaccggcaaccucaucgccccccgcggcuacuucaagauccgcuccggcaaguccuccaucaugcgcuccgacgccuccaucggcaagugcaacuccgagugcaucacccccaacggcuccauccccaacgacaagcccuuccagaacgucaaccgcaucaccuacggcgccugcccccgcuacgucaagcagaacacccucaagcucgccaccggcaugcgcaacguccccgagaagcagacccgcggcaucuucggcgccaucgccggcuucaucgagaacggcugggagggcauggucgacggcugguacggcuuccgccaccagaacuccgagggcaccggccaggccgccgaccucaaguccacccaggccgccaucaaccagaucaacggcaagcucaaccgccucaucgagaagaccaacgagaaguuccaccagaucgagaaggaguucuccgaggucgagggccgcauccaggaccucgagaaguacgucgaggacaccaagaucgaccucugguccuacaacgccgagcuccucgucgcccucgagaaccagcacaccaucgaccucaccgacuccgagaugaacaagcucuucgagcgcaccaagaagcagcuccgcgagaacgccgaggacaugggcaacggcugcuucaagaucuaccacaagugcgacaacgccugcaucggcuccauccgcaacggcaccuacgaccacgacgucuaccgcgacgaggcccucaacaaccgcuuccagaucaagggcgucgagcucaaguccggcuacaaggacuggauccucuggaucuccuucgccaucuccugcuuccuccucugcgccguccuccucggcuucaucaugugggccugccagaagggcaacauccgcugcaacaucugcaucuga

SEQ ID NO: 97423 - RNA, 1701 nt, Artificial Sequence
  derived and/or modified CDS sequence (opt2) from hemagglutinin__InfluenzaA__ABJ16730
augaaggccaagcuccucguccuccucugcgccuucaccgccaccuacgccgacaccaucugcaucggcuaccacgccaacaacuccaccgacaccgucgacaccguccucgagaagaacgucaccgucacccacuccgucaaccuccucgaggacucccacaacggcaagcucugccgccucaagggcaccgccccccuccagcucggcaacugcuccaucgccggcuggauccucggcaaccccgagugcgagucccucuucuccaaggaguccugguccuacaucgccgagacccccaaccccaagaacggcaccugcuaccccggcuacuucgccgacuacgaggagcuccgcgagcagcucuccuccgucuccuccuucgagcgcuucgagaucuuccccaaggacuccuccuggcccaaccacaccgucaccaagggcgucaccgccuccugcucccacaacggcaaguccuccuucuacaagaaccuccucuggcucaccgagaagaacggccucuaccccaaccucuccaaguccuacgucaacaagaagggcaaggagguccucguccucuggggcguccaccaccccuccaacaugggcgaccagcgcgccaucuaccacaaggagaacgccuacgucuccguccucuccucccacuacucccgccgcuucacccccgagaucgcccgccgccccaagguccgcgaccaggagggccgcaucaacuacuacuggacccuccucgagcccggcgacaccaucaucuucgaggccaacggcaaccucaucgcccccugguacgccuucgcccucucccgcggcuucggcuccggcaucaucaucuccaacgccuccaugggcgagugcgacgccaagugccagaccccccagggcgccaucaacuccucccuccccuuccagaacguccaccccgucaccaucggcgagugccccaaguacguccgcuccaccaagcuccgcauggucaccggccuccgcaacguccccuccauccagucccgcggccucuucggcgccaucgccggcuucaucgagggcggcuggaccggcaugaucgacggcugguacggcuaccaccaccagaacgagcagggcuccggcuacgccgccgaccagaaguccacccagaacgccaucaacggcaucaccaacaaggucaacuccaucaucgagaagaugaacacccaguucaccgccgucggcaaggaguucaacaagcucgagcgccgcauggagaaccucaacaagaaggucgacgacggcuuccucgacaucuggaccuacaacgccgagcuccucguccuccucgagaacgagcgcacccucgacuuccacgacuccaacgucaagaaccucuacgagaaggucaagaaccagcucaagaacaacgccaaggagaucggcaacggcugcuucgaguucuaccacaagugcaacaacgagugcauggaguccgucaagaacggcaccuacgacuaccccaaguacuccaaggaguccaagcucaaccgcgagaagaucgacggcgucaagcucgaguccaugggcgucuaccagauccucgccaucuacuccaccgucgccuccucccucguccuccucgucucccucggcgccaucuccuucuggaugugcuccaacggcucccuccagugccgcaucugcaucuga

SEQ ID NO: 97424 - RNA, 1701 nt, Artificial Sequence
  derived and/or modified CDS sequence (opt2) from hemagglutinin__InfluenzaA__ABJ16741
augaagaccaucaucgcccucuccuacauccucugccucgucuucgcccagaagcuccccggcaacgacaacuccaccgccacccucugccucggccaccacgccguccccaacggcacccucgucaagaccaucaccaacgaccagaucgaggucaccaacgccaccgagcucguccaguccuccuccaccggcggcaucugcgacuccccccaccagauccucgacggcgagaacugcacccucaucgacgcccuccucggcgacccccacugcgacggcuuccagaacaaggagugggaccucuucgucgagcgcuccaaggccuacuccaacugcuaccccuacgacguccccgacuacgccucccuccgcucccucgucgccuccuccggcacccucgaguucaacaacgaguccuucaacuggaccggcgucgcccagaacggcaccuccuccgccugcaagcgccgcuccaacaagggcuucuucucccgccucaacuggcuccaccagcucaaguacaaguaccccgcccucaacgucaccaugcccaacaacgagaaguucgacaagcucuacaucuggggcguccaccaccccuccaccgacuccgaccagaucucccucuacgcccaggcccccggccgcgucaccgucuccaccaagcgcucccagcagaccgucauccccaacaucggcucccgccccuggguccgcggcgucuccuccaucaucuccaucuacuggaccaucgucaagcccggcgacauccuccucaucaacugcaccggcaaccucaucgccccccgcggcuacuucaagauccgcuccggcaaguccuccaucaugcgcuccgacgccuccaucggcaagugcaacuccgagugcaucacccccaacggcuccauccccaacgacaagcccuuccagaacgucaaccgcaucaccuacggcgccugcccccgcuacgucaagcagaacacccucaagcucgccaccggcaugcgcaacguccccgagaagcagacccgcggcaucuucggcgccaucgccggcuucaucgagaacggcugggagggcauggucgacggcugguacggcuuccgccaccagaacuccgagggcaccggccaggccgccgaccucaaguccacccaggccgccaucaaccagaucaacggcaagcucaaccgccucaucggcaagaccaacgagaaguuccaccagaucgagaaggaguucuccgaggucgagggccgcauccaggaccucgagaaguacgucgaggacaccaagaucgaccucugguccuacaacgccgagcuccucgucgcccucgagaaccagcacaccaucgaccucaccgacuccgagaugaacaagcucuucgagcgcaccaagaagcagcuccgcgagaacgccgaggacaugggcaacggcugcuucaagaucuaccacaagugcgacaacgccugcaucggcuccauccgcaacggcaccuacgaccacgacgucuaccgcgacgaggcccucaacaaccgcuuccagaucaagggcgucgagcucaaguccggcuacaaggacuggauccucuggaucuccuucgccaucuccugcuuccuccucugcgucguccuccucggcuucaucaugugggccugccagaagggcaacauccgcugcaacaucugcaucuga

SEQ ID NO: 97425 - RNA, 1701 nt, Artificial Sequence
  derived and/or modified CDS sequence (opt2) from hemagglutinin__InfluenzaA__ABJ16752
augaagaccaucaucgcccucuccuacauccucugccucgucuucgcccagaagcuccccggcaacgacaacuccaccgccacccucugccucggccaccacgccguccccaacggcacccucgucaagaccaucaccaacgaccagaucgaggucaccaacgccaccgagcucguccaguccuccuccaccggcggcaucugcgacuccccccaccagauccucgacggcgagaacugcacccucaucgacgcccuccucggcgacccccacugcgacggcuuccagaacaaggagugggaccucuucgucgagcgcuccaaggccuacuccaacugcuaccccuacgacguccccgacuacgccucccuccgcucccucgucgccuccuccggcacccucgaguucaacaacgaguccuucaacuggaccggcgucgcccagaacggcaccuccuccgccugcaagcgccgcuccaacaaguccuucuucucccgccucaacuggcuccaccagcucaaguacaaguaccccgcccucaacgucaccaugcccaacaacgagaaguucgacaagcucuacaucuggggcguccaccaccccuccaccgacuccgaccagaucucccucuacgcccaggcccccggccgcgucaccgucuccaccaagcgcucccagcagaccgucauccccaacaucggcucccgccccuggguccgcggcgucuccuccggcaucuccaucuacuggaccaucgucaagcccggcgacauccuccucaucaacugcaccggcaaccucaucgccccccgcggcuacuucaagauccgcuccggcaaguccuccaucaugcgcuccgacgccuccaucggcaagugcaacuccgagugcaucacccccaacggcuccauccccaacgacaagcccuuccagaacgucaaccgcaucaccuacggcgccugcccccgcuacgucaagcagaacacccucaagcucgccaccggcaugcgcaacguccccgagaagcagacccgcggcaucuucggcgccaucgccggcuucaucgagaacggcugggagggcauggucgacggcugguacggcuuccgccaccagaacuccgagggcaccggccaggccgccgaccucaaguccacccaggccgccaucaaccagaucaacggcaagcucaaccgccucaucgagaagaccaacgagaaguuccaccagaucgagaaggaguucuccgaggucgagggccgcauccaggaccucgagaaguacgucgaggacaccaagaucgaccucugguccuacaacgccgagcuccucgucgcccucgagaaccagcacaccaucgaccucaccgacuccgagaugaacaagcucuucgagcgcaccaagaagcagcuccgcgagaacgccgaggacaugggcaacggcugcuucaagaucuaccacaagugcgacaacgccugcaucggcuccauccgcaacggcaccuacgaccacgacgucuaccgcgacgaggcccucaacaaccgcuuccagaucaagggcgucgagcucaaguccggcuacaaggacuggauccucuggaucuccuucgccaucuccugcuuccuccucugcgucguccuccucggcuucaucaugugggccugccagaagggcaacauccgcugcaacaucugcaucuga

SEQ ID NO: 97426 - RNA, 1701 nt, Artificial Sequence
  derived and/or modified CDS sequence (opt2) from hemagglutinin__InfluenzaA__ABJ16763
augaagaccaucaucgcccucuccuacauccucugccucgucuucgcccagaagcuccccggcaacgacaacuccaccgccacccucugccucggccaccacgccguccccaacggcacccucgucaagaccaucaccaacgaccagaucgaggucaccaacgccaccgagcucguccaguccuccuccaccggcggcaucugcgacuccccccaccagauccucgacggcgagaacugcacccucaucgacgcccuccucggcgacccccacugcgacggcuuccagaacaaggagugggaccucuucgucgagcgcuccaaggccuacuccaacugcuaccccuacgacguccccgacuacgccucccuccgcucccucgucgccuccuccggcacccucgaguucaacaacgaguccuucaacuggaccggcgucgcccagaacggcaccuccuccgccugcaagcgccgcuccaacaaguccuucuucucccgccucaacuggcuccaccagcucaaguacaaguaccccgcccucaacgucaccaugcccaacaacgagaaguucgacaagcucuacaucuggggcguccaccaccccuccaccgacuccgaccagaucucccucuacgcccaggcccccggccgcgucaccgucuccaccaagcgcucccagcagaccgucauccccaacaucggcucccgccacuggguccgcggcgucuccucccgcaucuccaucuacuggaccaucgucaagcccggcgacauccuccucaucaacugcaccggcaaccucaucgccccccgcggcuacuucaagauccgcuccggcaaguccuccaucaugcgcuccgacgccuccaucggcaagugcaacuccgagugcaucacccccaacggcuccauccccaacgacaagcccuuccagaacgucaaccgcaucaccuacggcgccugcccccgcuacgucaagcagaacacccucaagcucgccaccggcaugcgcaacguccccgagaagcagacccgcggcaucuucggcgccaucgccggcuucaucgagaacggcugggagggcauggucgacggcugguacggcuuccgccaccagaacuccgagggcaccggccaggccgccgaccucaaguccacccaggccgccaucaaccagaucaacggcaagcucaaccgccucaucgagaagaccaacgagaaguuccaccagaucgagaaggaguucuccgaggucgagggccgcauccaggaccucgagaaguacgucgaggacaccaagaucgaccucugguccuacaacgccgagcuccucgucgcccucgagaaccagcacaccaucgaccucaccgacuccgagaugaacaagcucuucgagcgcaccaagaagcagcuccgcgagaacgccgaggacaugggcaacggcugcuucaagaucuaccacaagugcgacaacgccugcaucggcuccauccgcaacggcaccuacgaccacgacgucuaccgcgacgaggcccucaacaaccgcuuccagaucaagggcgucgagcucaaguccggcuacaaggacuggauccucuggaucuccuucgccaucuccugcuuccuccucugcgucguccuccucggcuucaucaugugggccugccagaagggcaacauccgcugcaacaucugcaucuga

SEQ ID NO: 97427 - RNA, 1701 nt, Artificial Sequence
  derived and/or modified CDS sequence (opt2) from hemagglutinin__InfluenzaA__ABJ16774
augaagaccaucaucgcccucuccuacauccucugccucgucuucgcccagaagcuccccgucaacgacaacuccaccgccacccucugccucggccaccacgccguccccaacggcacccucgucaagaccaucaccaacgaccacaucgaggucaccaacgccaccgagcucguccaguccucccccaccggccgcaucugcgacuccccccaccagauccucgacggcgagaacugcacccucaucgacgcccuccucggcgacccccacugcgacggcuuccagaacaaggagugggaccucuucgucgagcgcuccaccgccuacuccaacugcuaccccuacgacguccccgacuacgccucccuccgcucccucgucgccuccuccggcacccucgaguucaacaacgaguccuucaacuggaccggcgucgcccagaacggcaccuccuccgccugcaagcgccgcuccaucaaguccuucuucucccgccucaacuggcuccaccagcucaaguacaaguaccccgcccucaacgucaccaugcccaacaacgagaaguucgacaagcucuacaucuggggcguccaccaccccuccaccgacuccgaccagaucucccucuacgcccaggccuccggccgcgucaccgucuccaccaagcgcucccagcagaccgucauccccaacaucggcuccggccccuggguccgcggcgucuccucccgcaucuccaucuacuggaccaucgucaagcccggcgacauccuccucaucaacuccaccggcaaccucaucgccccccgcggcuacuucaagauccgcaacggcaaguccuccaucaugcgcuccaacacccccaucggcaagugcaacuccgagugcaucacccccaacggcuccauccccaacgacaagcccuuccagaacgucaaccgcaucaccuacggcgccugcccccgcuacgucaagcagaacacccucaagcucgccaccggcaugcgcaacguccccgagaagcagacccgcggcaucuucggcgccaucgccggcuucaucgagaacggcugggagggcauggucgacggcugguacggcuuccgccaccagaacuccgagggcaccggccaggccgccgaccucaaguccacccaggccgccaucaaccagaucaacggcaagcucaaccgccucaucgagaagaccaacgagaaguuccaccagaucgagaaggaguucuccgaggucgagggccgcauccaggaccucgagaaguacgucgaggacaccaagaucgaccucugguccuacaacgccgagcuccucgucgcccucgagaaccagcacaccaucgaccucaccgacuccgagaugaacaagcucuucgagcgcacccgcaagcagcuccgcgagaacgccgaggacaugggcaacggcugcuucaagaucuaccacaagugcgacaacgccugcaucggcuccauccgcaacggcaccuacgaccacgacgucuaccgcgacgaggcccucaacaaccgcuuccagaucaagggcgucgagcucaaguccggcuacaaggacuggauccucuggaucuccuucgccaucuccugcuuccuccucugcgucguccuccucggcuucaucaugugggccugccagaagggcaacauccgcugcaacaucugcaucuga

SEQ ID NO: 97428 - RNA, 1701 nt, Artificial Sequence
  derived and/or modified CDS sequence (opt2) from hemagglutinin__InfluenzaA__ABJ16785
augaagaccaucaucgcccucuccuacauccucugccucgucuucgcccagaagcuccccggcaacgacaacuccaccgccacccucugccucggccaccacgccguccccaacggcacccucgucaagaccaucaccaacgaccagaucgaggucaccaacgccaccgagcucguccaguccuccuccaccggcggcaucugcgacuccccccaccagauccucgacggcgagaacugcacccucaucgacgcccuccucggcgacccccacugcgacggcuuccagaacaaggagugggaccucuucgucgagcgcuccaaggccuacuccaacugcuaccccuacgacguccccgacuacgccucccuccgcucccucgucgccuccuccggcacccucgaguucaacaacgaguccuucaacuggaccggcgucgcccagaacggcaccuccuacgccugcaagcgccgcuccaacaaguccuucuucucccgccucaacuggcuccaccagcucaaguacaaguaccccgcccucaacgucaccaugcccaacaacgagaaguucgacaagcucuacaucuggggcguccaccaccccuccaccgacuccgaccagaucucccucuacgcccaggcccccggccgcgucaccgucuccaccaagcgcucccagcagaccgucauccccaacaucggcucccgccccuggguccgcggcgucuccucccgcaucuccaucuacuggaccaucgucaagcccggcgacauccuccucaucaacugcaccggcaaccucaucgccccccgcggcuacuucaagauccgcuccggcaaguccuccaucaugcgcuccgacgccuccaucggcaagugcaacuccgagugcaucacccccaacggcuccauccccaacgacaagcccuuccagaacgucaaccgcaucaccuacggcgccugcccccgcuacgucaagcagaacacccucaagcucgccaccggcaugcgcaacguccccgagaagcagacccgcggcaucuucggcgccaucgccggcuucaucgagaacggcugggagggcauggucgacggcugguacggcuuccgccaccagaacuccgagggcaccggccaggccgccgaccucaaguccacccaggccgccaucaaccagaucaacggcaagcucaaccgccucaucgagaagaccaacgagaaguuccaccagaucgagaaggaguucuccgaggucgagggccgcauccaggaccucgagaaguacgucgaggacaccaagaucgaccucugguccuacaacgccgagcuccucgucgcccucgagaaccagcacaccaucgaccucaccgacuccgagaugaacaagcucuucgagcgcaccaagaagcagcuccgcgagaacgccgaggacaugggcaacggcugcuucaagaucuaccacaagugcgacaacgccugcaucggcuccauccgcaacggcaccuacgaccacgacgucuaccgcgacgaggcccucaacaaccgcuuccagaucaagggcgucgagcucaaguccggcuacaaggacuggauccucuggaucuccuucgccaucuccugcuuccuccucugcgucguccuccucggcuucaucaugugggccugccagaagggcaacauccgcugcaacaucugcaucuga

SEQ ID NO: 97429 - RNA, 1701 nt, Artificial Sequence; identical to SEQ ID NO: 96946
  derived and/or modified CDS sequence (opt2) from hemagglutinin__InfluenzaA__ABJ53438

SEQ ID NO: 97430 - RNA, 1698 nt, Artificial Sequence; identical to SEQ ID NO: 96778
  derived and/or modified CDS sequence (opt2) from hemagglutinin__InfluenzaA__ABJ53449

SEQ ID NO: 97431 - RNA, 1701 nt, Artificial Sequence
  derived and/or modified CDS sequence (opt2) from hemagglutinin__InfluenzaA__ABJ53471
augaagaccaucaucgcccucuccuacauccucugccucgucuucgcccagaagauccccggcaacgacaacuccaccgccacccucugccucggccaccacgccguccccaacggcaccaucgucaagaccaucaccaacgaccagaucgaggucaccaacgccaccgagcucguccaguccuccuccaccggcggcaucugcgacuccccccaccagauccucgacggcgagaacugcacccucaucgacgcccuccucggcgacccccagugcgacggcuuccagaacaagaagugggaccucuucgucgagcgcuccaaggccuacuccaacugcuaccccuacgacguccccgacuacgccucccuccgcucccucgucgccuccuccggcacccucgaguucaacaacgaguccuucaacuggaccggcgucacccagaacggcaccuccuccgccugcaagcgcggcuccaacaacuccuucuucucccgccucaacuggcucacccaccucaaguucaaguaccccgcccucaacgucaccaugcccaacaacgagaaguucgacaagcucuacaucuggggcguccaccaccccggcaccgacaacgaccagaucuuccucuacgcccaggccuccggccgcaucaccgucuccaccaagcgcucccagcagaccgucauccccaacaucggcucccgcccccgcguccgcaacauccccucccgcaucuccaucuacuggaccaucgucaagcccggcgacauccuccucaucaacuccaccggcaaccucaucgccccccgcggcuacuucaagauccgcuccggcaaguccuccaucaugcgcuccgacgcccccaucggcaagugcaacuccgagugcaucacccccaacggcuccauccccaacgacaagcccuuccagaacgucaaccgcaucaccuacggcgccugcccccgcuacgucaagcagaacacccucaagcucgccaccggcaugcgcaacguccccgagaagcagacccgcggcaucuucggcgccaucgccggcuucaucgagaacggcugggagggcauggucgacggcugguacggcuuccgccaccagaacuccgagggcaucggccaggccgccgaccucaaguccacccaggccgccaucaaccagaucaacggcaagcucaaccgccucaucggcaagaccaacgagaaguuccaccagaucgagaaggaguucuccgaggucgagggccgcauccaggaccucgagaaguacgucgaggacaccaagaucgaccucugguccuacaacgccgagcuccucgucgcccucgagaaccagcacaccaucgaccucaccgacuccgagaugaacaagcucuucgagcgcaccaagaagcagcuccgcgagaacgccgaggacaugggcaacggcugcuucaagaucuaccacaagugcgacaacgccugcaucggcuccauccgcaacggcaccuacgaccacgacgucuaccgcgacgaggcccucaacaaccgcuuccagaucaagggcgucgagcucaaguccggcuacaaggacuggauccucuggaucuccuucgccaucuccugcuuccuccucugcgucgcccuccucggcuucaucaugugggccugccagaagggcaacauccgcugcaacaucugcaucuga

SEQ ID NO: 97432 - RNA, 1701 nt, Artificial Sequence
  derived and/or modified CDS sequence (opt2) from hemagglutinin__InfluenzaA__ABJ53482
augaagaccaucaucgcccucuccuacauccucugccucgucuucgcccagaagcuccccggcaacgacaacuccaccgccacccucugccucggccaccacgccguccccaacggcaccaucguccgcaccaucaccaacgaccagaucgaggucaccaacgccaccgagcucguccaguccuccuccaccggcgagaucugcgacuccccccaccagauccucgacggcgagaacugcacccucaucgacgcccuccucggcgacccccagugcgacggcuuccagaacaagaagugggaccucuucgucgagcgcuccaaggccuacuccaacugcuaccccuacgacguccccgacuacgccucccuccgcucccucgucgccuccuccggcacccucgaguucaacaacgaguccuucaacuggaccggcgucacccagaacggcaccuccuccgccugcaagcgccgcuccaacaacuccuucuucucccgccucaacuggcucacccaccucaaguucaaguaccccgcccucaacgucaccaugcccaacaacgagaaguucgacaagcucuacaucuggggcguccaccaccccggcaccgacaacgaccagaucuuccucuacgcccaggccuccggccgcaucaccgucuccaccaagcgcucccagcagaccgucauccccaacaucggcucccgcccccgcguccgcaacauccccucccgcaucuccaucuacuggaccaucgucaagcccggcgacauccuccucaucaacuccaccggcaaccucaucgccccccgcggcuacuucaagauccgcuccggcaaguccuccaucaugcgcuccgacgcccccaucggcaagugcaacuccgagugcaucacccccaacggcuccauccccaacgacaagcccuuccagaacgucaaccgcaucaccuacggcgccugcccccgcuacgucaagcagaacacccucaagcucgccaccggcaugcgcaacguccccgagaagcagacccgcggcaucuucggcgccaucgccggcuucaucgagaacggcugggagggcauggucgacggcugguacggcuuccgccaccagaacuccgagggcaucggccaggccgccgaccucaaguccacccaggccgccaucaaccagaucaacggcaagcucaaccgccucaucggcaagaccaacgagaaguuccaccagaucgagaaggaguucuccgaggucgagggccgcauccaggaccucgagaaguacgucgaggacaccaagaucgaccucugguccuacaacgccgagcuccucgucgcccucgagaaccagcacaccaucgaccucaccgacuccgagaugaacaagcucuucgagcgcaccaagaagcagcuccgcgagaacgccgaggacaugggcaacggcugcuucaagaucuaccacaagugcgacaacgccugcaucggcuccauccgcaacggcaccuacgaccacgacgucuaccgcgacgaggcccucaacaaccgcuuccagaucaagggcgucgagcucaaguccggcuacaaggacuggauccucuggaucuccuucgccaucuccugcuuccuccucugcgucgcccuccucggcuucaucaugugggccugccagaagggcaacauccgcugcaacaucugcaucuga

SEQ ID NO: 97433 - RNA, 1698 nt, Artificial Sequence; identical to SEQ ID NO: 97268
  derived and/or modified CDS sequence (opt2) from hemagglutinin__InfluenzaA__ABJ53493

SEQ ID NO: 97434 - RNA, 1698 nt, Artificial Sequence
  derived and/or modified CDS sequence (opt2) from hemagglutinin__InfluenzaA__ABJ53504
augaaggccaagcuccucguccuccucugcaccuucaccgccaccuacgccgacaccaucugcaucggcuaccacgccaacaacuccaccgacaccgucgacaccguccucgagaagaacgucaccgucacccacuccgucaaccuccucgaggacucccacaacggcaagcucugccuccucaagggcaucgccccccuccagcucggcaacugcuccgucgccggcuggauccucggcaaccccgagugcgagucccucaucuccaaggaguccugguccuacaucgucgagacccccaaccccgagaacggcaccugcuaccccggcuacuucgccgacuacgaggagcuccgcgagcagcucuccuccgucuccuccuucgagcgcuucgagaucuuccccaaggaguccuccuggcccaaccacaccgucaccggcgucuccgccuccugcucccacaacggcaaguccuccuucuaccgcaaccuccucuggcucaccgagaagaacggccucuaccccaaccucuccaaguccuacgucaacaacaaggagaaggagguccucguccucuggggcguccaccaccccuccaacaucggcguccagcgcgccaucuaccacaccgagaacgccuacgucuccgucgucuccucccacuacucccgccgcuucacccccgagaucgccaagcgccccaagguccgcgaccaggagggccgcaucaacuacuacuggacccuccucgagcccggcgacaccaucaucuucgaggccaacggcaaccucaucgcccccugguacgccuucgcccucucccgcggcuucgaguccggcaucaucaccuccaacgcccccaugaacgagugcgacgccaagugccagaccccccucggcgccaucaacuccucccuccccuuccagaacguccaccccgucaccaucggcgagugccccaaguacguccgcuccgccaagcuccgcauggucaccggccuccgcaacauccccuccauccagucccgcggccucuucggcgccaucgccggcuucaucgagggcggcuggaccggcaugaucgacggcugguacggcuaccaccaccagaacgagcagggcuccggcuacgccgccgaccagaaguccacccagaacgccaucaacggcaucaccaacaaggucaacuccgucaucgagaagaugaacacccaguucaccgccgucggcaaggaguucaacaagcucgagcgccgcauggagaaccucaacaagaaggucgacgacggcuuccucgacaucuggaccuacaacgccgagcuccucguccuccucgagaacgagcgcacccucgacuuccacgacuccaacgucaagaaccucuacgagaaggucaagucccagcucaagaacaacgccaaggagaucggcaacggcugcuucgaguucuaccacaagugcaacaacgagugcauggaguccgucaagaacggcaccuacgacuaccccaaguacuccgaggaguccaagcucaaccgcgagaagaucgacggcgucaagcucgaguccaugggcgucuaccagauccucgccaucuacuccaccgucgccuccucccucguccuccucgucucccucggcgccaucuccuucuggaugugcuccaacggcucccuccagugccgcaucugcaucuga

SEQ ID NO: 97435 - RNA, 1701 nt, Artificial Sequence; identical to SEQ ID NO: 97423
  derived and/or modified CDS sequence (opt2) from hemagglutinin__InfluenzaA__ABJ53515

SEQ ID NO: 97436 - RNA, 1701 nt, Artificial Sequence
  derived and/or modified CDS sequence (opt2) from hemagglutinin__InfluenzaA__ABK39962
augaagaccaucaucgcccucuccuacauccucugccucgucuucgcccagaagcuccccggcaacgacaacuccaccgccacccucugccucggccaccacgccguccccaacggcacccucgucaagaccaucaccaacgaccagaucgaggucaccaacgccaccgagcucguccaguccuccuccaccggccgcaucugcgacuccccccaccagauccucgacggcgagaacugcacccucaucgacgcccuccucggcgacccccacugcgacggcuuccagaacaaggagugggaccucuucgucgagcgcuccaaggccuacuccaacugcuaccccuacgacguccccgacuacgucucccuccgcucccucgucgccuccuccggcacccucgaguucaacaacgaguccuucaacuggaccggcgucgcccagaacggcaccuccuccgccugcaagcgccgcuccgacaaguccuucuucucccgccucaacuggcuccaccagcucaaguacaaguaccccgcccucaacgucaccaugcccaacaacgagaaguucgacaagcucuacaucuggggcguccaccaccccggcaccgacuccgaccagaucucccucuacgcccaggccuccggccgcgucaccgucuccaccaagcgcucccagcagaccgucauccccaacaucggcucccgccccuggguccgcggcgucuccucccgcaucuccaucuacuggaccaucgucaagcccggcgacauccuccucaucaacuccaccggcaaccucaucgccccccgcggcuacuucaagauccgcuccggcaaguccuccaucaugcgcuccgacgcccccaucggcaagugcaacuccgagugcaucacccccaacggcuccauccccaacgacaagcccuuccagaacgucaaccgcaucaccuacggcgccugcccccgcuacgucaagcagaagacccucaagcucgccaccggcaugcgcaacguccccgagaagcagacccgcggcaucuucggcgccaucgccggcuucaucgagaacggcugggagggcaugauggacggcugguacggcuuccgccaccagaacuccgagggcaccggccaggccgccgaccucaaguccacccaggccgccaucaaccagaucaacggcaagcucaaccgccucaucgagaagaccaacgagaaguuccaccagaucgagaaggaguucuccgaggucgagggccgcauccaggaccucgagaaguacgucgaggacaccaagaucgaccucugguccuacaacgccgagcuccucgucgcccucgagaaccagcacaccaucgaccucaccgacuccgagaugaacaagcucuucgagcgcaccaagaagcagcuccgcgagaacgccgaggacaugggcaacggcugcuucaagaucuaccacaagugcgacaacgccugcaucggcuccauccgcaacggcaccuacgaccacgacgucuaccgcgacgaggcccucaacaaccgcuuccagaucaagggcgucgagcucaaguccggcuacaaggacuggauccucuggaucuccuucgccaucuccugcuuccuccucugcaucguccuccucggcuucaucaugugggccugccagaagggcaacauccgcugcaacaucugcaucuga

SEQ ID NO: 97437 - RNA, 1701 nt, Artificial Sequence; identical to SEQ ID NO: 96666
  derived and/or modified CDS sequence (opt2) from hemagglutinin__InfluenzaA__ABK39973

SEQ ID NO: 97438 - RNA, 1701 nt, Artificial Sequence
  derived and/or modified CDS sequence (opt2) from hemagglutinin__InfluenzaA__ABK39984
augaagaccaucaucgcccucuccuacauccucugccucgucuucgcccagaagcuccccggcaacgacaacucccgcgccacccucugccucggccaccacgccguccccaacggcaccaucgucaagaccaucaccaacgaccagaucgaggucaccaacgccaccgagcucguccaguccuccuccaccggcggcaucugcgacuccccccaccagauccucgacggcgagaacugcacccucaucgacgcccuccucggcgacccccagugcgacggcuuccagaacaagaagugggaccucuucgucgagcgcuccaaggccuacuccaacugcuaccccuacgacguccccgacuacgccucccuccgcucccucgucgccuccuccggcacccucgaguucaacaacgaguccuucaacuggaccggcgucacccagaacggcaccuccuccgccugcaagcgccgcuccaacaacuccuucuucucccgccucaacuggcucacccaccucaaguucaaguaccccgcccucaacgucaccaugcccaacaacgagaaguucgacaagcucuacaucuggggcguccaccaccccggcaccgacaacgaccagaucuuccucuacgcccaggccuccggccgcaucaccgucuccaccaagcgcucccagcagaccgucauccccaacaucggcucccgcccccgcguccgcaacauccccucccgcaucuccaucuacuggaccaucgucaagcccggcgacauccuccucaucaacuccaccggcaaccucaucgccccccgcggcuacuucaagauccgcuccggcaaguccuccaucaugcgcuccgacgcccccaucggcaagugcaacuccgagugcaucacccccaacggcuccauccccaacgacaagcccuuccagaacgucaaccgcaucaccuacggcgccugcccccgcuacgucaagcagaacacccucaagcucgccaccggcaugcgcaacguccccgagaagcagacccgcggcaucuucggcgccaucgccggcuucaucgagaacggcugggagggcauggucgacggcugguacggcuuccgccaccagaacuccgagggcaucggccaggccgccgaccucaaguccacccaggccgccaucgaccagaucaacggcaagcucaaccgccucaucggcaagaccaacgagaaguuccaccagaucgagaaggaguucuccgaggucgagggccgcauccaggaccucgagaaguacgucgaggacaccaagaucgaccucugguccuacaacgccgagcuccucgucgcccucgagaaccagcacaccaucgaccucaccgacuccgagaugaacaagcucuucgagcgcaccaagaagcagcuccgcgagaacgccgaggacaugggcaacggcugcuucaagaucuaccacaagugcgacaacgccugcaucggcuccauccgcaacggcaccuacgaccacgacgucuaccgcgacgaggcccucaacaaccgcuuccagaucaagggcgucgagcucaaguccggcuacaaggacuggauccucuggaucuccuucgccaucuccugcuuccuccucugcgucgcccuccucggcuucaucaugugggccugccagaagggcaacauccgcugcaacaucugcaucuga

SEQ ID NO: 97439 - RNA, 1698 nt, Artificial Sequence
  derived and/or modified CDS sequence (opt2) from hemagglutinin__InfluenzaA__ABK39995
augaaggucaagcuccucauccuccucugcaccuucaccgccaccuacgccgacaccaucugcaucggcuaccacgccaacaacuccaccgacaccgucgacaccguccucgagaagaacgucaccgucacccacuccgucaaccuccucgaggacucccacaacggcaagcucugccuccucaagggcaucgccccccuccagcucggcaacugcuccgucgccggcuggauccucggcaaccccgagugcgagcuccucaucuccaaggaguccugguccuacaucgucgagacccccaaccccgagaacggcgccugcuaccccggcuacuucgccgacuacgaggagcuccgcgagcagcucuccuccgucuacuccuucgagcgcuucgagaucuuccccaaggaguccuccuggcccaaccacaccgucaccggcgucuccgccuccugcucccacaacggcaaguccuccuucuaccgcaaccuccucuggcucaccggcaagaacggccucuaccccaaccucuccaaguccuacgccaacaacaaggagaaggagguccucauccucuggggcguccaccacccccccaacaucggcaaccagcgcacccucuaccacaccgagaacgccuacgucuccgucgucuccucccacuacucccgccgcuucacccccgagaucaccaagcgccccaagguccgcgaccaggagggccgcaucaacuacuacuggacccuccucgagcccggcgacaccaucaucuucgaggccaacggcaaccucaucgcccccugguacgccuucgcccucucccgcggcuucggcuccggcaucaucaccuccaacgcccccauggacgagugcgacgccaagugccagaccccccagggcgccaucaacuccucccuccccuuccagaacguccaccccgucaccaucggcgagugccccaaguacguccgcuccgccaagcuccgcauggucaccggccuccgcaacauccccuccauccagucccgcggccucuucggcgccaucgccggcuucaucgagggcggcuggaccggcauggucgacggcugguacggcuaccaccaccagaacgagcagggcuccggcuacgccgccgaccagaaguccacccagaacgccaucaacggcaucaccaacaaggucaacuccgucaucgagaagaugaacacccaguucaccgccgucggcaaggaguucaacaagcucgagcgccgcauggagaaccucaacaagaaggucgacgacggcuuccucgacaucuggaccuacaacgccgagcuccucguccuccucgagaacgagcgcacccucgacuuccacgacuccaacgucaagaaccucuacgagaaggucaagucccagcucaagaacaacgccaaggagaucggcaacggcugcuucgaguucuaccacaagugcaacaacgagugcauggaguccgucaagaacggcaccuacgacuaccccaaguacuccgaggaguccaagcucaaccgcgagaagaucgacggcgucaagcucgacuccaugggcgucuaccagauccucgccaucuacuccaccgucgccuccucccucguccuccucgucucccucggcgccaucuccuucuggaugugcuccaacggcucccuccagugccgcaucugcaucuga

SEQ ID NO: 97440 - RNA, 1701 nt, Artificial Sequence
  derived and/or modified CDS sequence (opt2) from hemagglutinin__InfluenzaA__ABK40017
augaagaccaucaucgcccucuccuacauccucugccucgucuucgcccagaagcuccccggcaacgacaacuccaccgccacccucugccucggccaccacgccguccccaacggcaccaucgucaagaccaucaccaacgaccagaucgaggucaccaacgccaccgagcucguccaguccuccuccaccggcggcaucugcgacuccccccaccagauccucgacggcgagaacugcacccucaucgacgcccuccucggcgacccccagugcgacggcuuccagaacaagaagugggaccucuucgucgagcgcuccaaggccuacuccaacugcuaccccuacgacguccccgacuacgccucccuccgcucccucgucgccuccuccggcacccucgaguucaacaacgaguccuucaacuggaccggcgucacccagaacggcaccuccuccgccugcaagcgccgcuccaacaacuccuucuucucccgccucaacuggcucacccaccucaaguucaaguaccccgcccucaacgucaccaugcccaacaacaagaaguucgacaagcucuacaucuggggcguccaccaccccggcaccgacaacgaccagaucucccucuacgcccaggccuccggccgcaucaccgucuccaccaagcgcucccagcagaccgucauccccaacaucggcucccgcccccgcguccgcgacauccccucccgcaucuccaucuacuggaccaucgucaagcccggcgacauccuccucaucaacuccaccggcaaccucaucgccccccgcggcuacuucaagauccgcuccggcaaguccuccaucaugcgcuccgacgcccccaucggcaagugcaacuccgagugcaucacccccaacggcuccauccccaacgacaagcccuuccagaacgucaaccgcaucaccuacggcgccugcccccgcuacgucaagcagaacacccucaagcucgccaccggcaugcgcaacguccccgagaagcagacccgcggcaucuucggcgccaucgccggcuucaucgagaacggcugggagggcauggucgacggcugguacggcuuccgccaccagaacuccgagggcaucggccaggccgccgaccucaaguccacccaggccgccaucaaccagaucaacggcaagcucaaccgccucaucggcaagaccaacgagaaguuccaccagaucgagaaggaguucuccgaggucgagggccgcauccaggaccucgagaaguacgucgaggacaccaagaucgaccucugguccuacaacgccgagcuccucgucgcccucgagaaccagcacaccaucgaccucaccgacuccgagaugaacaagcucuucgagcgcaccaagaagcagcuccgcgagaacgccgaggacaugggcaacggcugcuucaagaucuaccacaagugcgacaacgccugcaucggcuccauccgcaacggcaccuacgaccacgacgucuaccgcgacgaggcccucaacaaccgcuuccagaucaagggcgucgagcucaaguccggcuacaaggacuggauccucuggaucuccuucgccaucuccugcuuccuccucugcgucgcccuccucggcuucaucaugugggccugccagaagggcaacauccgcugcaacaucugcaucuga

SEQ ID NO: 97441 - RNA, 1701 nt, Artificial Sequence
  derived and/or modified CDS sequence (opt2) from hemagglutinin__InfluenzaA__ABK40028
augaaggccaagcuccucguccuccucugcgccuucaccgccaccuacgccgacaccaucugcaucggcuaccacgccaacaacuccaccgacaccgucgacaccguccucgagaagaacgucaccgucacccacuccgucaaccuccucgaggacucccacaacggcaagcucugccgccucaagggcaccgccccccuccagcucggcaacugcuccaucgccggcuggauccucggcaaccccgagugcgagucccucuucuccaaggaguccugguccuacaucgccgagacccccaaccccaagaacggcaccugcuaccccggcuacuucgccgacuacgaggagcuccgcgagcagcucuccuccgucuccuccuucgagcgcuucgagaucuuccccaaggacuccuccuggcccaaccacaccgucaccaagggcgucaccgccuccugcucccacaacggcaaguccuccuucuacaagaaccuccucuggcucaccgagaagaacggccucuaccccaaccucuccaaguccuacgucaacaagaagggcaaggagguccucguccucuggggcguccaccaccccuccaacaugggcgaccagcgcgccaucuaccacaaggagaacgccuacgucaccguccucuccucccacuacucccgccgcuucacccccgagaucgcccgccgccccaagguccgcgaccaggagggccgcaucaacuacuacuggacccuccucgagcccggcgacaccaucaucuucgaggccaacggcaaccucaucgcccccugguacgccuucgcccucucccgcggcuucggcuccggcaucaucaucuccaacgccuccaugggcgagugcgacgccaagugccagaccccccagggcgccaucaacuccucccuccccuuccagaacguccaccccgucaccaucggcgagugccccaaguacguccgcuccaccaagcuccgcauggucaccggccuccgcaacguccccuccauccagucccgcggccucuucggcgccaucgccggcuucaucgagggcggcuggaccggcaugaucgacggcugguacggcuaccaccaccagaacgagcagggcuccggcuacgccgccgaccagaaguccacccagaacgccaucaacggcaucaccaacaaggucaacuccaucaucgagaagaugaacacccaguucaccgccgucggcaaggaguucaacaagcucgagcgccgcauggagaaccucaacaagaaggucgacgacggcuuccucgacaucuggaccuacaacgccgagcuccucguccuccucgagaacgagcgcacccucgacuuccacgacuccaacgucaagaaccucuacgagaaggucaagaaccagcucaagaacaacgccaaggagaucggcaacggcugcuucgaguucuaccacaagugcaacaacgagugcauggaguccgucaagaacggcaccuacgacuaccccaaguacuccaaggaguccaagcucaaccgcgagaagaucgacggcgucaagcucgaguccaugggcgucuaccagauccucgccaucuacuccaccgucgccuccucccucguccuccucgucucccucggcgccaucuccuucuggaugugcuccaacggcucccuccagugccgcaucugcaucuga

SEQ ID NO: 97442 - RNA, 1701 nt, Artificial Sequence; identical to SEQ ID NO: 97423
  derived and/or modified CDS sequence (opt2) from hemagglutinin__InfluenzaA__ABK40039

SEQ ID NO: 97443 - RNA, 1701 nt, Artificial Sequence; identical to SEQ ID NO: 97423
  derived and/or modified CDS sequence (opt2) from hemagglutinin__InfluenzaA__ABK40050

SEQ ID NO: 97444 - RNA, 1701 nt, Artificial Sequence; identical to SEQ ID NO: 96686
  derived and/or modified CDS sequence (opt2) from hemagglutinin__InfluenzaA__ABK40061

SEQ ID NO: 97445 - RNA, 1701 nt, Artificial Sequence; identical to SEQ ID NO: 96686
  derived and/or modified CDS sequence (opt2) from hemagglutinin__InfluenzaA__ABK40075

SEQ ID NO: 97446 - RNA, 1701 nt, Artificial Sequence; identical to SEQ ID NO: 96957
  derived and/or modified CDS sequence (opt2) from hemagglutinin__InfluenzaA__ABK40510

SEQ ID NO: 97447 - RNA, 1701 nt, Artificial Sequence; identical to SEQ ID NO: 96957
  derived and/or modified CDS sequence (opt2) from hemagglutinin__InfluenzaA__ABK40534

SEQ ID NO: 97448 - RNA, 1701 nt, Artificial Sequence
  derived and/or modified CDS sequence (opt2) from hemagglutinin__InfluenzaA__ABK40546
augaaggccaagcuccucguccuccucugcgcccucuccgccaccgacgccgacaccaucugcaucggcuaccacgccaacaacuccaccgacaccgucgacaccguccucgagaagaacgucaccgucacccacuccgucaaccuccucgaggacaaccacaacggcaagcucugcaagcucaagggcaucgccccccuccagcucggcaagugcuccaucgccggcuggauccucggcaaccccgagugcgagucccucuucuccaacaaguccugguccuacaucgccgagacccccaacuccgagaacggcaccugcuaccccggcuacuucgccgacuacgaggagcuccgcgagcagcucuccuccgucuccuccuucgagcgcuucgagaucuuccccaaggaguccuccuggcccaagcacaacgucaccaagggcgucaccgccuccugcucccacaagggcaaguccuccuucuaccgcaaccuccucuggcucaccgagaagaacggcuccuaccccaaccucuccaaguccuacgucaacaacaaggagaaggagguccucguccucuggggcguccaccaccccuccaacaucgaggaccagaagaccaucuaccgcaaggagaacgccuacgucuccgucgucuccucccacuacaaccgccgcuucacccccgagaucgccaagcgccccaagguccgcaaccaggagggccgcaucaacuacuacuggacccuccucgagcccggcgacaccaucaucuucgaggccaacggcaaccucaucgcccccugguacgccuucgcccucucccgcggcuucggcuccggcaucaucaccuccaacgccuccauggacgagugcgacgccaagugccagaccccccagggcgccaucaacuccucccuccccuuccagaacguccaccccgucaccaucggcgagugccccaaguacguccgcuccaccaagcuccgcauggucaccggccuccgcaacauccccuccauccagucccgcggccucuucggcgccaucgccggcuucaucgagggcggcuggaccggcaugaucgacggcugguacggcuaccaccaccagaacgagcagggcuccggcuacgccgccgaccagaaguccacccagaacgccaucaacggcaucaccaacaaggucaacuccaucaucgagaagaugaacacccaguucaccgccgucggcaaggaguucaacaagcucgagaagcgcauggagaaccucaacaagaaggucgacgacggcuuccucgacaucuggaccuacaacgccgagcuccucguccuccucgagaacgagcgcacccucgacuuccacgacuccaacgucaagaaccucuacgagaaggucaagucccagcucaagaacaacgccaaggagaucggcaacggcugcuucgaguucuaccacaagugcaacaacgagugcauggaguccgucaagaacggcaccuacgacuaccccaaguacuccgaggaguccaagcucaaccgcgagaagaucgacggcgucaagcucgaguccaugggcgucuaccagauccucgccaucuacuccaccgucgccuccucccucguccuccucgucucccucggcgccaucuccuucuggaugugcuccaacggcucccuccagugccgcaucugcaucuga

SEQ ID NO: 97449 - RNA, 1701 nt, Artificial Sequence; identical to SEQ ID NO: 96957
  derived and/or modified CDS sequence (opt2) from hemagglutinin__InfluenzaA__ABK40557

SEQ ID NO: 97450 - RNA, 1701 nt, Artificial Sequence; identical to SEQ ID NO: 96957
  derived and/or modified CDS sequence (opt2) from hemagglutinin__InfluenzaA__ABK40568

SEQ ID NO: 97451 - RNA, 1701 nt, Artificial Sequence; identical to SEQ ID NO: 96957
  derived and/or modified CDS sequence (opt2) from hemagglutinin__InfluenzaA__ABK40579

SEQ ID NO: 97452 - RNA, 1701 nt, Artificial Sequence
  derived and/or modified CDS sequence (opt2) from hemagglutinin__InfluenzaA__ABK40590
augaaggccaagcuccucguccuccucugcgcccucuccgccaccgacgccgacaccaucugcaucggcuaccacgccaacaacuccaccgacaccgucgacaccguccucgagaagaacgucaccgucacccacuccgucaaccuccucgaggacaaccacaacggcaagcucugcaagcucaagggcaucgccccccuccagcucggcaagugcuccaucgccggcuggauccucggcaaccccgagugcgagucccucuucuccaagaaguccugguccuacaucgccgagacccccaacuccgagaacggcaccugcuaccccggcuacuucgccgacuacgaggagcuccgcgagcagcucuccuccgucuccuccuucgagcgcuucgagaucuuccccaaggaguccuccuggcccaagcacaacgucaccaagggcgucaccgccuccugcucccacaagggcaaguccuccuucuaccgcaaccuccucuggcucaccgagaagaacggcuccuaccccaaccucuccaaguccuacgucaacaacaaggagaaggagguccucguccucuggggcguccaccaccccuccaacaucgaggaccagaagaccaucuaccgcaaggagaacgccuacgucuccgucgucuccucccacuacaaccgccgcuucacccccgagaucgccaagcgccccaagguccgcaaccaggagggccgcaucaacuacuacuggacccuccucgagcccggcgacaccaucaucuucgaggccaacggcaaccucaucgcccccugguacgccuucgcccucucccgcggcuucggcuccggcaucaucaccuccaacgccuccauggacgagugcgacgccaagugccagaccccccagggcgccaucaacuccucccuccccuuccagaacguccaccccgucaccaucggcgagugccccaaguacguccgcuccaccaagcuccgcauggucaccggccuccgcaacauccccuccauccagucccgcggccucuucggcgccaucgccggcuucaucgagggcggcuggaccggcaugaucgacggcugguacggcuaccaccaccagaacgagcagggcuccggcuacgccgccgaccagaaguccacccagaacgccaucaacggcaucaccaacaaggucaacuccaucaucgagaagaugaacacccaguucaccgccgucggcaaggaguucaacaagcucgagaagcgcauggagaaccucaacaagaaggucgacgacggcuuccucgacaucuggaccuacaacgccgagcuccucguccuccucgagaacgagcgcacccucgacuuccacgacuccaacgucaagaaccucuacgagaaggucaagaaccagcucaagaacaacgccaaggagaucggcaacggcugcuucgaguucuaccacaagugcaacaacgagugcauggaguccgucaagaacggcaccuacgacuaccccaaguacuccgaggaguccaagcucaaccgcgagaagaucgacggcgucaagcucgaguccaugggcgucuaccagauccucgccaucuacuccaccgucgccuccucccucguccuccucgucucccucggcgccaucuccuucuggaugugcuccaacggcucccuccagugccgcaucugcaucuga

SEQ ID NO: 97453 - RNA, 1701 nt, Artificial Sequence; identical to SEQ ID NO: 96957
  derived and/or modified CDS sequence (opt2) from hemagglutinin__InfluenzaA__ABK40601

SEQ ID NO: 97454 - RNA, 1701 nt, Artificial Sequence; identical to SEQ ID NO: 96686
  derived and/or modified CDS sequence (opt2) from hemagglutinin__InfluenzaA__ABK40612

SEQ ID NO: 97455 - RNA, 1701 nt, Artificial Sequence
  derived and/or modified CDS sequence (opt2) from hemagglutinin__InfluenzaA__ABK40623
augaagaccaucaucgcccucuccuacauccucugccucgucuucgcccagaagcuccccgucaacgacaacuccaccgccacccucugccucggccaccacgccguccccaacggcacccucgucaagaccaucaccaacgaccacaucgaggucaccaacgccaccgagcucguccaguccuccuccaccggccgcaucugcgacuccccccaccagauccucgacggcgagaacugcacccucaucgacgcccuccucggcgacccccacugcgacggcuuccagaacaaggagugggaccucuucgucgagcgcuccaccgccuacuccaacugcuaccccuacgacguccccgacuacgccucccuccgcucccucgucgccuccuccggcacccucgaguucaacaacgaguccuucaacuggaccggcgucgcccagaacggcaccuccuccgccugcaagcgccgcuccaucaaguccuucuucucccgccucaacuggcuccaccagcucaaguacaaguaccccgcccucaacgucaccaugcccaacaacgagaaguucgacaagcucuacaucuggggcguccaccaccccuccaccgacuccgaccagaucucccucuacgcccaggccuccggccgcgucaccgucuccaccaagcgcucccagcagaccgucauccccaacaucggcucccgccccuggguccgcggcgucuccucccgcaucuccaucuacuggaccaucgucaagcccggcgacauccuccucaucaacuccaccggcaaccucaucgccccccgcggcuacuucaagauccgcuccggcaaguccuccaucaugcgcuccaacgcccccaucggcaagugcaacuccgagugcaucacccccaacggcuccauccccaacgacaagcccuuccagaacgucaaccgcaucgccuacggcgccugcccccgcuacgucaagcagaacacccucaagcucgccaccggcaugcgcaacguccccgagaagcagacccgcggcaucuucggcgccaucgccggcuucaucgagaacggcugggagggcauggucgacggcugguacggcuuccgccaccucaacuccgagggcaccggccaggccgccgaccucaaguccacccaggccgccaucaaccagaucaacggcaagcucaaccgccucaucgagaagaccaacgagaaguuccaccagaucgagaaggaguucuccgaggucgagggccgcauccaggaccucgagaaguacgucaaggacaccaagaucgaccucugguccuacaacgccgagcuccucgucgcccucgagaaccagcacaccaucgaccucaccgacuccgagaugaacaagcucuucgagcgcacccgcaagcagcuccgcgagaacgccgaggacgucggcaacggcugcuucaagaucuaccacaagugcgacaacgccugcaucggcuccauccgcaacggcaccuacgaccacgacgucuaccgcgacgaggcccucaacaaccgcuuccagaucaagggcgucgagcucaaguccggcuacaaggacuggauccucuggaucuccuucgccaucuccugcuuccuccucugcgucguccuccucggcuucaucaugugggccugccagaagggcaacauccgcugcaacaucugcaucuga

SEQ ID NO: 97456 - RNA, 1701 nt, Artificial Sequence; identical to SEQ ID NO: 97020
  derived and/or modified CDS sequence (opt2) from hemagglutinin__InfluenzaA__ABK40645

SEQ ID NO: 97457 - RNA, 1701 nt, Artificial Sequence
  derived and/or modified CDS sequence (opt2) from hemagglutinin__InfluenzaA__ABK40656
augaagaccaucaucgcccucuccuacauccucugccucgucuucgcccagaagcuccccggcaacgacaacuccaccgccacccucugccucggccaccacgccguccccaacggcacccucgucaagaccaucaccaacgaccagaucgaggucaccaacgccaccgagcucguccaguccucccccaccggccgcaucugcgacuccccccaccgcauccucgacggcaagaacugcacccucaucgacgcccuccucggcgacccccacugcgacggcuuccagaacaaggagugggaccucuucgucgagcgcuccaaggccuacuccaacugcuaccccuacgacguccccgacuacgccucccuccgcucccucgucgccuccuccggcacccucgaguucaccaacgagaacuucaacuggaccggcgucgcccaggacggcaaguccuacuccugcaagcgcggcuccgucaacuccuucuucucccgccucaacuggcuccacaagcucgaguacaaguaccccgcccucaacgucaccaugcccaacaacggcaaguucgacaagcucuacaucuggggcguccaccaccccuccaccgacuccgaccagaccucccucuacguccgcgccuccggcaaggucaccgucuccaccaagcgcucccagcagaccgucauccccgacaucggcuaccgccccuggguccgcggccucuccucccgcaucuccaucuacuggaccaucgucaagcccggcgacauccuccucaucaacuccaccggcaaccucaucgccccccgcggcuacuucaagauccgcaacggcaaguccuccaucaugcgcuccgacgcccccaucggcaacugcuccuccgagugcaucacccccaacggcuccauccccaacgacaagcccuuccagaacgucaaccgcaucaccuacggcaccugcccccgcuacgucaagcagaacacccucaagcucgccaccggcaugcgcaacguccccgagaagcagacccgcggcaucuucggcgccaucgccggcuucaucgagaacggcugggagggcauggucgacggcugguacggcuuccgccaccagaacuccgagggcaccggccaggccgccgaccucaaguccacccaggccgccaucgaccagaucaacggcaagcucaaccgccucgucgagaagaccaacgagaaguuccaccagaucgagaaggaguucuccgaggucgagggccgcauccaggaccucgagaaguacgucgaggacaccaagaucgaccucugguccuacaacgccgagcuccucgucgcccucgagaaccagcacaccaucgaccucaccgacuccgagaugaacaagcucuucgagcgcacccgcaagcagcuccgcgagaacgccgaggacaugggcaacggcugcuucaagaucuaccacaagugcgacaacgccugcaucggcuccauccgcaacggcaccuacgaccacgacgucuaccgcgacgaggcccucaacaaccgcuuccagaucaagggcgucgagcucaaguccggcuacaaggacuggauccucuggaucuccuucgccaucuccugcuuccuccucugcgucguccuccucggcuucaucaugugggccugccagaagggcaacauccgcugcaacaucugcaucuga

SEQ ID NO: 97458 - RNA, 1701 nt, Artificial Sequence
  derived and/or modified CDS sequence (opt2) from hemagglutinin__InfluenzaA__ABK40667
augaagaccaucaucgcccucuccuacauccucugccucgucuucgcccagaagcuccccggcaacgacaacuccaccgccacccucugccucggccaccacgccguccccaacggcacccucgucaagaccaucaccaacgaccagaucgaggucaccaacgccaccgagcucguccaguccuccuccaccggccgcaucugcgacuccccccaccgcauccucgacggcaagaacugcacccucaucgacgcccuccucggcgacccccacugcgacggcuuccagaacaaggagugggaccucuucgucgagcgcuccaaggccuacuccaacugcuaccccuacgacguccccgacuacgccucccuccgcucccucgucgccuccuccggcacccucgaguucaccaacgagggcuucaacuggaccggcgucgcccaggacggcaaguccuacgccugcaagcgcggcuccgucaacuccuucuucucccgccucaacuggcuccacaagcucgaguacaaguaccccgcccucaacgucaccaugcccaacaacgacaaguucgacaagcucuacaucuggggcguccaccaccccuccaccgacuccgaccagaccucccucuacguccaggccuccggccgcgucaccgucuccaccaagcgcucccagcagaccgucauccccaacaucggcucccgccccuggguccgcggcaucuccucccgcaucuccaucuacuggaccaucgucaagcccggcgacauccuccucaucaacuccaccggcaaccucaucgccccccgcggcuacuucaagcuccgcaacggcaaguccuccaucaugcgcuccgacgcccccaucgacaacugcaacuccgagugcaucacccccaacggcuccauccccaacgacaagcccuuccagaacgucaaccgcaucaccuacggcgccugcccccgcuacgucaagcagaacacccucaagcucgccaccggcaugcgcaacguccccgagaagcagacccgcggcaucuucggcgccaucgccggcuucaucgagaacggcugggagggcauggucgacggcugguacggcuuccgccaccagaacuccgagggcaccggccaggccgccgaccucaaguccacccaggccgccaucgaccagaucaacggcaagcucaaccgccucaccgagaagaccaacgagaaguuccaccagaucgagaaggaguucuccgaggucgagggccgcauccaggaccucgagaaguacgucgaggacaccaagaucgaccucugguccuacaacgccgagcuccucgucgcccucgagaaccagcacaccaucgaccucaccgacuccgagaugaacaagcucuucgagcgcacccgcaagcagcuccgcgagaacgccgaggacaugggcaacggcugcuucaagaucuaccacaagugcgacaacgccugcaucggcuccauccgcaacggcaccuacaaccacgacgucuaccgcgacgaggcccucaacaaccgcuuccagaucaagggcgucgagcucaaguccggcuacaaggacuggauccucuggaucuccuucgccaucuccugcuuccuccucugcgucguccuccucggcuucaucaugugggccugccagaagggcaacauccgcugcaacaucugcaucuga

SEQ ID NO: 97459 - RNA, 1701 nt, Artificial Sequence; identical to SEQ ID NO: 97102
  derived and/or modified CDS sequence (opt2) from hemagglutinin__InfluenzaA__ABK40678

SEQ ID NO: 97460 - RNA, 1698 nt, Artificial Sequence
  derived and/or modified CDS sequence (opt2) from hemagglutinin__InfluenzaA__ABK40689
augaaggucaagcuccucguccuccucugcaccuucaccgccaccuacgccgacaccaucugcaucggcuaccacgccaacaacuccaccgacaccgucgacaccguccucgagaagaacgucaccgucacccacuccgucaaccuccucgaggacucccacaacggcaagcucugccuccucaagggcaucgccccccuccagcucggcaacugcuccgucgccggcuggauccucggcaaccccgagugcgagcuccucaucuccaaggaguccugguccuacaucgucgagacccccaaccccgagaacggcaccugcuaccccggcuacuucgccgacuacgaggagcuccgcgagcagcucuccuccgucuccuccuucgagcgcuucgagaucuuccccaaggaguccuccuggcccaaccacaccgucaccggcgucuccgccuccugcucccacaacggcaaguccuccuucuaccgcaaccuccucuggcucaccggcaagaacggccucuaccccaaccucuccaaguccuacgccaacaacaaggagaaggagguccucguccucuggggcguccaccacccccccaacaucggcaaccagcgcgcccucuaccacaccgagaacgccuacgucuccgucgucuccucccacuacucccgccgcuucacccccgagaucgccaagcgccccaagguccgcgaccaggagggccgcaucaacuacuacuggacccuccucgagcccggcgacaccaucaucuucgaggccaacggcaaccucaucgccccccgcuucgccuucgcccucucccgcggcuucggcuccggcaucaucaccuccaacgcccccauggacgagugcgacgccaagugccagaccccccagggcgccaucaacuccucccuccccuuccagaacguccaccccgucaccaucggcgagugccccaaguacguccgcuccgccaagcuccgcauggccaccggccuccgcaacauccccuccauccagucccgcggccucuucggcgccaucgccggcuucaucgagggcggcuggaccggcauggucgacggcugguacggcuaccaccaccagaacgagcagggcuccggcuacgccgccgaccagaaguccacccagaacgccaucaacggcaucaccaacaaggucaacuccgucaucgagaagaugaacacccaguucaccgccgucggcaaggaguucuccaagcucgagcgccgcauggagaaccucaacaagaaggucgacgacggcuuccucgacaucuggaccuacaacgccgagcuccucguccuccucgagaacgagcgcacccucgacuuccacgacuccaacgucaagaaccucuacgagaaggucaagucccagcucaagaacaacgccaaggagaucggcaacggcugcuucgaguucuaccacaagugcaacgacgagugcauggaguccgucaagaacggcaccuacgacuaccccaaguacuccgaggaguccaagcucaaccgcgagaagaucgacggcgucaagcucgaguccaugggcgucuaccagauccucgccaucuacuccaccgucgccuccucccucguccuccucgucucccucggcgccaucuccuucuggaugugcuccaacggcucccuccagugccgcaucugcaucuga

SEQ ID NO: 97461 - RNA, 1701 nt, Artificial Sequence; identical to SEQ ID NO: 96686
  derived and/or modified CDS sequence (opt2) from hemagglutinin__InfluenzaA__ABK40700

SEQ ID NO: 97462 - RNA, 1701 nt, Artificial Sequence; identical to SEQ ID NO: 96686
  derived and/or modified CDS sequence (opt2) from hemagglutinin__InfluenzaA__ABK40711

SEQ ID NO: 97463 - RNA, 1701 nt, Artificial Sequence
  derived and/or modified CDS sequence (opt2) from hemagglutinin__InfluenzaA__ABK40722
augaagaccaucaucgcccucuccuacauccucugccucgucuucgcccagaagcuccccggcaacgacaacuccaccgccacccucugccucggccaccacgccguccccaacggcacccucgucaagaccaucaccaacgaccagaucgaggucaccaacgccaccgagcucguccaguccuccuccaccggcggcaucugcgacuccccccaccagauccucgacggcgagaacugcacccucaucgacgcccuccucggcgacccccacugcgacggcuuccagaacaaggagugggaccucuucgucgagcgcuccaaggccuacuccaacugcuaccccuacgacguccccgacuacgccucccuccgcucccucgucgccuccuccggcacccucgaguucaacaacgaguccuucaacuggaccggcgucgcccagaacggcaccuccuccgccugcaagcgccgcuccaacaaguccuucuucucccgccucaacuggcuccaccagcucaaguacaaguaccccgcccucaacgucaccaugcccaacaacgagaaguucgacaagcucuacaucuggggcguccaccaccccuccaccgacaacgaccagaucucccucuacgcccaggcccccggccgcgucaccgucuccaccaagcgcucccagcagaccgucauccccaacaucggcucccgccccuggguccgcggcgucuccucccgcaucuccaucuacuggaccaucgucaagcccggcgacauccuccucaucaacugcaccggcaaccucaucgccccccgcggcuacuucaagauccgcuccggcaaguccuccaucaugcgcuccgacgccuccaucggcaagugcaacuccgagugcaucacccccaacggcuccauccccaacgacaagcccuuccagaacgucaaccgcaucaccuacggcgccugcccccgcuacgucaagcagaacacccucaagcucgccaccggcaugcgcaacguccccgagaagcagacccgcggcaucuucggcgccaucgccggcuucaucgagaacggcugggagggcauggucgacggcugguacggcuuccgccaccagaacuccgagggcaccggccaggccgccgaccucaaguccacccaggccgccaucaaccagaucaacggcaagcucaaccgccucaucgagaagaccaacgagaaguuccaccagaucgagaaggaguucuccgaggucgagggccgcauccaggaccucgagaaguacgucgaggacaccaagaucgaccucugguccuacaacgccgagcuccucgucgcccucgagaaccagcacaccaucgaccucaccgacuccgagaugaacaagcucuucgagcgcaccaagaagcagcuccgcgagaacgccgaggacaugggcaacggcugcuucaagaucuaccacaagugcgacaacgccugcaucggcuccauccgcaacggcaccuacgaccacgacgucuaccgcgacgaggcccucaacaaccgcuuccagaucaagggcgucgagcucaaguccggcuacaaggacuggauccucuggaucuccuucgccaucuccugcuuccuccucugcgucguccuccucggcuucaucaugugggccugccagaagggcaacauccgcugcaacaucugcaucuga

SEQ ID NO: 97464 - RNA, 1701 nt, Artificial Sequence; identical to SEQ ID NO: 96686
  derived and/or modified CDS sequence (opt2) from hemagglutinin__InfluenzaA__ABK40733

SEQ ID NO: 97465 - RNA, 1701 nt, Artificial Sequence; identical to SEQ ID NO: 97341
  derived and/or modified CDS sequence (opt2) from hemagglutinin__InfluenzaA__ABK40744

SEQ ID NO: 97466 - RNA, 1701 nt, Artificial Sequence; identical to SEQ ID NO: 96951
  derived and/or modified CDS sequence (opt2) from hemagglutinin__InfluenzaA__ABK79948

SEQ ID NO: 97467 - RNA, 1698 nt, Artificial Sequence; identical to SEQ ID NO: 97240
  derived and/or modified CDS sequence (opt2) from hemagglutinin__InfluenzaA__ABK79959

SEQ ID NO: 97468 - RNA, 1701 nt, Artificial Sequence
  derived and/or modified CDS sequence (opt2) from hemagglutinin__InfluenzaA__ABK79970
augaaggccaagcuccucguccuccucugcgccuucaccgccaccuacgccgacaccaucugcaucggcuaccacgccaacaacuccaccgacaccgucgacaccguccucgagaagaacgucaccgucacccacuccgucaaccuccucgaggacucccacaacggcaagcucugccgccucaagggcaccgccccccuccagcucggcaacugcuccaucgccggcuggauccucggcaaccccgagugcgagucccucuucuccaagaaguccugguccuacaucgccgagacccccaaccccaagaacggcaccugcuaccccggcuacuucgccgacuacgaggagcuccgcgagcagcucuccuccgucuccuccuucgagcgcuucgagaucuuccccaaggacuccuccuggcccaaccacaccgucaccaagggcgucaccgccuccugcucccacaacggcaaguccuccuucuacaagaaccuccucuggcucaccgagaagaacggccucuaccccaaccucuccaaguccuacgucaacaagaagggcaaggagguccucguccucuggggcguccaccaccccuccaacaugggcgaccagcgcgccaucuaccacaaggagaacgccuacgucuccguccucuccucccacuacucccgccgcuucacccccgagaucgcccgccgccccaagguccgcgaccaggagggccgcaucaacuacuacuggacccuccucgagcccggcgacaccaucaucuucgaggccaacggcaaccucaucgcccccugguacgccuucgcccucucccgcggcuucggcuccggcaucaucaucuccaacgccuccaugggcgagugcgacgccaagugccagaccccccagggcgccaucaacuccucccuccccuuccagaacguccaccccgucaccaucggcgagugccccaaguacguccgcuccaccaagcuccgcauggucaccggccuccgcaacguccccuccauccagucccgcggccucuucggcgccaucgccggcuucaucgagggcggcuggaccggcaugaucgacggcugguacggcuaccaccaccagaacgagcagggcuccggcuacgccgccgaccagaaguccacccagaacgccaucaacggcaucaccaacaaggucaacuccaucaucgagaagaugaacacccaguucaccgccgucggcaaggaguucaacaagcucgagcgccgcauggagaaccucaacaagaaggucgacgacggcuuccucgacaucuggaccuacaacgccgagcuccucguccuccucgagaacgagcgcacccucgacuuccacgacuccaacgucaagaaccucuacgagaaggucaagaaccagcucaagaacaacgccaaggagaucggcaacggcugcuucgaguucuaccacaagugcaacaacgagugcauggaguccgucaagaacggcaccuacgacuaccccaaguacuccaaggaguccaagcucaaccgcgagaagaucgacggcgucaagcucgaguccaugggcgucuaccagauccucgccaucuacuccaccgucgccuccucccucguccuccucgucucccucggcgccaucuccuucuggaugugcuccaacggcucccuccagugccgcaucugcaucuga

SEQ ID NO: 97469 - RNA, 1701 nt, Artificial Sequence
  derived and/or modified CDS sequence (opt2) from hemagglutinin__InfluenzaA__ABK79981
augaagaccaucaucgcccucuccuacauccucugccucgucuucacccagaagcuccccggcaacgacaacuccaccgccacccucugccucggccaccacgccguccccaacggcacccucgucaagaccaucaccaacgaccagaucgaggucaccaacgccaccgagcucguccaguccuccuccaccggcggcaucugcgacuccccccaccagauccucgacggcgagaacugcacccucaucgacgcccuccucggcgacccccacugcgacggcuuccagaacaaggagugggaccucuucgucgagcgcuccaaggccuacuccaacugcuaccccuacgacguccccgacuacgccucccuccgcucccucgucgccuccuccggcacccucgaguucaacaacgaguccuucaacuggaccggcgucgcccagaacggcaccuccuccgccugcaagcgccgcuccaacaaguccuucuucucccgccucaacuggcuccaccagcucaaguacaaguaccccgcccucaacgucaccaugcccaacaacgagaaguucgacaagcucuacaucuggggcguccaccaccccuccaccgacuccgaccagaucucccucuacgcccaggcccccggccgcgucaccgucuccaccaagcgcucccagcagaccgucauccccaacaucggcucccgccccuggguccgcggcgucuccucccgcaucuccaucuacuggaccaucgucaagcccggcgacauccuccucaucaacugcaccggcaaccucaucgccccccgcggcuacuucaagauccgcuccggcaaguccuccaucaugcgcuccgacgccuccaucggcaagugcaacuccgagugcaucacccccaacggcuccauccccaacgacaagcccuuccagaacgucaaccgcaucaccuacggcgccugcccccgcuacgucaagcagaacacccucaagcucgccaccggcaugcgcaacguccccgagaagcagacccgcggcaucuucggcgccaucgccggcuucaucgagaacggcugggagggcauggucgacggcugguacggcuuccgccaccagaacuccgagggcaccggccaggccgccgaccucaaguccacccaggccgccaucaaccagaucaacggcaagcucaaccgccucaucgagaagaccaacgagaaguuccaccagaucgagaaggaguucuccgaggucgagggccgcauccaggaccucgagaaguacgucgaggacaccaagaucgaccucugguccuacaacgccgagcuccucgucgcccucgagaaccagcacaccaucgaccucaccgacuccgagaugaacaagcucuucgagcgcaccaagaagcagcuccgcgagaacgccgaggacaugggcaacggcugcuucaagaucuaccacaagugcgacaacgccugcaucggcuccauccgcaacggcaccuacgaccacgacgucuaccgcgacgaggcccucaacaaccgcuuccagaucaagggcgucgagcucaaguccggcuacaaggacuggauccucuggaucuccuucgccaucuccugcuuccuccucugcgucguccuccucggcuucaucaugugggccugccagaagggcaacauccgcugcaacaucugcaucuga

SEQ ID NO: 97470 - RNA, 1701 nt, Artificial Sequence; identical to SEQ ID NO: 96686
  derived and/or modified CDS sequence (opt2) from hemagglutinin__InfluenzaA__ABK79992

SEQ ID NO: 97471 - RNA, 1701 nt, Artificial Sequence; identical to SEQ ID NO: 96957
  derived and/or modified CDS sequence (opt2) from hemagglutinin__InfluenzaA__ABK80025

SEQ ID NO: 97472 - RNA, 1701 nt, Artificial Sequence; identical to SEQ ID NO: 96957
  derived and/or modified CDS sequence (opt2) from hemagglutinin__InfluenzaA__ABK80036

SEQ ID NO: 97473 - RNA, 1701 nt, Artificial Sequence; identical to SEQ ID NO: 96957
  derived and/or modified CDS sequence (opt2) from hemagglutinin__InfluenzaA__ABK80047

SEQ ID NO: 97474 - RNA, 1701 nt, Artificial Sequence; identical to SEQ ID NO: 96802
  derived and/or modified CDS sequence (opt2) from hemagglutinin__InfluenzaA__ABK80058

SEQ ID NO: 97475 - RNA, 1701 nt, Artificial Sequence
  derived and/or modified CDS sequence (opt2) from hemagglutinin__InfluenzaA__ABK80069
augaagaccaucaucgcccucuccuacauccucugccucgucuucgcccagaagcuccccgucaacgacaacuccaccgccacccucugccucggccaccacgccguccccaacggcacccucgucaagaccaucaccaacgaccacaucgaggucaccaacgccaccgagcucguccaguccuccuccaccggccgcaucugcgacuccccccaccagauccucgacggcgagaacugcacccucaucgacgcccuccucggcgacccccacugcgacggcuuccagaacaaggagugggaccucuucgucgagcgcuccaccgccuacuccaacugcuaccccuacgacguccccgacuacgccucccuccgcucccucgucgccuccuccggcacccucgaguucaacaacgaguccuucaacuggaccggcgucgcccagaacggcaccuccuccgccugcaagcgccgcuccaucaaguccuucuucucccgccucaacuggcuccaccagcucaaguacaaguaccccgcccucaacgucaccaugcccaacaacgagaaguucgacaagcucuacaucuggggcguccaccaccccuccaccgacuccgaccagaucucccucuacgcccaggccuccggccgcgucaccgucuccaccaagcgcucccagcagaccgucauccccaacaucggcucccgccccuggauccgcggcgucuccucccgcaucuccaucuacuggaccaucgucaagcccggcgacauccuccucaucaacuccaccggcaaccucaucgccccccgcggcuacuucaagauccgcuccggcaaguccuccaucaugcgcuccaacgcccccaucggcaagugcaacuccgagugcaucacccccaacggcuccauccccaacgacaagcccuuccagaacgucaaccgcaucgccuacggcgccugcccccgcuacgucaagcagaacacccucaagcucgccaccggcaugcgcaacguccccgagaagcagacccgcggcaucuucggcgccaucgccggcuucaucgagaacggcugggagggcauggucgacggcugguacggcuuccgccaccucaacuccgagggcaccggccaggccgccgaccucaaguccacccaggccgccaucaaccagaucaacggcaagcucaaccgccucaucgagaagaccaacgagaaguuccaccagaucgagaaggaguucuccgaggucgagggccgcauccaggaccucgagaaguacgucgaggacaccaagaucgaccucugguccuacaacgccgagcuccucgucgcccucgagaaccagcacaccaucgaccucaccgacuccgagaugaacaagcucuucgagcgcacccgcaagcagcuccgcgagaacgccgaggacgucggcaacggcugcuucaagaucuaccacaagugcgacaacgccugcaucggcuccauccgcaacggcaccuacgaccacgacgucuaccgcgacgaggcccucaacaaccgcuuccagaucaagggcgucgagcucaaguccggcuacaaggacuggauccucuggaucuccuucgccaucuccugcuuccuccucugcgucguccuccucggcuucaucaugugggccugccagaagggcaacauccgcugcaacaucugcaucuga

SEQ ID NO: 97476 - RNA, 1701 nt, Artificial Sequence
  derived and/or modified CDS sequence (opt2) from hemagglutinin__InfluenzaA__ABK80080
augaagaccaucaucgcccucuccuacauccucugccucgucuucgcccagaagcuccccgucaacgacaacuccaccgccacccucugccucggccaccacgccguccccaacggcacccucgucaagaccaucaccaacgaccacaucgaggucaccaacgccaccgagcucguccaguccuccuccaccggccgcaucugcgacuccccccaccagauccucgacggcgagaacugcacccucaucgacgcccuccucggcgacccccacugcgacggcuuccagaacaaggagugggaccucuucgucgagcgcuccaccgccuacuccaacugcuaccccuacgacguccccgacuacgccucccuccgcucccucgucgccuccuccggcacccucgaguucaacaacgaguccuucaacuggaccggcgucgcccagaacggcaccuccuccgccugcaagcgccgcuccaucaaguccuucuucucccgccucaacuggcuccaccagcucaaguacaaguaccccgcccucaacgucaccaugcccaacaacgagaaguucgacaagcucuacaucuggggcguccaccaccccuccaccgacuccgaccagaucucccucuacgcccaggccuccggccgcgucaccgucuccaccaagcgcucccagcagaccgucauccccaacaucggcucccgccccuggguccgcggcgucuccucccgcaucuccaucuacuggaccaucgucaagcccggcgacauccuccucaucaacuccaccggcaaccucaucgccccccgcggcuacuucaagauccgcuccggcaaguccuccaucaugcgcuccaacgcccccaucggcaagugcaacuccgagugcaucacccccaacggcuccauccccaacgacaagcccuuccagaacgucaaccgcaucaccuacggcgccugcccccgcuacgucaagcagaacacccucaagcucgccaccggcaugcgcaacguccccgagaagcagacccgcggcaucuucggcgccaucgccggcuucaucgagaacggcugggagggcauggucgacggcugguacggcuuccgccaccagaacuccgagggcaccggccaggccgccgaccucaaguccacccaggccgccaucaaccagaucaacggcaagcucaaccgccucaucgagaagaccaacgagaaguuccaccagaucgagaaggaguucuccgaggucgagggccgcauccaggaccucgagaaguacgucgaggacaccaagaucgaccucugguccuacaacgccgagcuccucgucgcccucgagaaccagcacaccaucgaccucaccgacuccgagaugaacaagcucuucgagcgcacccgcaagcagcuccgcgagaacgccgaggacaugggcaacggcugccucaagaucuaccacaagugcgacaacgccugcaucggcuccauccgcaacggcaccuacgaccacgacgucuaccgcgacgaggcccucaacaaccgcuuccagaucaagggcgucgagcucaaguccggcuacaaggacuggauccucuggaucuccuucgccaucuccugcuuccuccucugcgucguccuccucggcuucaucaugugggccugccagaagggcaacauccgcugcaacaucugcaucuga

SEQ ID NO: 97477 - RNA, 1701 nt, Artificial Sequence; identical to SEQ ID NO: 96686
  derived and/or modified CDS sequence (opt2) from hemagglutinin__InfluenzaA__ABK80091

SEQ ID NO: 97478 - RNA, 1701 nt, Artificial Sequence; identical to SEQ ID NO: 96686
  derived and/or modified CDS sequence (opt2) from hemagglutinin__InfluenzaA__ABK80102

SEQ ID NO: 97479 - RNA, 1701 nt, Artificial Sequence; identical to SEQ ID NO: 96087
  derived and/or modified CDS sequence (opt2) from hemagglutinin__InfluenzaA__ABK80113

SEQ ID NO: 97480 - RNA, 1701 nt, Artificial Sequence
  derived and/or modified CDS sequence (opt2) from hemagglutinin__InfluenzaA__ABK80124
augaagaccaucaucgcccucuccuacauccucugccucgucuucgcccagaagcuccccggcaacgacaacuccaccgccacccucugccucggccaccacgccguccccaacggcacccucgucaagaccaucaccaacgaccagaucgaggucaccaacgccaccgagcucguccaguccuccuccaccggccgcaucugcgacuccccccaccagauccucgacggcgagaacugcacccucaucgacgcccuccucggcgacccccacugcgacggcuuccagaacaaggagugggaccucuucgucgagcgcuccaaggccuacuccaacugcuaccccuacgacguccccgacuacgucucccuccgcucccucgucgccuccuccggcacccucgaguucaacaacgaguccuucaacuggaccggcgucgcccagaacggcaccuccuccgccugcaagcgccgcuccgacaaguccuucuucucccgccucaacuggcuccaccagcucaaguacaaguaccccgcccucaacgucaccaugcccaacaacgagaaguucgacaagcucuacaucuggggcguccaccaccccggcaccgacuccgaccagaucucccucuacgcccaggccuccggccgcgucaccgucuccaccaagcgcucccagcagaccgucauccccaacaucggcucccgccccuggguccgcggcgucuccucccgcaucuccaucuacuggaccaucgucaagcccggcgacauccuccucaucaacuccaccggcaaccucaucgccccccgcggcuacuucaagauccgcuccggcaaguccuccaucaugcgcuccgacgcccccaucggcaagugcaacuccgagugcaucacccccaacggcuccauccccaacgacaagcccuuccagaacgucaaccgcaucaccuacggccccugcccccgcuacgucaagcagaacacccucaagcucgccaccggcaugcgcaacguccccgagaagcagacccgcggcaucuucggcgccaucgccggcuucaucgagaacggcugggagggcaugauggacggcugguacggcuuccgccaccagaacuccgagggcaccggccaggccgccgaccucaaguccacccaggccgccaucaaccagaucaacggcaagcucaaccgccucaucgagaagaccaacgagaaguuccaccagaucgagaaggaguucuccgaggucgagggccgcauccaggaccucgagaaguacgucgaggacaccaagaucgaccucugguccuacaacgccgagcuccucgucgcccucgagaaccagcacaccaucgaccucaccgacuccgagaugaacaagcucuucgagcgcaccaagaagcagcuccgcgagaacgccgaggacaugggcaacggcugcuucaagaucuaccacaagugcgacaacgccugcaucggcuccauccgcaacggcaccuacgaccacgacgucuaccgcgacgaggcccucaacaaccgcuuccagaucaagggcgucgagcucaaguccggcuacaagaacuggauccucuggaucuccuucgccaucuccugcuuccuccucugcaucguccuccucggcuucaucaugugggccugccagaagggcaacauccgcugcaacaucugcaucuga

SEQ ID NO: 97481 - RNA, 1701 nt, Artificial Sequence; identical to SEQ ID NO: 96087
  derived and/or modified CDS sequence (opt2) from hemagglutinin__InfluenzaA__ABK80135

SEQ ID NO: 97482 - RNA, 1701 nt, Artificial Sequence; identical to SEQ ID NO: 96087
  derived and/or modified CDS sequence (opt2) from hemagglutinin__InfluenzaA__ABK80146

SEQ ID NO: 97483 - RNA, 1701 nt, Artificial Sequence; identical to SEQ ID NO: 96087
  derived and/or modified CDS sequence (opt2) from hemagglutinin__InfluenzaA__ABK80157

SEQ ID NO: 97484 - RNA, 1701 nt, Artificial Sequence; identical to SEQ ID NO: 96598
  derived and/or modified CDS sequence (opt2) from hemagglutinin__InfluenzaA__ABK80168

SEQ ID NO: 97485 - RNA, 1701 nt, Artificial Sequence
  derived and/or modified CDS sequence (opt2) from hemagglutinin__InfluenzaA__ABK80179
augaagaccaucaucgcccucuccuacauccucugccucgucuucgcccagaagcuccccggcaacgacaacuccaccgccacccucugccucggccaccacgccguccccaacggcacccucgucaagaccaucaccaacgaccagaucgaggucaccaacgccaccgagcucguccaguccuccuccaccggccgcaucugcgacuccccccaccagauccucgacggcgagaacugcacccucaucgacgcccuccucggcgacccccacugcgacggcuuccagaacaaggagugggaccucuucgucgagcgcuccaaggccuacuccaacugcuaccccuacgacguccccgacuacgucucccuccgcucccucgucgccuccuccggcacccucgaguucaacaacgaguccuucaacuggaccggcgucgcccagaacggcaccuccuccgccugcaagcgccgcuccgacaaguccuucuucucccgccucaacuggcuccaccagcucaaguacaaguaccccgcccucaacgucaccaugcccaacaacgagaaguucgacaagcucuacaucuggggcguccaccaccccggcaccgacuccgaccagaucucccucuacgcccaggccuccggccgcgucaccgucuccaccaagcgcucccagcagaccgucauccccaacaucggcucccgccccuggguccgcggcgucuccucccgcaucuccaucuacuggaccaucgucaagcccggcgacauccuccucaucaacuccaccggcaaccucaucgccccccgcggcuacuucaagauccgcuccggcaaguccuccaucaugcgcuccgacgcccccaucggcaagugcaacuccgagugcaucacccccaacggcuccguccccaacgacaagcccuuccagaacgucaaccgcaucaccuacggcgccugcccccgcuacgucaagcagaacacccucaagcucgccaccggcaugcgcaacguccccgagaagcagacccgcggcaucuucggcgccaucgccggcuucaucgagaacggcugggagggcaugauggacggcugguacggcuuccgccaccagaacuccgagggcaccggccaggccgccgaccucaaguccacccaggccgccaucaaccagaucaacggcaagcucaaccgccucaucgagaagaccaacgagaaguuccaccagaucgagaaggaguucuccgaggucgagggccgcauccaggaccucgagaaguacgucgaggacaccaagaucgaccucugguccuacaacgccgagcuccucgucgcccucgagaaccagcacaccaucgaccucaccgacuccgagaugaacaagcucuucgagcgcaccaagaagcagcuccgcgagaacgccgaggacaugggcaacggcugcuucaagaucuaccacaagugcgacaacgccugcaucggcuccauccgcaacggcaccuacgaccacgacgucuaccgcgacgaggcccucaacaaccgccuccagaucaagggcgucgagcucaaguccggcuacaaggacuggauccucuggaucuccuucgccaucuccugcuuccuccucugcaucguccuccucggcuucaucaugugggccugccagaagggcaacauccgcugcaacaucugcaucuga

SEQ ID NO: 97486 - RNA, 1701 nt, Artificial Sequence; identical to SEQ ID NO: 96598
  derived and/or modified CDS sequence (opt2) from hemagglutinin__InfluenzaA__ABK80190

SEQ ID NO: 97487 - RNA, 1701 nt, Artificial Sequence; identical to SEQ ID NO: 97341
  derived and/or modified CDS sequence (opt2) from hemagglutinin__InfluenzaA__ABK80201

SEQ ID NO: 97488 - RNA, 1701 nt, Artificial Sequence
  derived and/or modified CDS sequence (opt2) from hemagglutinin__InfluenzaA__ABK80212
augaagaccaucaucgcccucuccuacauccucugccucgucuucgcccagaagcuccccggcaacgacaacuccaccgccacccucugccucggccaccacgccguccccaacggcaccaucgucaagaccaucaccaacgaccagaucgaggucaccaacgccaccgagcucguccaguccuccuccaccggcggcaucugcgacuccccccaccagauccucgacggcgagaacugcacccucaucgacgcccuccucggcgacccccagugcgacggcuuccagaacaagaagugggaccucuucgucgagcgcuccaaggccuacuccaacugcuaccccuacgacguccccgacuacgccucccuccgcucccucgucgccuccuccggcacccucgaguucaacaacgaguccuucgacuggaccggcgucacccagaacggcaccuccuccgccugcaagcgccgcuccaacaaguccuucuucucccgccucaacuggcucacccaccucaaguacaaguaccccgcccucaacgucaccaugcccaacaacgagaaguucgacaagcucuacaucuggggcguccaccaccccggcaccgacuccgaccagaucucccucuacgcccaggccuccggccgcaucaccgucuccaccaagcgcucccagcagaccgucauccccaacaucggcucccgcccccgcguccgcgacgucuccucccgcaucuccaucuacuggaccaucgucaagcccggcgacauccuccucaucaacuccaccggcaaccucaucgccccccgcggcuacuucaagauccgcuccggcaaguccuccaucaugcgcuccgacgcccccaucggcaagugcaacuccgagugcaucacccccaacggcuccauccccaacgacaagcccuuccagaacgucaaccgcaucaccuacggcgccugcccccgcuacgucaagcagaacacccucaagcucgccaccggcaugcgcaacguccccgagaagcagacccgcggcaucuucggcgccaucgccggcuucaucgagaacggcugggagggcauggucgacggcugguacggcuuccgccaccagaacuccgagggcaccggccaggccgccgaccucaaguccacccaggccgccaucaaccagaucaacggcaagcucaaccgccucaucggcaagaccaacgagaaguuccaccagaucgagaaggaguucuccgaggucgagggccgcauccaggaccucgagaaguacgucgaggacaccaagaucgaccucugguccuacaacgccgagcuccucgucgcccucgagaaccagcacaccaucgaccucaccgacuccgagaugaacaagcucuucgagcgcaccaagaagcagcuccgcgagaacgccgaggacaugggcaacggcugcuucaagaucuaccacaagugcgacaacgccugcaucggcuccauccgcaacggcaccuacgaccacgacgucuaccgcgacgaggcccucaacaaccgcuuccagaucaagggcgucgagcucaaguccggcuacaagaacuggauccucuggaucuccuucgccaucuccugcuuccuccucugcgucgcccuccucggcuucaucaugugggccugccagaagggcaacauccgcugcaacaucugcaucuga

SEQ ID NO: 97489 - RNA, 1701 nt, Artificial Sequence; identical to SEQ ID NO: 96552
  derived and/or modified CDS sequence (opt2) from hemagglutinin__InfluenzaA__ABK80223

SEQ ID NO: 97490 - RNA, 1701 nt, Artificial Sequence
  derived and/or modified CDS sequence (opt2) from hemagglutinin__InfluenzaA__ABK80234
augcgcaccaucaucgcccucuccuacauccucugccucgucuucgcccagaagcuccccggcaacgacaacuccaccgccacccucugccucggccaccacgccguccccaacggcaccaucgucaagaccaucaccaacgaccagaucgaggucaccaacgccaccgagcucguccaguccuccuccaccggcggcaucugcgacuccccccaccagauccucgacggcgagaacugcacccucaucgacgcccuccucggcgacccccagugcgacggcuuccagaacaagaagugggaccucuucgucgagcgcuccaaggccuacuccaacugcuaccccuacgacguccccgaccacgccucccuccgcucccucgucgccuccuccggcacccucgaguucaacaacgaguccuucgacuggaccggcgucacccagaacggcaccuccuccgccugcaagcgccgcuccaacaaguccuucuucucccgccucaacuggcucacccaccucaaguacaaguaccccgcccucaacgucaccaugcccaacaacgagaaguucgacaagcucuacaucuggggcguccaccaccccggcaccgacuccgaccagaucucccucuacgcccaggccuccggccgcaucaccgucuccaccaagcgcucccagcagaccgucauccccaacaucggcucccgcccccgcguccgcgacgucuccucccgcaucuccaucuacuggaccaucgucaagcccggcgacauccuccucaucaacuccaccggcaaccucaucgccccccgcggcuacuucaagauccgcuccggcaaguccuccaucaugcgcuccgacgcccccaucggcaagugcaacuccgagugcaucacccccaacggcuccauccccaacgacaagcccuuccagaacgucaaccgcaucaccuacggcgccugcccccgcuacgucaagcagaacacccucaagcucgccaccggcaugcgcaacguccccgagaagcagacccgcggcaucuucggcgccaucgccggcuucaucgagaacggcugggagggcauggucgacggcugguacggcuuccgccaccagaacuccgagggcaccggccaggccgccgaccucaaguccacccaggccgccaucaaccagaucaacggcaagcucaaccgccucaucggcaagaccaacgagaaguuccaccagaucgagaaggaguucuccgaggucgagggccgcauccaggaccucgagaaguacgucgaggacaccaagaucgaccucugguccuacaacgccgagcuccucgucgcccucgagaaccagcacaccaucgaccucaccgacuccgagaugaacaagcucuucgagcgcaccaagaagcagcuccgcgagaacgccgaggacaugggcaacggcugcuucaagaucuaccacaagugcgacaacgccugcaucggcuccauccgcaacggcaccuacgaccacgacgucuaccgcgacgaggcccucaacaaccgcuuccagaucaagggcgucgagcucaaguccggcuacaaggacuggauccucuggaucuccuucgccaucuccugcuuccuccucugcgucgcccuccucggcuucaucaugugggccugccagaagggcaacauccgcugcaacaucugcaucuga

SEQ ID NO: 97491 - RNA, 1701 nt, Artificial Sequence
  derived and/or modified CDS sequence (opt2) from hemagglutinin__InfluenzaA__ABK80245
augaagaccaucaucgcccucuccuacauccucugccucgucuucgcccagaagcuccccggcaacgacaacuccaccgccacccucugccucggccaccacgccguccccaacggcaccaucgucaagaccaucaccaacgaccagaucgaggucaccaacgccaccgagcucguccaguccuccuccaccggcggcaucugcgacuccccccaccagauccucgacggcgagaacugcacccucaucgacgcccuccucggcgacccccagugcgacggcuuccagaacaagaagugggaccucuucgucgagcgcuccaaggcccacuccaacugcuaccccuacgacguccccgacuacgccucccuccgcucccucaucgccuccuccggcacccucgaguucaacaacgaguccuucaacuggaccggcgucacccagaacggcaccuccuccgccugcaagcgccgcuccaaccaguccuucuucucccgccucaacuggcucacccaccucaaguucaaguaccccgcccucaacgucaccaugcccaacaacgagaaguucgacaagcucuacaucuggggcguccaccaccccggcaccgacuccgaccagaucucccucuacgcccaggcccccggccgcaucaccgucuccaccaagcgcucccagcagaccgucauccccaacaucggcucccgcccccgcguccgcgacaucuccucccgcaucuccaucuacuggaccaucgucaagcccggcgacauccuccucaucaacuccaccggcaaccucaucgccccccgcggcuacuucaagauccgcuccggcaaguccuccaucaugaaguccgacgcccccaucggcaagugcaacuccgagugcaucacccccaacggcuccauccccaacgacaagcccuuccagaacgucaaccgcaucaccuacggcgccugcccccgcuacgucaagcagaacacccucaagcucgccaccggcaugcgcaacguccccgagaagcagacccgcggcaucuucggcgccaucgccggcuucaucgagaacggcugggagggcauggucgacggcugguacggcuuccgccaccagaacuccgagggcaccggccaggccgccgaccucaaguccacccaggccgccaucaaccagaucaacggcaagcucaaccgccucaucggcaagaccaacgagaaguuccaccagaucgagaaggaguucuccgaggucgagggccgcauccaggaccucgagaaguacgucgaggacaccaagaucgaccucugguccuacaacgccgagcuccucgucgcccucgagaaccagcacaccaucgaccucaccgacuccgagaugaacaagcucuucgagcgcaccaagaagcagcuccgcgagaacgccgaggacaugggcaacggcugcuucaagaucuaccacaagugcgacaacgccugcaucggcuccauccgcaacggcaccuacgaccacgacgucuaccgcgacgaggcccucaacaaccgcuuccagaucaagggcgucgagcucaaguccggcuacaaggacuggauccucuggaucuccuucgccaucuccugccuccuccucugcgucgcccuccucggcuucaucaugugggccugccagaagggcaacauccgcugcaacaucugcaucuga

SEQ ID NO: 97492 - RNA, 1701 nt, Artificial Sequence; identical to SEQ ID NO: 97491
  derived and/or modified CDS sequence (opt2) from hemagglutinin__InfluenzaA__ABK80256

SEQ ID NO: 97493 - RNA, 1701 nt, Artificial Sequence; identical to SEQ ID NO: 96648
  derived and/or modified CDS sequence (opt2) from hemagglutinin__InfluenzaA__ABK80267

SEQ ID NO: 97494 - RNA, 1701 nt, Artificial Sequence; identical to SEQ ID NO: 96669
  derived and/or modified CDS sequence (opt2) from hemagglutinin__InfluenzaA__ABK80278

SEQ ID NO: 97495 - RNA, 1701 nt, Artificial Sequence
  derived and/or modified CDS sequence (opt2) from hemagglutinin__InfluenzaA__ABK80289
augaagaccaucaucgcccucuccuacauccucugccucgucuucgcccagaagcuccccggcaacgacaacuccaccgccacccucugccucggccaccacgccguccccaacggcaccaucgucaagaccaucaccaacgaccagaucgaggucaccaacgccaccgagcucguccaguccuccuccaccggcggcaucugcgacuccccccaccagauccucgacggcgagaacugcacccucaucgacgcccuccucggcgacccccagugcgacggcuuccagaacaagaagugggaccucuucgucgagcgcuccaaggccuacuccaacugcuaccccuacgacguccccgacuacgccucccuccgcucccucgucgccuccuccggcacccucgaguucaacaacgaguccuucaacuggaccggcgucacccagaacggcaccuccuccgccugcaagcgccgcuccaacaacuccuucuucucccgccucaacuggcucacccaccucaaguucaaguaccccgcccucaacgucaccaugcccaacaacgagaaguucgacaagcucuacaucuggggcguccaccaccccggcaccgacaacgaccagaucuuccucuacgcccaggccuccggccgcaucaccgucuccaccaagcgcucccagcagaccgucauccccaacaucggcucccgcccccgcguccgcaacauccccucccgcaucuccaucuacuggaccaucgucaagcccggcgacauccuccucaucaacuccaccggcaaccucaucgccccccgcggcuacuucaagauccgcuccggcaaguccuccaucaugcgcuccgacgcccccaucggcaagugcaacuccgagugcaucacccccaacggcuccauccccaacgacaagcccuuccagaacgucaaccgcaucaccuacggcgccugcccccgcuacgucaagcagaacacccucaagcucgccaccggcaugcgcaacguccccgagaagcagacccgcggcaucuucggcgccaucgccggcuucaucgagaacggcugggagggcauggucgacggcugguacggcuuccgccaccagaacuccgagggcaccggccaggccgccgaccucaaguccacccaggccgccaucaaccagaucaacggcaagcucaaccgccucaucggcaagaccaacgagaaguuccaccagaucgagaaggaguucuccgaggucgagggccgcauccaggaccucgagaaguacgucgaggacaccaagaucgaccucugguccuacaacgccgagcuccucgucgcccucgagaaccagcacaccaucgaccucaccgacuccgagaugaacaagcucuucgagcgcaccaagaagcagcuccgcgagaacgccgaggacaugggcaacggcugcuucaagaucuaccacaagugcgacaacgccugcaucggcuccauccgcaacggcaccuacgaccacgacgucuaccgcgacgaggcccucaacaaccgcuuccagaucaagggcgucgagcucaaguccggcuacaaggacuggauccucuggaucuccuucgccaucuccugcuuccuccucugcgucgcccuccucggcuucaucaugugggccugccagaagggcaacauccgcugcaacaucugcaucuga

SEQ ID NO: 97496 - RNA, 1701 nt, Artificial Sequence; identical to SEQ ID NO: 96087
  derived and/or modified CDS sequence (opt2) from hemagglutinin__InfluenzaA__ABK80300

SEQ ID NO: 97497 - RNA, 1701 nt, Artificial Sequence; identical to SEQ ID NO: 96087
  derived and/or modified CDS sequence (opt2) from hemagglutinin__InfluenzaA__ABK80311

SEQ ID NO: 97498 - RNA, 1707 nt, Artificial Sequence
  derived and/or modified CDS sequence (opt2) from hemagglutinin__InfluenzaA__ABL07019
auggagaagaucguccuccuccucuccaucgucucccucgucaaguccgaccagaucugcaucggcuaccacgccaacaacuccaccgagcaggucgacaccaucauggagaagaacgucaccgucacccacgcccaggacauccucgagaagacccacaacggcaagcucugcgaccucgacggcgucaagccccucauccuccgcgacugcuccgucgccggcuggcuccucggcaaccccaugugcgacgaguucaucaacguccccgagugguccuacaucgucgagaaggccaaccccaccaacgaccucugcuaccccggcuccuucaacgacuacgaggagcucaagcaccuccucucccgcaucaaccacuucgagaagauccagaucauccccaaguccuccugguccgaccacgaggccuccuccggcgucuccuccgccugccccuaccucggcucccccuccuucuuccgcaacgucgucuggcucaccaagaagaacuccaccuaccccaccaucaagaaguccuacaacaacaccaaccaggaggaccuccucguccucuggggcauccaccaccccaacaacgaggccgagcagacccgccucuaccagaaccccaccaccuacaucuccaucggcaccuccacccucaaccagcgccucguccccaagaucgccacccgcuccaaggucaacggccaguccggccgcauggaguucuucuggaccauccucaagcccaacgacgccaucaacuucgaguccaacggcaacuucaucgcccccgaguacgccuacaagaucgucaagaagggcgacuccgccaucaugaaguccgagcucgaguacuccaacugcaacaccaagugccagacccccaugggcgccaucaacuccuccaugcccuuccacaacauccacccccucaccaucggcgagugccccaaguacgucaaguccaaccgccucguccucgccaccggccuccgcaacuccccccagcgcgagucccgccgcaagaagcgcggccucuucggcgccaucgccggcuucaucgagggcggcuggcagggcauggucgacggcugguacggcuaccaccacuccaacgagcagggcuccggcuacgccgccgacaaggaguccacccagaaggccaucgacggcgucaccaacaaggucaacuccaucaucgacaagaugaacacccaguucgaggccgucggccgcgaguucaacaaccucgagcgccgcaucgagaaccucaacaagaagauggaggacggcuuccucgacgucuggaccuacaacgccgagcuccucguccucauggagaacgagcgcacccucgacuuccacgacuccaacgucaagaaccucuacgacaagguccgccuccagcuccgcgacaacgccaaggagcucggcaacggcugcuucgaguucuaccacaagugcgacaacgagugcauggaguccauccgcaacggcaccuacaacuacccccaguacuccgaggaggcccgccucaagcgcgaggagaucuccggcgucaagcucgaguccaucggcaccuaccagauccucuccaucuacuccaccgucgccuccucccucgcccucgccaucaugaucgccggccucucccucuggaugugcuccaacggcucccuccagugccgcaucugcaucuga

SEQ ID NO: 97499 - RNA, 1707 nt, Artificial Sequence
  derived and/or modified CDS sequence (opt2) from hemagglutinin__InfluenzaA__ABL07030
auggagaagaucguccuccuccucgccaucgucucccucgucaaguccgaccagaucugcaucggcuaccacgccaacaacuccaccgagcaggucgacaccaucauggagaagaacgucaccgucacccacgcccaggacauccucgagaagacccacaacggcaagcucugcgaccucgacggcgucaagccccucauccuccgcgacugcuccgucgccggcuggcuccucggcaaccccaugugcgacgaguucaucaacguccccgagugguccuacaucgucgagaaggccaaccccaccaacgaccucugcuaccccggcuccuucaacgacuacgaggagcucaagcaccuccucucccgcaucaaccacuucgagaagauccagaucauccccaaguccuccugguccgaccacgaggccuccuccggcgucuccuccgccugccccuaccucggcucccccuccuucuuccgcaacgucgucuggcucaucaagaagaacuccaccuaccccaccaucaagaaguccuacaacaacaccaaccaggaggaccuccucguccucuggggcauccaccaccccaacgacgccgccgagcagacccgccucuaccagaaccccaccaccuacaucuccaucggcaccuccacccucaaccagcgccucguccccaagaucgccacccgcuccaaggucaacggccaguccggccgcauggaguucuucugggccauccucaagcccaacgacgccaucaacuucgaguccaacggcaacuucaucgcccccgaguacgccuacaagaucgucaagaagggcgacuccgccaucaugaaguccgagcucgaguacggcaacugcaacaccaagugccagacccccaugggcgccaucaacuccuccaugcccuuccacaacauccacccccucaccaucggcgagugccccaaguacgucaaguccaaccgccucguccucgccaccggccuccgcaacuccccccagcgcgagucccgccgcaagaagcgcggccucuucggcgccaucgccggcuucaucgagggcggcuggcagggcauggucgacggcugguacggcuaccaccacuccaacgagcagggcuccggcuacgccgccgacaaggaguccacccagaaggccaucgacggcgucaccaacaaggucaacuccaucaucgacaagaugaacacccaguucgaggccgucggccgcgaguucaacaaccucgagcgccgcaucgagaaccucaacaagaagauggaggacggcuuccucgacgucuggaccuacaacgccgagcuccucguccucauggagaacgagcgcacccucgacuuccacgacuccaacgucaagaaccucuacgacaagguccgccuccagcuccgcgacaacgccaaggagcucggcaacggcugcuucgaguucuaccacaagugcgacaacgagugcauggaguccauccgcaacggcaccuacaacuacccccaguacuccgaggaggcccgccucaagcgcgaggagaucuccggcgucaagcucgaguccaucggcaccuaccagauccucuccaucuacuccaccgucgccuccucccucgcccucgccaucaugaucgccggccucucccucuggaugugcuccaacggcucccuccagugccgcaucugcaucuga

SEQ ID NO: 97500 - RNA, 1707 nt, Artificial Sequence
  derived and/or modified CDS sequence (opt2) from hemagglutinin__InfluenzaA__ABL10088
auggagaagaucguccuccucuucgccaucgucucccucgucaaguccgaccagaucugcaucggcuaccacgccaacaacuccaccgagcaggucgacaccaucauggagaagaacgucaccgucacccacgcccaggacauccucgagaagacccacaacggcaagcucugcgaccucgacggcgucaagccccucauccuccgcgacugcuccgucgccggcuggcuccucggcaaccccaugugcgacgaguucaucaacguccccgagugguccuacaucgucgagaaggccaaccccgucaacgaccucugcuaccccggcgacuucaacgacuacgaggagcucaagcaccuccucucccgcaucaaccacuucgagaagauccagaucauccccaaguccuccugguccucccacgaggccucccucggcgucuccuccgccugccccuaccagggcaaguccuccuucuuccgcaacgucgucuggcucaucaagaagaacuccaccuaccccaccaucaagcgcuccuacaacaacaccaaccaggaggaccuccucguccucuggggcauccaccaccccaacgacgccgccgagcagaccaagcucuaccagaaccccaccaccuacaucuccgucggcaccuccacccucaaccagcgccucgucccccgcaucgccacccgcuccgaggucaacggccaguccggccgcauggaguucuucuggaccauccucaagcccaacgacgccaucaacuucgaguccaacggcaacuucgucgcccccgaguacgccuacaagaucgucaagaagggcgacuccaccaucaugaaguccgagcucgaguacggcaacugcaacaccaagugccagacccccaugggcgccaucaacuccuccaugcccuuccacaacauccacccccucaccaucggcgagugccccaaguacgucaaguccaaccgccucguccucgccaccggccuccgcaacuccccccagcgcgagcgccgccgcaagaagcgcggccucuucggcgccaucgccggcuucaucgagggcggcuggcagggcauggucgacggcugguacggcuaccaccacuccaacgagcagggcuccggcuacgccgccaacaaggaguccacccagaaggccaucgacggcgucaccaacaaggucaacuccaucaucgacaagaugaacacccaguucgaggccgucggccgcgaguucaacaaccucgagcgccgcaucgagaaccucaacaagaagauggaggacggcuuccucgacgucuggaccuacaacgccgagcuccucguccucauggagaacgagcgcacccucgacuuccacgacuccaacgucaagaaccucuacgacaagguccgccuccagcuccgcgacaacgccaaggagcucggcaacggcugcuucgaguucuaccacaagugcgacaacgagugcauggaguccguccgcaacggcaccuacgacuacccccaguacuccgaggaggcccgccucaagcgcgaggagaucuccggcgucaagcucgaguccaucggcaucuaccagauccucuccaucuacuccaccgucgccuccucccucgcccucgccaucauggucgccggccucucccucuggaugugcuccaacggcucccuccagugccgcaucugcaucuga

SEQ ID NO: 97501 - RNA, 1707 nt, Artificial Sequence
  derived and/or modified CDS sequence (opt2) from hemagglutinin__InfluenzaA__ABL31766
auggagaagaucguccuccuccucgccaucgucuccuucgucaaguccgaccagaucugcaucggcuaccacgccaacaacuccaccgagcaggucgacaccaucauggagaagaacgucaccgucacccacgcccaggacauccucgagaagacccacaacggcaagcucugcgaccucgacggcgucaagccccucauccuccgcgacugcuccgucgccggcuggcuccucggcaaccccaugugcgacgaguucaucaacguccccgagugguccuacaucgucgagaaggccaaccccaccaacgaccucugcuaccccggcuccuucaacgacuacgaggagcucaagcaccuccucucccgcaucaaccacuucgagaagauccagaucauccccaaguccuccugguccgaccacgaggccuccuccggcgucuccuccgccugccccuaccucggcucccccuccuucuuccgcaacgucgucuggcucaucaagaagaacuccaccuaccccaccaucaagaaguccuacaacaacaccaaccaggaggaccuccucguccucuggggcauccaccaccccaacgacgccgccgagcagacccgccucuaccagaaccccaccaccuacaucuccaucggcaccuccacccucaaccagcgccucguccccaagaucgccacccgcuccaaggucaacggccaguccggccgcauggaguucuucugggccauccucaagcccaacgacgccaucaacuucgaguccaacggcaacuucaucgcccccgaguacgccuacaagaucgucaagaagggcgacuccgccaucaugaaguccgagcucgaguacggcaacugcaacaccaagugccagacccccaugggcgccaucaacuccuccaugcccuuccacaacauccacccccucaccaucggcgagugccccaaguacgucaaguccaaccgccucguccucgccaccggccuccgcaacuccccccagcgcgagucccgccgcaagaagcgcggccucuucggcgccaucgccggcuucaucgagggcggcuggcagggcauggucgacggcugguacggcuaccaccacuccaacgagcagggcuccggcuacgccgccgacaaggaguccacccagaaggccaucgacggcgucaccaacaaggucaacuccaucaucgacaagaugaacacccaguucgaggccgucggccgcgaguucaacaaccucgagcgccgcaucgagaaccucaacaagaagauggaggacggcuuccucgacgucuggaccuacaacgccgagcuccucguccucauggagaacgagcgcacccucgacuuccacgacuccaacgucaagaaccucuacgacaagguccgccuccagcuccgcgacaacgccaaggagcucggcaacggcugcuucgaguucuaccacaagugcgacaacgagugcauggaguccauccgcaacggcaccuacaacuacccccaguacuccgaggaggcccgccucaagcgcgaggagaucuccggcgucaagcucgaguccaucggcaccuaccagauccucuccaucuacuccaccgucgccuccucccucgcccucgccaucaugaucgccggccucucccucuggaugugcuccaacggcucccuccagugccgcaucugcaucuga

SEQ ID NO: 97502 - RNA, 1707 nt, Artificial Sequence
  derived and/or modified CDS sequence (opt2) from hemagglutinin__InfluenzaA__ABL31780
auggagaagaucguccuccuccucuccaucgucucccucgucaaguccgaccagaucugcaucggcuaccacgccaacaacuccaccgagcaggucgacaccaucauggagaagaacgucaccgucacccacgcccaggacauccucgagaagacccacaacggcaagcucugcgaccucgacggcgucaagccccucauccuccgcgacugcuccgucgccggcuggcuccucggcaaccccaugugcgacgaguucaucaacguccccgagugguccuacaucgucgagaaggccaaccccaccaacgaccucugcuaccccggcuccuucaacgacuacgaggagcucaagcaccuccucucccgcaucaaccacuucgagaagauccagaucauccccaagggcuccugguccgaccacgaggccuccuccggcgucuccuccgccugccccuaccuccgcucccccuccuucuuccgcaacgucgucuggcucaucaagaagaacuccaccuaccccaccaucaagaaguccuacaacaacaccaaccaggaggaccuccucguccucuggggcauccaccaccccaacaacgaggccgagcagacccgccucuaccagaaccccaccaccuacaucuccaucggcaccuccacccucaaccagcgccucguccccaagaucgccacccgcuccaaggucaacggccaguccggccgcauggaguucuucuggaccauccucaagcccaacgacgccaucaacuucgaguccaacggcaacuucaucgcccccgaguacgccuacaagaucgucaagaagggcgacuccgccaucaugaaguccgagcucgaguacggcaacugcaacaccaagugccagacccccaugggcgccaucaacuccuccaugcccuuccacaacauccacccccucaccaucggcgagugccccaaguacgucaaguccaaccgccucguccucgccaccggccuccgcaacuccccccagcgcgagucccgccgcaagaagcgcggccucuucggcgccaucgccggcuucaucgagggcggcuggcagggcauggucgacggcugguacggcuaccaccacuccaacgagcagggcuccggcuacgccgccgacaaggaguccacccagaaggccaucgacggcgucaccaacaaggucaacuccaucaucgacaagaugaacacccaguucgaggccgucggccgcgaguucaacaaccucgagcgccgcaucgagaaccucaacaagaagauggaggacggcuuccucgacgucuggaccuacaacgccgagcuccucguccucauggagaacgagcgcacccucgacuuccacgacuccaacgucaagaaccucuacgacaagguccgccuccagcuccgcgacaacgccaaggagcucggcaacggcugcuucgaguucuaccacaagugcgacaacgagugcauggaguccauccgcaacggcaccuacaacuacccccaguacuccgaggaggcccgccucaagcgcgaggagaucuccggcgucaagcucgaguccaucggcaccuaccagauccucuccaucuacuccaccgucgccuccucccucgcccucgccaucaugaucgccggccucucccucuggaugugcuccaacggcucccuccagugccgcaucugcaucuga

SEQ ID NO: 97503 - RNA, 1701 nt, Artificial Sequence
  derived and/or modified CDS sequence (opt2) from hemagglutinin__InfluenzaA__ABL67165
augaagaccaucaucgcccucuccuacauccucugccucgucuucgcccagaagcuccccggcaacgacaacuccaccgccacccucugccucggccaccacgccguccccaacggcaccaucgucaagaccaucaccaacgaccagaucgaggucaccaacgccaccgagcucguccaguccuccuccaccuccggcaucugcgacuccccccaccagauccucgacggcgagaacugcacccucaucgacgcccuccucggcgacccccagugcgacggcuuccagaacaagaagugggaccucuucgucgagcgcuccaaggccuacuccaacugcuaccccuacgacguccccgaccacgccucccuccgcucccucgucgccuccuccggcacccucgaguucaacaacgaguccuucgacuggaccggcgucacccagaacggcaccuccuccgccugcaagcgccgcuccaacaaguccuucuucucccgccucaacuggcucacccaccucaaguacaaguaccccgcccucaacgucaccaugcccaacaacgagaaguucgacaagcucuacaucuggggcguccaccaccccggcaccgacuccgaccagaucucccucuacgcccaggccuccggccgcaucaccgucuccaccaagcgcucccagcagaccgucauccccaacaucggcucccgcccccgcguccgcgacgucuccucccgcaucuccaucuacuggaccaucgucaagcccggcgacauccuccucaucaacuccaccggcaaccucaucgccccccgcggcuacuucaagauccgcuccggcaaguccuccaucaugcgcuccgacgcccccaucggcaagugcaacuccgagugcaucacccccaacggcuccauccccaacgacaagcccuuccagaacgucaaccgcaucaccuacggcgccugcccccgcuacgucaagcagaacacccucaagcucgccaccggcaugcgcaacguccccgagaagaagacccgcggcaucuucggcgccaucgccggcuucaucgagaacggcugggagggcauggucgacggcugguacggcuuccgccaccagaacuccgagggcaccggccaggccgccgaccucaaguccacccaggccgccaucaaccagaucaacggcaagcucaaccgccucaucggcaagaccaacgagaaguuccaccagaucgagaaggaguucuccgaggucgagggccgcauccaggaccucgagaaguacgucgaggacaccaagaucgaccucugguccuacaacgccgagcuccucgucgcccucgagaaccagcacaccaucgaccucaccgacuccgagaugaacaagcucuucgagcgcaccaagaagcagcuccgcgagaacgccgaggacaugggcaacggcugcuucaagaucuaccacaagugcgacaacgccugcaucggcuccauccgcaacggcaccuacgaccacgacgucuaccgcgacgaggcccucaacaaccgcuuccagaucaagggcgucgagcucaaguccggcuacaaggacuggauccucuggaucuccuucgccaucuccugcuuccuccucugcgucgcccuccucggcuucaucaugugggccugccagaagggcaacauccgcugcaacaucugcaucuga

SEQ ID NO: 97504 - RNA, 1701 nt, Artificial Sequence
  derived and/or modified CDS sequence (opt2) from hemagglutinin__InfluenzaA__ABL67176
augaagaccaucaucgcccucuccuacauccucugccucgucuucacccagaagcuccccggcaacgacaacuccaccgccacccucugccucggccaccacgccguccccaacggcacccucgucaagaccaucaccaacgaccagaucgaggucaccaacgccaccgagcucguccaguccuccuccaccggcggcaucugcgacuccccccaccagauccucgacggcgagaacugcacccucaucgacgcccuccucggcgacccccacugcgacggcuuccagaacaaggagugggaccucuucgucgagcgcucccgcgccuacuccaacugcuaccccuacgacguccccgacuacgccucccuccgcucccucgucgccuccuccggcacccucgaguucaacaacgaguccuucaacuggaccggcgucgcccagaacggcaccuccuccgccugcaagcgccgcuccaacaaguccuucuucucccgccucaacuggcuccaccagcucaaguacaaguaccccgcccucaacgucaccaugcccaacaacgagaaguucgacaagcucuacaucuggggcguccaccaccccuccaccgacuccgaccagaucucccucuacgcccaggcccccggccgcgucaccgucuccaccaagcgcucccagcagaccgucauccccaacaucggcucccgccccuggguccgcggcgucuccucccgcaucuccaucuacuggaccaucgucaagcccggcgacauccuccucaucaacugcaccggcaaccucaucgccccccgcggcuacuucaagauccgcuccggcaaguccuccaucaugcgcuccgacgccuccaucggcaagugcaacuccgagugcaucacccccaacggcuccauccccaacgacaagcccuuccagaacgucaaccgcaucaccuacggcgccugcccccgcuacgucaagcagaacacccucaagcucgccaccggcaugcgcaacguccccgagaagcagacccgcggcaucuucggcgccaucgccggcuucaucgagaacggcugggagggcauggucgacggcugguacggcuuccgccaccagaacuccgagggcaccggccaggccgccgaccucaaguccacccaggccgccaucaaccagaucaacggcaagcucaaccgccucaucgagaagaccaacgagaaguuccaccagaucgagaaggaguucuccgaggucgagggccgcauccaggaccucgagaaguacgucgaggacaccaagaucgaccucugguccuacaacgccgagcuccucgucgcccucgagaaccagcacaccaucgaccucaccgacuccgagaugaacaagcucuucgagcgcaccaagaagcagcuccgcgagaacgccgaggacaugggcaacggcugcuucaagaucuaccacaagugcgacaacgccugcaucggcuccauccgcaacggcaccuacgaccacgacgucuaccgcgacgaggcccucaacaaccgcuuccagaucaagggcgucgagcucaaguccggcuacaaggacuggauccucuggaucuccuucgccaucuccugcuuccuccucugcgucguccuccucggcuucaucaugugggccugccagaagggcaacauccgcugcaacaucugcaucuga

SEQ ID NO: 97505 - RNA, 1701 nt, Artificial Sequence; identical to SEQ ID NO: 97468
  derived and/or modified CDS sequence (opt2) from hemagglutinin__InfluenzaA__ABL67187

SEQ ID NO: 97506 - RNA, 1701 nt, Artificial Sequence; identical to SEQ ID NO: 97423
  derived and/or modified CDS sequence (opt2) from hemagglutinin__InfluenzaA__ABL67209

SEQ ID NO: 97507 - RNA, 1701 nt, Artificial Sequence; identical to SEQ ID NO: 96957
  derived and/or modified CDS sequence (opt2) from hemagglutinin__InfluenzaA__ABL67253

SEQ ID NO: 97508 - RNA, 1701 nt, Artificial Sequence
  derived and/or modified CDS sequence (opt2) from hemagglutinin__InfluenzaA__ABL67264
augaaggccaagcuccucguccuccucugcgcccucuccgccaccgacgccgacaccaucugcaucggcuaccacgccaacaacuccaccgacaccgucgacaccguccucgagaagaacgucaccgucacccacuccgucaaccuccucgaggacaaccacaacggcaagcucugcaagcucaagggcaucgccccccuccagcucggcaagugcuccaucgccggcuggauccucggcaaccccgagugcgagucccucuucuccaagaaguccugguccuacaucgccgagacccccaacuccgagaacggcaccugcuaccccggcuacuucgccgacuacgaggagcuccgcgagcagcucuccuccgucuccuccuucgagcgcuucgagaucuuccccaaggaguccuccuggcccaagcacaacgucaccaagggcgucaccgccuccugcucccacaagggcaaguccuccuucuaccgcaaccuccucuggcucaccgagaagaacggcuccuaccccaaccucuccaaguccuacgucaacaacaaggagaaggagguccucguccucuggggcguccaccaccccuccaacaucgaggaccagaagaccaucuaccgcaaggagaacgccuacgucuccgucgucuccucccacuacaaccgccgcuucacccccgagaucgccaagcgccccaagguccgcaaccaggagggccgcaucaacuacuacuggacccuccucgagcccggcgacaccaucaucuucgaggccaacggcaaccucaucgcccccugguacgccuucgcccucucccgcggcuucggcuccggcaucaucaccuccaacgccuccauggacgagugcgacgccaagugccagaccccccagggcgccaucaacuccuccuuccccuuccagaacguccaccccgucaccaucggcgagugccccaaguacguccgcuccaccaagcuccgcauggucaccggccuccgcaacauccccuccauccagucccgcggccucuucggcgccaucgccggcuucaucgagggcggcuggaccggcaugaucgacggcugguacggcuaccaccaccagaacgagcagggcuccggcuacgccgccgaccagaaguccacccagaacgccaucaacggcaucaccaacaaggucaacuccaucaucgagaagaugaacacccaguucaccgccgucggcaaggaguucaacaagcucgagaagcgcauggagaaccucaacaagaaggucgacgacggcuuccucgacaucuggaccuacaacgccgagcuccucguccuccucgagaacgagcgcacccucgacuuccacgacuccaacgucaagaaccucuacgagaaggucaagucccagcucaagaacaacgccaaggagaucggcaacggcugcuucgaguucuaccacaagugcaacaacgagugcauggaguccgucaagaacggcaccuacgacuaccccaaguacuccgaggaguccaagcucaaccgcgagaagaucgacggcgucaagcucgaguccaugggcgucuaccagauccucgccaucuacuccaccgucgccuccucccucguccuccucgucucccucggcgccaucuccuucuggaugugcuccaacggcucccuccagugccgcaucugcaucuga

SEQ ID NO: 97509 - RNA, 1701 nt, Artificial Sequence
  derived and/or modified CDS sequence (opt2) from hemagglutinin__InfluenzaA__ABL67275
augaagaccaucaucgcccucuccuacauccucugccucgucuucgcccagaagcuccccgucaacgacaacuccaccgccacccucugccucggccaccacgccguccccaacggcacccucgucaagaccaucaccaacgaccacaucgaggucaccaacgccaccgagcucguccaguccuccuccaccggccgcaucugcgacuccccccaccagauccucgacggcgagaacugcacccucaucgacgcccuccucggcgacccccacugcgacggcuuccagaacaaggagugggaccucuucgucgagcgcuccaccgccuacuccaacugcuaccccuacgacguccccgacuacgccucccuccgcucccucgucgccuccuccggcacccucgaguucaacaacgaguccuucaacuggaccggcgucgcccagaacggcaccuccuccgccugcaagcgccgcuccaucaaguccuucuucucccgccucaacuggcuccaccagcucaaguacaaguaccccgcccucaacgucaccaugcccaacaacgagaaguucgacaagcucuacaucuggggcguccaccaccccuccaccgacuccgaccagaucucccucuacgcccaggccuccggccgcgucaccgucuccaccaagcgcucccagcagaccgucauccccaacaucggcucccgccccuggguccgcggcgucuccucccgcaucuccaucuacuggaccaucgucaagcccggcgacauccuccucaucaacuccaccggcaaccucaucgccccccgcggcuacuucaagauccgcuccggcaaguccuccaucaugcgcuccaacgcccccaucggcaagugcaacuccgagugcaucacccccaacggcuccauccccaacgacaagcccuuccagaacgucaaccgcaucaccuacggcgccugcccccgcuacgucaagcagaacacccucaagcucgccaccggcaugcgcaacguccccgagaagcagacccgcggcaucuucggcgccaucgccggcuucaucgagaacggcugggagggcauggucgacggcugguacggcuuccgccaccagaacuccgagggcaccggccaggccgccgaccucaaguccacccaggccgccaucaaccagaucaacggcaagcucaaccgccucaucgagaagaccaacgagaaguuccaccagaucgagaaggaguucuccgaggucgagggccgcauccaggaccucgagaaguacgucgaggacaccaagaucgaccucugguccuacaacgccgagcuccucgucgcccucgagaaccagcacaccaucgaccucaccgacuccgagaugaacaagcucuucgagcgcacccgcaagcagcuccgcgagaacgccgaggacgucggcaacggcugcuucaagaucuaccacaagugcgacaacgccugcaucggcuccauccgcaacggcaccuacgaccacgacgucuaccgcgacgaggcccucaacaaccgcuuccagaucaagggcgucaagcucaaguccggcuacaaggacuggauccucuggaucuccuucgccaucuccugcuuccuccucugcgucguccuccucggcuucaucaugugggccugccagaagggcaacauccgcugcaacaucugcaucuga

SEQ ID NO: 97510 - RNA, 1701 nt, Artificial Sequence
  derived and/or modified CDS sequence (opt2) from hemagglutinin__InfluenzaA__ABL67286
augaagaccaucaucgcccucuccuacauccucugccucgucuucgcccagaagcuccccggcaacgacaacuccaccgccacccucugccucggccaccacgccguccccaacggcacccucgucaagaccaucaccaacgaccagaucgaggucaccaacgccaccgagcucguccaguccuccuccaccggccgcaucugcgacuccccccaccagauccucgacggcgagaacugcacccucaucgacgcccuccucggcgacccccacugcgacggcuuccagaacaaggagugggaccucuucgucgagcgcuccaaggccuacuccaacugcuaccccuacgacguccccgacuacgucucccuccgcucccucgucgccuccuccggcacccucgaguucaacaacgaguccuucaacuggaccggcgucgcccagaacggcaccuccuccgccugcaagcgccgcuccgacaaguccuucuucucccgccucaacuggcuccaccagcucaaguacaaguaccccgcccucaacgucaccaugcccaacaacgagaaguucgacaagcucuacaucuggggcguccaccaccccggcaccgacuccgaccagaucucccucuacgcccaggccuccggccgcgucaccgucuccaccaagcgcucccagcagaccgucauccccaacaucggcucccgccccuggguccgcggcgucuccucccgcaucuccaucuacuggaccaucgucaaguccggcgacauccuccucaucaacuccaccggcaaccucaucgccccccgcggcuacuucaagauccgcuccggcaaguccuccaucaugcgcuccgacgcccccaucggcaagugcaacuccgagugcaucacccccaacggcuccauccccaacgacaagcccuuccagaacgucaaccgcaucaccuacggccccugcccccgcuacgucaagcagaacacccucaagcucgccaccggcaugcgcaacguccccgagaagcagacccgcggcaucuucggcgccaucgccggcuucaucgagaacggcugggagggcaugauggacggcugguacggcuuccgccaccagaacuccgagggcaccggccaggccgccgaccucaaguccacccaggccgccaucaaccagaucaacggcaagcucaaccgccucaucgagaagaccaacgagaaguuccaccagaucgagaaggaguucuccgaggucgagggccgcauccaggaccucgagaaguacgucgaggacaccaagaucgaccucugguccuacaacgccgagcuccucgucgcccucgagaaccagcacaccaucgaccucaccgacuccgagaugaacaagcucuucgagcgcaccaagaagcagcuccgcgagaacgccgaggacaugggcaacggcugcuucaagaucuaccacaagugcgacaacgccugcaucggcuccauccgcaacggcaccuacgaccacgacgucuaccgcgacgaggcccucaacaaccgcuuccagaucaagggcgucgagcucaaguccggcuacaaggacuggauccucuggaucuccuucgccaucuccugcuuccuccucugcaucguccuccucggcuucaucaugugggccugccagaagggcaacauccgcugcaacaucugcaucuga

SEQ ID NO: 97511 - RNA, 1701 nt, Artificial Sequence; identical to SEQ ID NO: 97041
  derived and/or modified CDS sequence (opt2) from hemagglutinin__InfluenzaA__ABL67297

SEQ ID NO: 97512 - RNA, 1701 nt, Artificial Sequence
  derived and/or modified CDS sequence (opt2) from hemagglutinin__InfluenzaA__ABL67308
augaagaccaucaucgcccucuccuacauccucugccucgucuucgcccagaagcuccccggcaacgacaacuccauggccacccucugccucggccaccacgccguccccaacggcacccucgucaagaccaucaccaacgaccagaucgaggucaccaacgccaccgagcucguccaguccuccuccaccggccgcaucugcgacuccccccaccagauccucgacggcgagaacugcacccucaucgacgcccuccucggcgacccccacugcgacggcuuccagaacaaggagugggaccucuucgucgagcgcuccaaggccuacuccuccugcuaccccuacgacguccccgacuacgucucccuccgcucccucgucgccuccuccggcacccucgaguucaacaacgaguccuucaacuggaccggcgucgcccagaacggcaccuccuccgccugcaagcgccgcuccgacaaguccuucuucucccgccucaacuggcuccaccagcucaaguacaaguaccccgcccucaacgucaccaugcccaacaacgagaaguucgacaagcucuacaucuggggcguccaccaccccggcaccgacuccgaccagaucucccucuacgcccaggccuccggccgcgucaccgucuccaccaagcgcucccagcagaccgucauccccaacaucggcucccgccccuggguccgcggcgucuccucccgcaucuccaucuacuggaccaucgucaagcccggcgacauccuccucaucaacuccaccggcaaccucaucgccccccgcggcuacuucaagauccgcuccggcaaguccuccaucaugcgcuccgacgcccccaucgacaagugcaacuccgagugcaucacccccaacggcuccauccccaacgacaagcccuuccagaacgucaaccgcaucaccuacggccucugcccccgcuacgucaagcagaacacccucaagcucgccaccggcaugcgcaacguccccgagaagcagacccgcggcaucuucggcgccaucgccggcuucaucgagaacggcugggagggcaugauggacggcugguacggcuuccgccaccagaacuccgagggcaccggccaggccgccgaccucaaguccacccaggccgccaucaaccagaucaacggcaagcucaaccgccucaucgagaagaccaacgagaaguuccaccagaucgagaaggaguucuccgaggucgagggccgcauccaggaccucgagaaguacgucgaggacaccaagaucgaccucugguccuacaacgccgagcuccucgucgcccucgagaaccagcacaccaucgaccucaccgacuccgagaugaacaagcucuucgagcgcaccaagaagcagcuccgcgagaacgccgaggacaugggcaacggcugcuucaagaucuaccacaagugcgacaacgccugcaucggcuccauccgcaacggcaccuacgaccacgacgucuaccgcgacgaggcccucaacaaccgcuuccagaucaagggcgucgagcucaaguccggcuacaaggacuggauccucuggaucuccuucgccaucuccugcuuccuccucugcaucguccuccucggcuucaucaugugggccugccagaagggcaacguccgcugcaacaucugcaucuga

SEQ ID NO: 97513 - RNA, 1701 nt, Artificial Sequence; identical to SEQ ID NO: 96598
  derived and/or modified CDS sequence (opt2) from hemagglutinin__InfluenzaA__ABL67319

SEQ ID NO: 97514 - RNA, 1701 nt, Artificial Sequence; identical to SEQ ID NO: 97341
  derived and/or modified CDS sequence (opt2) from hemagglutinin__InfluenzaA__ABL67330

SEQ ID NO: 97515 - RNA, 1701 nt, Artificial Sequence; identical to SEQ ID NO: 96552
  derived and/or modified CDS sequence (opt2) from hemagglutinin__InfluenzaA__ABL67341

SEQ ID NO: 97516 - RNA, 1701 nt, Artificial Sequence; identical to SEQ ID NO: 96552
  derived and/or modified CDS sequence (opt2) from hemagglutinin__InfluenzaA__ABL67352

SEQ ID NO: 97517 - RNA, 1701 nt, Artificial Sequence; identical to SEQ ID NO: 96068
  derived and/or modified CDS sequence (opt2) from hemagglutinin__InfluenzaA__ABL67363

SEQ ID NO: 97518 - RNA, 1701 nt, Artificial Sequence
  derived and/or modified CDS sequence (opt2) from hemagglutinin__InfluenzaA__ABL67374
augaagaccaucaucgcccucuccuacauccucugccucgucuucgcccagaagcuccccggcaacgacaacuccaccgccacccucugccucggccaccacgccguccccaacggcaccaucgucaagaccaucaccaacgaccagaucgaggucaccaacgccaccgagcucguccaguccuccuccaccggcggcaucugcgacuccccccaccagauccucgacggcgagaacugcacccucaucgacgcccuccucggcgacccccagugcgacggcuuccagaacaagaagugggaccucuucgucgagcgcuccaaggcccacuccaacugcuaccccuacgacguccccgacuacgccucccuccgcucccucaucgccuccuccggcacccucgaguucaacaacgaguccuucaacuggaccggcgucacccagaacggcaccuccuccgccugcaagcgccgcuccaaccaguccuucuucucccgccucaacuggcucacccaccucaaguucaaguaccccgcccucaacgucaccaugcccaacaacgagaaguucgacaagcucuacaucuggggcguccaccaccccggcaccgacuccgaccagaucucccucuacgcccaggcccccggccgcaucaccgucuccaccaagcgcucccagcagaccgucauccccaacaucggcucccgcccccgcguccgcgacaucuccucccgcaucuccaucuacuggaccaucgucaagcccggcgacauccuccucaucaacuccaccggcaaccucaucgccccccgcggcuacuucaagaugcgcuccggcaaguccuccaucaugaaguccgacgcccccaucggcaagugcaacuccgagugcaucacccccaacggcuccauccccaacgacaagcccuuccagaacgucaaccgcaucaccuacggcgccugcccccgcuacgucaagcagaacacccucaagcucgccaccggcaugcgcaacguccccgagaagcagacccgcggcaucuucggcgccaucgccggcuucaucgagaacggcugggagggcauggucgacggcugguacggcuuccgccaccagaacuccgagggcaccggccaggccgccgaccucaaguccacccaggccgccaucaaccagaucaacggcaagcucaaccgccucaucggcaagaccaacgagaaguuccaccagaucgagaaggaguucuccgaggucgagggccgcauccaggaccucgagaaguacgucgaggacaccaagaucgaccucugguccuacaacgccgagcuccucgucgcccucgagaaccagcacaccaucgaccucaccgacuccgagaugaacaagcucuucgagcgcaccaagaagcagcuccgcgagaacgccgaggacaugggcgacggcugcuucaagaucuaccacaagugcgacaacgccugcaucggcuccauccgcaacggcaccuacgaccacgacgucuaccgcgacgaggcccucaacaaccgcuuccagaucaagggcgucgagcucaaguccggcuacaaggacuggauccucuggaucuccuucgccaucuccugccuccuccucugcgucgcccuccucggcuucaucaugugggccugccagaagggcaacauccgcugcaacaucugcaucuga

SEQ ID NO: 97519 - RNA, 1701 nt, Artificial Sequence; identical to SEQ ID NO: 96318
  derived and/or modified CDS sequence (opt2) from hemagglutinin__InfluenzaA__ABL67385

SEQ ID NO: 97520 - RNA, 1701 nt, Artificial Sequence; identical to SEQ ID NO: 96648
  derived and/or modified CDS sequence (opt2) from hemagglutinin__InfluenzaA__ABL67396

SEQ ID NO: 97521 - RNA, 1701 nt, Artificial Sequence; identical to SEQ ID NO: 96666
  derived and/or modified CDS sequence (opt2) from hemagglutinin__InfluenzaA__ABL67407

SEQ ID NO: 97522 - RNA, 1701 nt, Artificial Sequence
  derived and/or modified CDS sequence (opt2) from hemagglutinin__InfluenzaA__ABL67418
augaagaccaucaucgcccucuccuacauccucugccucgucuucgcccagaagcuccccggcaacgacaacuccaccgccacccucugccucggccaccacgccguccccaacggcaccaucgucaagaccaucaccaacgaccagaucgaggucaccaacgccaccgagcucguccaguccuccuccaccggcggcaucugcaacuccccccaccagauccucgacggcgagaacugcacccucaucgacgcccuccucggcgacccccagugcgacggcuuccagaacaagaagugggaccucuucgucgagcgcuccaaggccuacuccaacugcuaccccuacgacguccccgacuacgccucccuccgcucccucgucgccuccuccggcacccucgaguucaacaacgaguccuucaacuggaccggcgucacccagaacggcaccuccuccgccugcaagcgccgcuccaacaacuccuucuucucccgccucaacuggcucacccaccucaaguucaaguaccccgcccucaacgucaccaugcccaacaacgagaaguucgacaagcucuacaucuggggcguccaccaccccggcaccgacaacgaccagaucuuccucuacgcccaggccuccggccgcaucaccgucuccaccaagcgcucccagcagaccgucauccccaacaucggcucccgcccccgcguccgcaacauccccucccgcaucuccaucuacuggaccaucgucaagcccggcgacauccuccucaucaacuccaccggcaaccucaucgccccccgcggcuacuucaagauccgcuccggcaaguccuccaucaugcgcuccgacgcccccaucggcaagugcaacuccgagugcaucacccccaacggcuccauccccaacgacaagcccuuccagaacgucaaccgcaucaccuacggcgccugcccccgcuacgucaagcagaacacccucaagcucgccaccggcaugcgcaacguccccgagaagcagacccgcggcaucuucggcgccaucgccggcuucaucgagaacggcugggagggcauggucgacggcugguacggcuuccgccaccagaacuccgagggcaucggccaggccgccgaccucaaguccacccaggccgccaucaaccagaucaacggcaagcucaaccgccucaucggcaagaccaacgagaaguuccaccagaucgagaaggaguucuccgaggucgagggccgcauccaggaccucgagaaguacgucgaggacaccaagaucgaccucugguccuacaacgccgagcuccucgucgcccucgagaaccagcacaccaucgaccucaccgacuccgagaugaacaagcucuucgagcgcaccaagaagcagcuccgcgagaacgccgaggacaugggcaacggcugcuucaagaucuaccacaagugcgacaacgccugcaucggcuccauccgcaacggcaccuacgaccacgacgucuaccgcgacgaggcccucaacaaccgcuuccagaucaagggcgucgagcucaaguccggcuacaaggacuggauccucuggaucuccuucgccaucuccugcuuccuccucugcgucgcccuccucggcuucaucaugugggccugccagaagggcaacauccgcugcaacaucugcaucuga

SEQ ID NO: 97523 - RNA, 1707 nt, Artificial Sequence; identical to SEQ ID NO: 96064
  derived and/or modified CDS sequence (opt2) from hemagglutinin__InfluenzaA__ABL67781

SEQ ID NO: 97524 - RNA, 1707 nt, Artificial Sequence
  derived and/or modified CDS sequence (opt2) from hemagglutinin__InfluenzaA__ABL67794
auggagaagaucguccuccucuucgccaucgucucccucgucaaguccgaccagaucugcaucggcuaccacgccaacaacuccaccgagcaggucgacaccaucauggagaagaacgucaccgucacccacgcccaggacauccucgagaagacccacaacggcaagcucugcgaccucgacggcgucaagccccucauccuccgcgacugcuccgucgccggcuggcuccucggcaaccccaugugcgacgaguucaucaacguccccgagugguccuacaucgucgagaaggccaaccccgucaacgaccucugcuaccccggcgacuucaacgacuacgaggagcucaagcaccuccucucccgcaucaaccacuucgagaagauccagaucauccccaaguccuccugguccucccacgaggccucccucggcgucuccuccgccugccccuaccagggcaaguccuccuucuuccgcaacgucgucuggcucaucaagaagaacuccaccuaccccaccaucaagcgcuccuacaacaacaccaaccaggaggaccuccucguccucuggggcauccaccaccccaacgacgccgccgagcagaccaagcucuaccagaaccccaccaccuacaucuccgucggcaccuccacccucaaccagcgccucgucccccgcaucgccacccgcuccaaggucaacggccaguccggccgcauggaguucuucuggaccauccucaagcccaacgacgccaucaacuucgaguccaacggcaacuucaucgcccccgaguacgccuacaagaucgucaagaagggcgacuccaccaucaugaaguccgagcucgaguacggcaacugcaacaccaagugccagacccccaugggcgccaucaacuccuccaugcccuuccacaacauccacccccucaccaucggcgagugccccaaguacgucaaguccaaccgccucguccucgccaccggccuccgcaacuccccccagcgcgagaagcgccgcaagaagcgcggccucuucggcgccaucgccggcuucaucgagggcggcuggcagggcauggucgacggcugguacggcuaccaccacuccaacgagcagggcuccggcuacgccgccgacaaggaguccacccagaaggccaucgacggcgucaccaacaaggucaacuccaucaucgacaagaugaacacccaguucgaggccgucggccgcgaguucaacaaccucgagcgccgcaucgagaaccucaacaagaagauggaggacggcuuccucgacgucuggaccuacaacgccgagcuccucguccucauggagaacgagcgcacccucgacuuccacgacuccaacgucaagaaccucuacgacaagguccgccuccagcuccgcgacaacgccaaggagcucggcaacggcugcuucgaguucuaccacaagugcgacaacgagugcauggaguccguccgcaacggcaccuacgacuacccccaguacuccgaggaggcccgccucaagcgcgaggagaucuccggcgucaagcucgaguccaucggcaucuaccagauccucuccaucuacuccaccgucgccuccucccucgcccucgccaucauggucgccggccucucccucuggaugugcuccaacggcucccuccagugccgcaucugcaucuga

SEQ ID NO: 97525 - RNA, 1707 nt, Artificial Sequence
  derived and/or modified CDS sequence (opt2) from hemagglutinin__InfluenzaA__ABL67816
auggagaagaucguccuccucuucgccaucgucucccucgucaaguccgaccagaucugcaucggcuaccacgccaacaacuccaccgagcaggucgacaccaucauggagaagaacgucaccgucacccacgcccaggacauccucgagaagacccacaacggcaagcucugcgaccucgacggcgucaagccccucauccuccgcgacugcuccgucgccggcuggcuccucggcaaccccaugugcgacgaguucaucaacguccccgagugguccuacaucgucgagaaggccaaccccgucaacgaccucugcuaccccggcgacuucaacgacuacgaggagcucaagcaccuccucucccgcaucaaccacuucgagaagauccagaucauccccaaguccuccugguccucccacgaggccucccucggcgucuccuccgccugccccuaccagggcaaguccuccuucuuccgcaacgucgucuggcucaucaagaagaacuccaccuaccccaccaucaagcgcuccuacaacaacaccaaccaggaggaccuccucguccucuggggcauccaccaccccaacgacgccgccgagcagaccaagcucuaccagaaccccaccaccuacaucuccgucggcaccuccacccucaaccagcgccucgucccccgcaucgccacccgcuccaaggucaacggccaguccggccgcauggaguucuucuggaccauccucaagcccaacgacgccaucaacuucgaguccaacggcaacuucaucgcccccgaguacgccuacaagaucgucaagaagggcgacuccaccaucaugaaguccgagcucgaguacggcaacugcaacaccaagugccagacccccaugggcgccaucaacuccuccaugcccuuccacaacauccacccccucaccaucggcgagugccccaaguacgucaaguccaaccgccucguccucgccaccggccuccgcaacuccccccagcgcgagcgccgccgcaagaagcgcggccucuucggcgccaucgccggcuucaucgagggcggcuggcagggcauggucgacggcugguacggcuaccaccacuccaacgagcagggcuccggcuacgccgccgacaaggaguccacccagaaggccaucgacggcgucaccaacaaggucaacuccaucaucaacaagaugaacacccaguucgaggccgucggccgcgaguucaacaaccucgagcgccgcaucgagaaccucaacaagaagauggaggacggcuuccucgacgucuggaccuacaacgccgagcuccucguccucauggagaacgagcgcacccucgacuuccacgacuccaacgucaagaaccucuacgacaagguccgccuccagcuccgcgacaacgccaaggagcucggcaacggcugcuucgaguucuaccacaagugcgacaacgagugcauggaguccguccgcaacggcaccuacgacuacccccaguacuccgaggaggcccgccucaagcgcgaggagaucuccggcgucaagcucgaguccaucggcaucuaccagauccucuccaucuacuccaccgucgccuccucccucgcccucgccaucauggucgccggccucucccucuggaugugcuccaacggcucccuccagugccgcaucugcaucuga

SEQ ID NO: 97526 - RNA, 1707 nt, Artificial Sequence
  derived and/or modified CDS sequence (opt2) from hemagglutinin__InfluenzaA__ABL67827
auggagaagaucguccuccucuucgccaucgucucccucgucaaguccgaccacaucugcaucggcuaccacgccaacaacuccaccgagcaggucgacaccaucauggagaagaacgucaccgucacccacgcccaggacauccucgagaagacccacaacggcaagcucugcgaccucgacggcgucaagccccucauccuccgcgacugcuccgucgccggcuggcuccucggcaaccccaugugcgacgaguucaucaacguccccgagugguccuacaucgucgagaaggccaaccccgucaacgaccucugcuaccccggcgacuucaacgacuacgaggagcucaagcaccuccucucccgcaucaaccacuucgagaagauccagaucauccccaaguccuccugguccucccacgaggccucccucggcgucuccuccgccugccccuaccagggcaaguccuccuucuuccgcaacgucgucuggcucaucaagaagaacuccaccuaccccaccaucaagcgcuccuacaacaacaccaaccaggaggaccuccucguccucuggggcauccaccaccccaacgacgccgccgagcagaccaagcucuaccagaaccccaccaccuacaucuccgucggcaccuccacccucaaccagcgccucgucccccgcaucgccacccgcuccaaggucaacggccaguccggccgcauggaguucuucuggaccauccucaagcccaacgacgccaucaacuucgaguccaacggcaacuucaucgcccccgaguacgccuacgagaucgucaagaagggcgacuccaccaucaugaaguccgagcucgaguacggcaacugcaacaccaagugccagacccccaugggcgccaucaacuccuccaugcccuuccacaacauccacccccucaccaucggcgagugccccaaguacgucaaguccaaccgccucguccucgccaccggccuccgcaacuccccccagaucgagcgccgccgcaagaagcgcggccucuucggcgccaucgccggcuuccucgagggcggcuggcagggcauggucgacggcugguacggcuaccaccacuccaacgagcagggcuccggcuacgccgccgacaaggaguccacccagaaggccaucgacggcgucaccaacaaggucaacuccaucaucaacaagaugaacacccaguucgaggccgucggccgcgaguucaacaaccucgagcgccgcaucgagaaccucaacaagaagauggaggacggcuuccucgacgucuggaccuacaacgccgagcuccucguccucauggagaacgagcgcacccucgacuuccacgacuccaacgucaagaaccucuacgacaagguccgccuccagcuccgcgacaacgccaaggagcucggcaacggcugcuucgaguucuaccacaagugcgacaacgagugcauggaguccguccgcaacggcaccuacgacuacccccaguacuccgaggaggcccgccucaagcgcgaggagaucuccggcgucaagcucgaguccaucggcaucuaccagauccucuccaucuacuccaccgucgccuccucccucgcccucgccaucauggucgccggccucucccucuggaugugcuccaacggcucccuccagugccgcaucugcaucuga

SEQ ID NO: 97527 - RNA, 1701 nt, Artificial Sequence
  derived and/or modified CDS sequence (opt2) from hemagglutinin__InfluenzaA__ABM22015
augaagaccaucaucgcccucuccuacauccucugccucgucuucgcccagaagcuccccggcaacgacaacuccaccgccacccucugccucggccaccacgccguccccaacggcaccaucgucaagaccaucaccaacgaccagaucgaggucaccaacgccaccgagcucguccaguccuccuccaccggcggcaucugcgacuccccccaccagauccucgacggcgagaacugcacccucaucgacgcccuccucggcgacccccagugcgacggcuuccagaacaagaagugggaccucuucgucgagcgcuccaaggccuacuccaacugcuaccccuacgacguccccgacuacgccucccuccgcucccucgucgccuccuccggcacccucgaguucaacaacgaguccuucaacuggaccggcgucacccagaacggcaccuccuccgccugcaagcgccgcuccaacaacuccuucuucucccgccucaacuggcucacccaccucaaguucaaguaccccgcccucaacgucaccaugcccaacaacgagaaguucgacaagcucuacaucuggggcguccaccaccccggcaccgacaacgaccagaucuuccucuacgcccaggccuccggccgcaucaccgucuccaccaagcgcucccagcagaccgucauccccaacaucggcucccgcccccgcguccgcaacauccccucccgcaucuccaucuacuggaccaucgucaagcccggcgacauccuccucaucaacuccaccggcaaccucaucgccccccgcggcuacuucaagauccgcuccggcaaguccuccaucaugcgcuccgacgcccccaucggcaagugcaacuccgagugcaucacccccaacggcuccauccccaacgacaagcccuuccagaacgucaaccgcaucaccuacggcgccugcccccgcuacgucaagcagaacacccucaagcucgccaccggcaugcgcaacguccccgagaagcagacccgcggcaucuucggcgccaucgccggcuucaucgagaacggcugggagggcauggucgacggcugguacggcuuccgccaccagaacuccgagggcaucggccaggccgccgaccucaaguccacccaggccgccaucaaccagaucaacggcaagcucaaccgccucaucggcaagaccaacgagaaguuccaccagaucgagaaggaguucuccgaggucgagggccgcauccaggaccucgagaaguacgucgaggacaccaagaucgaccucugguccuacaacgccgagcuccucgucgcccucgagaaccagcacaccaucgaccucaccgacuccgagaugaacaagcucuucgagcgcaccaagaagcagcuccgcgagaacgccgaggacaugggcaacggcugcuucaagaucuaccacaagugcgacaacgccugcaucggcuccauccgcaacggcaccuacgaccacgacgucuaccgcgacgaggcccucaacaaccgcuuccagaucaagggcgucgagcucaaguccggcuacaaggacuggauccucuggaucuccuucgccaucuccugcuuccuccucugcgucgcccuccucggcuucaucaugugggccugccagaagggcaacauccgcugcgacaucugcaucuga

SEQ ID NO: 97528 - RNA, 1701 nt, Artificial Sequence
  derived and/or modified CDS sequence (opt2) from hemagglutinin__InfluenzaA__ABM22026
augaaggccaagcuccucguccuccucugcgccuucaccgccaccuacgccgacaccaucugcaucggcuaccacgccaacaacuccaccgacaccgucgacaccguccucgagaagaacgucaccgucacccacuccgucaaccuccucgaggacucccacaacggcaagcucugccgccucaagggcaccgccccccuccagcucggcaacugcuccaucgccggcuggauccucggcaaccccgagugcgagucccucuucuccaaggaguccugguccuacaucgccgagacccccaaccccaagaacggcaccugcuaccccggcuacuucgccgacuacgaggagcuccgcgagcagcucuccuccgucuccuccuucaagcgcuucgagaucuuccccaaggacuccuccuggcccaaccacaccgucaccaagggcgucaccgccuccugcucccacaacggcaaguccuccuucuacaagaaccuccucuggcucaccgagaagaacggccucuaccccaaccucuccaaguccuacgucaacaagaagggcaaggagguccucguccucuggggcguccaccaccccuccaacaugggcgaccagcgcgccaucuaccacaaggagaacgccuacgucuccguccucuccucccacuacucccgccgcuucacccccgagaucgcccgccgccccaagguccgcgaccaggagggccgcaucaacuacuacuggacccuccucgagcccggcgacaccaucaucuucgaggccaacggcaaccucaucgcccccugguacgccuucgcccucucccgcggcuucggcuccggcaucaucaucuccaacgccuccaugggcgagugcgacgccaagugccagaccccccagggcgccaucaacuccucccuccccuuccagaacguccaccccgucaccaucggcgagugccccaaguacguccgcuccaccaagcuccgcauggucaccggccuccgcaacguccccuccauccagucccgcggccucuucggcgccaucgccggcuucaucgagggcggcuggaccggcaugaucgacggcugguacggcuaccaccaccagaacgagcagggcuccggcuacgccgccgaccagaaguccacccagaacgccaucaacggcaucaccaacaaggucaacuccaucaucgagaagaugaacacccaguucaccgccgucggcaaggaguucaacaagcucgagcgccgcauggagaaccucaacaagaaggucgacgacggcuuccucgacaucuggaccuacaacgccgagcuccucguccuccucgagaacgagcgcacccucgacuuccacgacuccaacgucaagaaccucuacgagaaggucaagaaccagcucaagaacaacgccaaggagaucggcaacggcugcuucgaguucuaccacaagugcaacaacgagugcauggaguccgucaagaacggcaccuacgacuaccccaaguacuccaaggaguccaagcucaaccgcgagaagaucgacggcgucaagcucgaguccaugggcgucuaccagauccucgccaucuacuccaccgucgccuccucccucguccuccucgucucccucggcgccaucuccuucuggaugugcuccaacggcucccuccagugccgcaucugcaucuga

SEQ ID NO: 97529 - RNA, 1701 nt, Artificial Sequence; identical to SEQ ID NO: 96669
  derived and/or modified CDS sequence (opt2) from hemagglutinin__InfluenzaA__ABM22037

SEQ ID NO: 97530 - RNA, 1701 nt, Artificial Sequence; identical to SEQ ID NO: 96087
  derived and/or modified CDS sequence (opt2) from hemagglutinin__InfluenzaA__ABM22059

SEQ ID NO: 97531 - RNA, 1701 nt, Artificial Sequence; identical to SEQ ID NO: 97341
  derived and/or modified CDS sequence (opt2) from hemagglutinin__InfluenzaA__ABM22070

SEQ ID NO: 97532 - RNA, 1701 nt, Artificial Sequence
  derived and/or modified CDS sequence (opt2) from hemagglutinin__InfluenzaA__ABM22081
augaagaccaucaucgcccucuccuacauccucugccucgucuucgcccagaagcuccccggcaacgacaacuccaccgccacccucugccucggccaccacgccguccccaacggcaccaucgucaagaccaucaccaacgaccagaucgaggucaccaacgccaccgagcucguccaguccuccuccaccggcggcaucugcgacuccccccaccagauccucgacggcgagaacugcacccucaucgacgcccuccucggcgacccccagugcgacggcuuccagaacaagaagugggaccucuucgucgagcgcuccaaggccuacuccaacugcuaccccuacgacguccccgaccacgccucccuccgcucccucgucgccuccuccggcacccucgaguucaacaacgaguccuucgacuggaccggcgucacccagaacggcaccuccuccgccugcaagcgccgcuccaacaaguccuucuucucccgccucaacuggcucacccaccucaaguacaaguaccccgcccucaacgucaccaugcccaacaacgagaaguucgacaagcucuacaucuggggcguccaccaccccggcaccgacuccgaccagaucucccucuacgcccaggccuccggccgcaucaccgucuccaccaagcgcucccagcagaccgucauccccaacaucggcucccgcccccgcguccgcgacgucuccucccgcaucuccaucuacuggaccaucgucaagcccggcgacauccuccucaucaacuccaccggcaaccucaucgccccccgcggcuacuucaagauccgcuccggcaaguccuccaucaugcgcuccgacgcccccaucggcaagugcaacuccgagugcaucacccccaacggcuccauccccaacgacaagcccuuccagaacgucaaccgcaucaccuacggcgccugcccccgcuacgucaagcagaacacccucaagcucgccaccggcaugcgcaacauccccgagaagcagacccgcggcaucuucggcgccaucgccggcuucaucgagaacggcugggagggcauggucgacggcugguacggcuuccgccaccagaacuccgagggcaccggccaggccgccgaccucaaguccacccaggccgccaucaaccagaucaacggcaagcucaaccgccucaucggcaagaccaacgagaaguuccaccagaucgagaaggaguucuccgaggucgagggccgcauccaggaccucgagaaguacgucgaggacaccaagaucgaccucugguccuacaacgccgagcuccucgucgcccucgagaaccagcacaccaucgaccucaccgacuccgagaugaacaagcucuucgagcgcaccaagaagcagcuccgcgagaacgccgaggacaugggcaacggcugcuucaagaucuaccacaagugcgacaacgccugcaucggcuccauccgcaacggcaccuacgaccacgacgucuaccgcgacgaggcccucaacaaccgcuuccagaucaagggcgucgagcucaaguccggcuacaaggacuggauccucuggaucuccuucgccaucuccugcuuccuccucugcgucgcccuccucggcuucaucaugugggccugccagaagggcaacauccgcugcaacaucugcaucuga

SEQ ID NO: 97533 - RNA, 1701 nt, Artificial Sequence
  derived and/or modified CDS sequence (opt2) from hemagglutinin__InfluenzaA__ABM22092
augaagaccaucaucgcccucuccuacauccucugccucgucuucgcccagaagcuccccggcaacgacaacuccaccgccacccucugccucggccaccacgccguccccaacggcaccaucgucaagaccaucaccaacgaccagaucgaggucaccaacgccaccgagcucguccaguccuccuccaccggcgagaucugcgacuccccccaccagauccucgacggcgagaacugcacccucaucgacgcccuccucggcgacccccagugcgacggcuuccagaacaagaagugggaccucuucgucgagcgcuccaaggccuacuccaacugcuaccccuacgacguccccgaccacgccucccuccgcucccucgucgccuccuccggcacccucgaguucaacaacgaguccuucgacugggccggcgucacccagaacggcaccuccuccgccugcaagcgccgcuccaacaaguccuucuucucccgccucaacuggcucacccaccucaaguacaaguaccccgcccucaacgucaccaugcccaacaacgagaaguucgacaagcucuacaucuggggcguccaccaccccggcaccgacuccgaccagaucucccucuacgcccaggccuccggccgcaucaccgucuccaccaagcgcucccagcagaccgucauccccaacaucggcucccgcccccgcguccgcgacgucuccucccgcaucuccaucuacuggaccaucgucaagcccggcgacauccuccucaucaacuccaccggcaaccucaucgccccccgcggcuacuucaagauccgcuccggcaaguccuccaucaugcgcuccgacgcccccaucggcaagugcaacuccgagugcaucacccccaacggcuccauccccaacgacaagcccuuccagaacgucaaccgcaucaccuacggcgccugcccccgcuacgucaagcagaacacccucaagcucgccaccggcaugcgcaacguccccgagaagcagacccgcggcaucuucggcgccaucgccggcuucaucgagaacggcugggagggcauggucgacggcugguacggcuuccgccaccagaacuccgagggcaccggccaggccgccgaccucaaguccacccaggccgccaucaaccagaucaacggcaagcucaaccgccucaucggcaagaccaacgagaaguuccaccagaucgagaaggaguucuccgaggucgagggccgcauccaggaccucgagaaguacgucgaggacaccaagaucgaccucugguccuacaacgccgagcuccucgucgcccucgagaaccagcacaccaucgaccucaccgacuccgagaugaacaagcucuucgagcgcaccaagaagcagcuccgcgagaacgccgaggacaugggcaacggcugcuucaagaucuaccacaagugcgacaacgccugcaucggcuccauccgcaacggcaccuacgaccacgacgucuaccgcgacgaggcccucaacaaccgcuuccagaucaagggcgucgagcucaaguccggcuacaaggacuggauccucuggaucuccuucgccaucuccugcuuccuccucugcgucgcccuccucggcuucaucaugugggccugccagaagggcaacauccgcugcaacaucugcaucuga

SEQ ID NO: 97534 - RNA, 1701 nt, Artificial Sequence; identical to SEQ ID NO: 97346
  derived and/or modified CDS sequence (opt2) from hemagglutinin__InfluenzaA__ABM22103

SEQ ID NO: 97535 - RNA, 1701 nt, Artificial Sequence; identical to SEQ ID NO: 96552
  derived and/or modified CDS sequence (opt2) from hemagglutinin__InfluenzaA__ABM22114

SEQ ID NO: 97536 - RNA, 1701 nt, Artificial Sequence; identical to SEQ ID NO: 97491
  derived and/or modified CDS sequence (opt2) from hemagglutinin__InfluenzaA__ABM22125

SEQ ID NO: 97537 - RNA, 1701 nt, Artificial Sequence
  derived and/or modified CDS sequence (opt2) from hemagglutinin__InfluenzaA__ABM22136
augaagaccaucaucgcccucuccuacauccucugccucgucuucgcccagaagcuccccggcaacgacaacuccaccgccacccucugccucggccaccacgccguccccaacggcaccaucgucaagaccaucaccaacgaccagaucgaggucaccaacgccaccgagcucguccaguccuccuccaccggcggcaucugcgacuccccccaccagauccucgacggcgagaacugcacccucaucgacgcccuccucggcgacccccagugcgacggcuuccagaacaagaagugggaccucuucgucgagcgcuccaaggccuacuccaacugcuaccccuacgacguccccgacuacgccucccuccgcucccucgucgccuccuccggcacccucgaguucaacaacgaguccuucaacuggaccggcgucacccagaacggcaccuccuccgccugcaagcgccgcuccaacaacuccuucuucucccgccucaacuggcucacccaccucaaguucaaguaccccgcccucaacgucaccaugcccaacaacgagaaguucgacaagcucuacaucuggggcguccaccaccccggcaccgacaacgaccagaucuuccucuacgcccaggccuccggccgcaucaccgucuccaccaagcgcucccagcagaccgucauccccaacaucggcucccgcccccgcguccgcaacauccccucccgcaucuccaucuacuggaccaucgucaagcccggcgacauccuccucaucaacuccaccggcaaccucaucgccccccgcggcuacuucaagauccgcuccggcaaguccuccaucaugcgcuccgacgcccccaucggcaagugcaacuccgagugcaucacccccaacggcuccauccccaacgacaagcccuuccagaacgucaaccgcaucaccuacggcgccugcccccgcuacgucaagcagaacacccucaagcucgccaucggcaugcgcaacguccccgagaagcagacccgcggcaucuucggcgccaucgccggcuucaucgagaacggcugggagggcauggucgacggcugguacggcuuccgccaccagaacuccgagggcaucggccaggccgccgaccucaaguccacccaggccgccaucaaccagaucaacggcaagcucaaccgccucaucggcaagaccaacgagaaguuccaccagaucgagaaggaguucuccgaggucgagggccgcauccaggaccucgagaaguacgucgaggacaccaagaucgaccucugguccuacaacgccgagcuccucgucgcccucgagaaccagcacaccaucgaccucaccgacuccgagaugaacaagcucuucgagcgcaccaagaagcagcuccgcgagaacgccgaggacaugggcaacggcugcuucaagaucuaccacaagugcgacaacgccugcaucggcuccauccgcaacggcaccuacgaccacgacgucuaccgcgacgaggcccucaacaaccgcuuccagaucaagggcgucgagcucaaguccggcuacaaggacuggauccucuggaucuccuucgccaucuccugcuuccuccucugcgucgcccuccucggcuucaucaugugggccugccagaagggcaacauccgcugcaacaucugcaucuga

SEQ ID NO: 97538 - RNA, 1701 nt, Artificial Sequence; identical to SEQ ID NO: 96669
  derived and/or modified CDS sequence (opt2) from hemagglutinin__InfluenzaA__ABM22147

SEQ ID NO: 97539 - RNA, 1701 nt, Artificial Sequence; identical to SEQ ID NO: 96957
  derived and/or modified CDS sequence (opt2) from hemagglutinin__InfluenzaA__ABM22158

SEQ ID NO: 97540 - RNA, 1701 nt, Artificial Sequence; identical to SEQ ID NO: 96957
  derived and/or modified CDS sequence (opt2) from hemagglutinin__InfluenzaA__ABM22169

SEQ ID NO: 97541 - RNA, 1701 nt, Artificial Sequence; identical to SEQ ID NO: 96957
  derived and/or modified CDS sequence (opt2) from hemagglutinin__InfluenzaA__ABM22180

SEQ ID NO: 97542 - RNA, 1701 nt, Artificial Sequence; identical to SEQ ID NO: 96957
  derived and/or modified CDS sequence (opt2) from hemagglutinin__InfluenzaA__ABM22191

SEQ ID NO: 97543 - RNA, 1701 nt, Artificial Sequence; identical to SEQ ID NO: 96957
  derived and/or modified CDS sequence (opt2) from hemagglutinin__InfluenzaA__ABM22202

SEQ ID NO: 97544 - RNA, 1701 nt, Artificial Sequence; identical to SEQ ID NO: 96957
  derived and/or modified CDS sequence (opt2) from hemagglutinin__InfluenzaA__ABM22213

SEQ ID NO: 97545 - RNA, 1701 nt, Artificial Sequence; identical to SEQ ID NO: 96957
  derived and/or modified CDS sequence (opt2) from hemagglutinin__InfluenzaA__ABM22224

SEQ ID NO: 97546 - RNA, 1701 nt, Artificial Sequence; identical to SEQ ID NO: 96957
  derived and/or modified CDS sequence (opt2) from hemagglutinin__InfluenzaA__ABM22235

SEQ ID NO: 97547 - RNA, 1701 nt, Artificial Sequence
  derived and/or modified CDS sequence (opt2) from hemagglutinin__InfluenzaA__ABM22268
augaaggucaagcuccucguccuccucugcgccuucaccgccaccuacgccgacaccaucugcaucggcuaccacgccaacaacuccaccgacaccgucgacaccguccucgagaagaacgucaccgucacccacuccgucaaccuccucgaggacucccacaacggcaagcucugccgccucaagggcaccgccccccuccagcucggcaacugcuccgucgccggcuggauccucggcaaccccgagugcgagucccucuucuccaaggaguccugguccuacaucgccgagacccccaaccccgagaacggcaccugcuaccccggcuacuucgccgacuacgaggagcuccgcgagcagcucuccuccgucuccuccuucgagcgcuucgagaucuuccccaaggaguccuccuggcccaaccacaccgucaccaagggcgucaccgccuccugcucccacaacggcaaguccuccuucuacaagaaccuccucuggcucaccgagaagaacggccucuaccccaaccucuccaaguccuacgucaacaacaaggagaaggagguccucguccucuggggcguccaccaccccuccaacaucggcgaccagcgcgccaucuaccacaccgagaacgccuacgucuccgucgucuccucccacuacucccgccgcuucacccccgagaucgccaagcgccccaagguccgcgaccaggagggccgcaucaacuacuacuggacccuccucgagcccggcgacaccaucaucuucgaggccaacggcaaccucaucgcccccugguacgccuucgcccucucccgcggcuucggcuccggcaucaucaccuccaacgccuccaugggcgagugcgacgccaagugccagaccccccagggcgccaucaacuccucccuccccuuccagaacguccaccccgucaccaucggcgagugccccaaguacguccgcuccaccaagcuccgcauggucaccggccuccgcaacauccccuccauccagucccgcggccucuucggcgccaucgccggcuucaucgagggcggcuggaccggcaugaucgacggcugguacggcuaccaccaccagaacgagcagggcuccggcuacgccgccgaccagaaguccacccagaacgccaucgacggcaucaccaacaaggucaacuccgucaucgagaagaugaacacccaguucaccgccgucggcaaggaguucaacaagcucgagcgccgcauggagaaccucaacaagaaggucgacgacggcuuccucgacaucuggaccuacaacgccgagcuccucguccuccucgagaacgagcgcacccucgacuuccacgacuccaacgucaagaaccucuacgagaaggucaagaaccagcucaagaacaacgccaaggagaucggcaacggcugcuucgaguucuaccacaagugcaacaacgagugcauggaguccgucaagaacggcaccuacgacuaccccaaguacuccgaggaguccaagcucaaccgcgagaagaucgacggcgucaagcucgaguccaugggcgucuaccagauccucgccaucuacuccaccgucgccuccucccucguccuccucgucucccucggcgccaucuccuucuggaugugcuccaacggcucccuccagugccgcaucugcaucuga

SEQ ID NO: 97548 - RNA, 1701 nt, Artificial Sequence
  derived and/or modified CDS sequence (opt2) from hemagglutinin__InfluenzaA__ABM22279
augaaggccaagcuccucguccuccucugcgccuucaccgccaccuacgccgacaccaucugcaucggcuaccacgccaacaacuccaccgacaccgucgacaccguccucgagaagaacgucaccgucacccacuccgucaaccuccucgaggaccgccacaacggcaagcucugccgccucaagggcaccgccccccuccagcucggcaacugcuccgucgccggcuggauccucggcaaccccgagugcgagucccucuucuccaaggaguccugguccuacaucgccgagacccccaaccccgagaacggcaccugcuaccccggcuacuucgccgacuacgaggagcuccgcgagcagcucuccuccgucuccuccuucgagcgcuucgagaucuuccccaaggaguccuccuggcccaaccacaccgucaccaagggcgucaccgccuccugcucccacaacggcaaguccuccuucuacaagaaccuccucuggcucaccgagaagaacggccucuaccccaaccucuccaaguccuacgucaacaacaaggagaaggagguccucguccucuggggcguccaccaccccuccaacaucggcgaccagcgcgccaucuaccacaccgagaacgccuacgucuccgucgucuccucccacuacucccgccgcuucacccccgagaucgccaagcgccccaagguccgcgaccaggagggccgcaucaacuacuacuggacccuccucgagcccggcgacaccaucaucuucgaggccaacggcaaccucaucgcccccugguacgccuucgcccucucccgcggcuucggcuccggcaucaucaccuccaacgccuccaugggcgacugcgacgccaagugccagaccccccagggcgccaucaacuccucccuccccuuccagaacguccaccccgucaccaucggcggcugccccaaguacguccgcuccaccaagcuccgcauggucaccggccuccgcaacauccccuccauccagucccgcggccucuucggcgccaucgccggcuucaucgagggcggcuggaccggcaugaucgacggcugguacggcuaccaccaccagaacgagcagggcuccggcuacgccgccgacaagaaguccacccagaacgccaucgacggcaucaccaacaaggucaacuccgucaucgagaagaugaacacccaguucaccgccgucggcaaggaguucaacaagcucgagcgccgcauggagaaccucaacaagaaggucgacgacggcuuccucgacaucuggaccuacaacgccgagcuccucguccuccucgagaacgagcgcacccucgacuaccacgacuccaacgucaagaaccucuacgagaaggucaagaaccagcucaagaacaacgccaaggagaucggcaacggcugcuucgaguucuaccacaagugcaacaacgagugcauggaguccgucaagaacggcaccuacgacuaccccaaguacuccgaggaguccaagcucaagcgcgagaagaucgacggcgucaagcucgaguccaugggcgucuaccagauccucgccaucuacuccaccgucgccuccucccucguccuccucgucucccucggcgccaucuccuucuggaugugcuccaacggcucccuccagugccgcaucugcaucuga

SEQ ID NO: 97549 - RNA, 1701 nt, Artificial Sequence
  derived and/or modified CDS sequence (opt2) from hemagglutinin__InfluenzaA__ABM22290
augaaggccaagcuccucguccuccucugcgccuucaccgccaccuacgccgacaccaucugcaucggcuaccacgccaacaacuccaccgacaccgucgacaccguccucgagaagaacgucaccgucacccacuccgucaaccuccucgagaacucccacaacggcaagcucugccgccucaagggcaccgccccccuccagcucggcaacugcuccgucgccggcuggauccucggcaaccccgagugcgagucccucuucuccaaggaguccugguccuacaucgccgagacccccaaccccgagaacggcaccugcuaccccggcuacuucgccgacuacgaggagcuccgcgagcagcucuccuccgucuccuccuucgagcgcuucgagaucuuccccaaggaguccuccuggcccaaccacaccgucaccaagggcgucaccgccuccugcucccacaacggcaaguccuccuucuacaagaaccuccucuggcucaccgagaagaacggccucuaccccaaccucuccaaguccuacgucaacaacaaggagaaggagguccucguccucuggggcguccaccaccccuccaacaucggcgaccagcgcgccaucuaccacaccgagaacgccuacgucuccgucgucuccucccacuacucccgccgcuucacccccgagaucgccaagcgccccaagguccgcgaccaggagggccgcaucaacuacuacuggacccuccucgagcccggcgacaccaucaucuucgaggccaacggcaaccucaucgcccccugguacgccuucgcccucucccgcggcuucggcuccggcaucaucaccuccaacgccuccaugggcgagugcgacgccaagugccagaccccccagggcgccaucaacuccucccuccccuuccagaacguccaccccgucaccaucggcgagugccccaaguacguccgcuccaccaagcuccgcauggucaccggccuccgcaacauccccuccauccagucccgcggccucuucggcgccaucgccggcuucaucgagggcggcuggaccggcaugaucgacggcugguacggcuaccaccaccagaacgagcagggcuccggcuacgccgccgaccagaaguccacccagaacgccaucgacggcaucaccaacaaggucaacuccgucaucgagaagaugaacacccaguucaccgccgucggcaaggaguucaacaagcucgagcgccgcauggagaaccucaacaagaaggucgacgacggcuuccucgacaucuggaccuacaacgccgagcuccucguccuccucgagaacgagcgcacccucgacuuccacgacuccaacgucaagaaccucuacgagaaggucaagaaccagcucaagaacaacgccaaggagaucggcaacggcugcuucgaguucuaccacaagugcaacaacgagugcauggaguccgucaagaacggcaccuacgacuaccccaaguacuccgaggaguccaagcucaaccgcgagaagaucgacggcgucaagcucgaguccaugggcgucuaccagauccucgccaucuacuccaccgucgccuccucccucguccuccucgucucccucggcgccaucuccuucuggaugugcuccaacggcucccuccagugccgcaucugcaucuga

SEQ ID NO: 97550 - RNA, 1701 nt, Artificial Sequence; identical to SEQ ID NO: 96291
  derived and/or modified CDS sequence (opt2) from hemagglutinin__InfluenzaA__ABM22301

SEQ ID NO: 97551 - RNA, 1701 nt, Artificial Sequence; identical to SEQ ID NO: 96291
  derived and/or modified CDS sequence (opt2) from hemagglutinin__InfluenzaA__ABM22312

SEQ ID NO: 97552 - RNA, 1701 nt, Artificial Sequence; identical to SEQ ID NO: 96291
  derived and/or modified CDS sequence (opt2) from hemagglutinin__InfluenzaA__ABM22323

SEQ ID NO: 97553 - RNA, 1701 nt, Artificial Sequence; identical to SEQ ID NO: 96291
  derived and/or modified CDS sequence (opt2) from hemagglutinin__InfluenzaA__ABM22334

SEQ ID NO: 97554 - RNA, 1701 nt, Artificial Sequence; identical to SEQ ID NO: 96292
  derived and/or modified CDS sequence (opt2) from hemagglutinin__InfluenzaA__ABM22345

SEQ ID NO: 97555 - RNA, 1701 nt, Artificial Sequence; identical to SEQ ID NO: 96292
  derived and/or modified CDS sequence (opt2) from hemagglutinin__InfluenzaA__ABM22356

SEQ ID NO: 97556 - RNA, 1701 nt, Artificial Sequence; identical to SEQ ID NO: 96292
  derived and/or modified CDS sequence (opt2) from hemagglutinin__InfluenzaA__ABM22367

SEQ ID NO: 97557 - RNA, 1698 nt, Artificial Sequence; identical to SEQ ID NO: 96877
  derived and/or modified CDS sequence (opt2) from hemagglutinin__InfluenzaA__ABM66864

SEQ ID NO: 97558 - RNA, 1701 nt, Artificial Sequence; identical to SEQ ID NO: 96957
  derived and/or modified CDS sequence (opt2) from hemagglutinin__InfluenzaA__ABM66886

SEQ ID NO: 97559 - RNA, 1701 nt, Artificial Sequence; identical to SEQ ID NO: 96957
  derived and/or modified CDS sequence (opt2) from hemagglutinin__InfluenzaA__ABM66897

SEQ ID NO: 97560 - RNA, 1701 nt, Artificial Sequence; identical to SEQ ID NO: 96957
  derived and/or modified CDS sequence (opt2) from hemagglutinin__InfluenzaA__ABM66908

SEQ ID NO: 97561 - RNA, 1701 nt, Artificial Sequence; identical to SEQ ID NO: 96292
  derived and/or modified CDS sequence (opt2) from hemagglutinin__InfluenzaA__ABM66919

SEQ ID NO: 97562 - RNA, 1701 nt, Artificial Sequence; identical to SEQ ID NO: 96292
  derived and/or modified CDS sequence (opt2) from hemagglutinin__InfluenzaA__ABM66930

SEQ ID NO: 97563 - RNA, 1701 nt, Artificial Sequence; identical to SEQ ID NO: 96292
  derived and/or modified CDS sequence (opt2) from hemagglutinin__InfluenzaA__ABM66941

SEQ ID NO: 97564 - RNA, 1701 nt, Artificial Sequence; identical to SEQ ID NO: 96292
  derived and/or modified CDS sequence (opt2) from hemagglutinin__InfluenzaA__ABM66952

SEQ ID NO: 97565 - RNA, 1701 nt, Artificial Sequence; identical to SEQ ID NO: 96292
  derived and/or modified CDS sequence (opt2) from hemagglutinin__InfluenzaA__ABM66963

SEQ ID NO: 97566 - RNA, 1701 nt, Artificial Sequence; identical to SEQ ID NO: 96292
  derived and/or modified CDS sequence (opt2) from hemagglutinin__InfluenzaA__ABM66974

SEQ ID NO: 97567 - RNA, 1701 nt, Artificial Sequence; identical to SEQ ID NO: 96292
  derived and/or modified CDS sequence (opt2) from hemagglutinin__InfluenzaA__ABM66985

SEQ ID NO: 97568 - RNA, 1701 nt, Artificial Sequence; identical to SEQ ID NO: 96292
  derived and/or modified CDS sequence (opt2) from hemagglutinin__InfluenzaA__ABM66996

SEQ ID NO: 97569 - RNA, 1701 nt, Artificial Sequence; identical to SEQ ID NO: 96292
  derived and/or modified CDS sequence (opt2) from hemagglutinin__InfluenzaA__ABM67007

SEQ ID NO: 97570 - RNA, 1701 nt, Artificial Sequence; identical to SEQ ID NO: 96292
  derived and/or modified CDS sequence (opt2) from hemagglutinin__InfluenzaA__ABM67018

SEQ ID NO: 97571 - RNA, 1701 nt, Artificial Sequence
  derived and/or modified CDS sequence (opt2) from hemagglutinin__InfluenzaA__ABM67029
augaagaccaucaucgcccucuccuacaucaucugccucgucuucgcccagaagcuccccggcaacgacaacuccaccgccacccucugccucggccaccacgccguccccaacggcaccaucgucaagaccaucaccaacgaccagaucgaggucaccaacgccaccgagcucguccaguccuccuccaccggcgagaucugcgacuccccccaccagauccucgacggcgagaacugcacccucaucgacgcccuccucggcgacccccagugcgacggcuuccagaacaagaagugggaccucuucgucgagcgcuccaaggccuacuccaacugcuaccccuacgacguccccgacuacgccucccuccgcucccucgucgccuccuccggcacccucgaguucaacaacgaguccuucaacuggaccggcgucacccagaacggcaccuccuccgccugcaagcgccgcuccaacaacuccuucuucucccgccucaacuggcucacccaccucaaguucaaguaccccgcccucaacgucaccaugcccaacaacgagaaguucgacaagcucuacaucuggggcguccaccaccccggcaccgacaacgaccagaucuuccucuacgcccaggccuccggccgcaucaccgucuccaccaagcgcucccagcagaccgucauccccaacaucggcucccgcccccgcguccgcgacauccccucccgcaucuccaucuacuggaccaucgucaagcccggcgacauccuccucaucaacuccaccggcaaccucaucgccccccgcggcuacuuccgcauccgcuccggcaaguccuccaucaugcgcuccgacgcccccaucggcaagugcaacuccgagugcaucacccccaacggcuccauccccaacgacaagcccuuccagaacgucaaccgcaucaccuacggcgccugcccccgcuacgucaagcagaacacccucaagcucgccaccggcaugcgcaacguccccgagaagcagacccgcggcaucuucggcgccaucgccggcuucaucgagaacggcugggagggcauggucgacggcugguacggcuuccgccaccagaacuccgagggcaucggccaggccgccgaccucaaguccacccaggccgccaucaaccagaucaacggcaagcucaaccgccucaucggcaagaccaacgagaaguuccaccagaucgagaaggaguucuccgaggucgagggccgcauccaggaccucgagaaguacgucgaggacaccaagaucgaccucugguccuacaacgccgagcuccucgucgcccucgagaaccagcacaccaucgaccucaccgacuccgagaugaacaagcucuucgagcgcaccaagaagcagcuccgcgagaacgccgaggacaugggcaacggcugcuucaagaucuaccacaagugcgacaacgccugcaucggcuccauccgcaacggcaccuacgaccacgacgucuaccgcgacgaggcccucaacaaccgcuuccagaucaagggcgucgagcucaaguccggcuacaaggacuggauccucuggaucuccuucgccaucuccugcuuccuccucugcgucgcccuccucggcuucaucaugugggccugccagaagggcaacauccgcugcaacaucugcaucuga

SEQ ID NO: 97572 - RNA, 1698 nt, Artificial Sequence; identical to SEQ ID NO: 96335
  derived and/or modified CDS sequence (opt2) from hemagglutinin__InfluenzaA__ABM67051

SEQ ID NO: 97573 - RNA, 1707 nt, Artificial Sequence
  derived and/or modified CDS sequence (opt2) from hemagglutinin__InfluenzaA__ABM90467
auggagaagaucguccuccuccucuccaucgucucccucgucaaguccgaccagaucugcaucggcuaccacgccaacaacuccaccgagcaggucgacaccaucauggagaagaacgucaccgucacccacgcccaggacauccucgagaagacccacaacggcaagcucugcgaccucgacggcgucaagccccucauccuccgcgacugcuccgucgccggcuggcuccucggcaaccccaugugcgacgaguucaucaacguccccgagugguccuacaucgucgagaaggccaaccccaccaacgaccucugcuaccccggcuccuucaacgacuacgaggagcucaagcaccuccucucccgcaucaaccacuucgagaagauccagaucauccccaaguccuccugguccgaccacgaggccuccuccggcgucuccuccgccugccccuaccucggcucccccuccuucuuccgcaacgucgucuggcucaucaagaagaacuccaccuaccccaccaucaagaaguccuacaacaacaccaaccaggaggaccuccucguccucuggggcauccaccaccccaacaacgaggccgagcagacccgccucuaccagaaccccaccaccuacaucuccaucggcaccuccacccucaaccagcgccucguccccaagaucgccacccgcuccaaggucaacggccaguccggccgcauggaguucuucuggaccauccucaagcccaacgacgccaucaacuucgaguccaacggcaacuucaucgcccccgaguacgccuacaagaucgucaagaagggcgacuccgccaucaugaaguccgagcucgaguacggcaacugcaacaccaagugccagacccccaugggcgccaucaacuccuccaugcccuuccacaacauccacccccucaccaucggcgagugccccaaguacgucaaguccaaccgccucguccucgccaccggccuccgcaacuccccccagcgcgagucccgccgcaagaagcgcggccucuucggcgccaucgccggcuucaucgagggcggcuggcagggcauggucgacggcugguacggcuaccaccacuccaacgagcagggcuccggcuacgccgccgacaaggaguccacccagaaggccaucgacggcgucaccaacaaggucaacuccaucaucgacaagaugaacacccaguucgaggccgucggccgcgaguucaacaaccucgagcgccgcaucgagaaccucaacaagaagauggaggacggcuuccucgacgucuggaccuacaacgccgagcuccucguccucauggagaacgagcgcacccucgacuuccacgacuccaacgucaagaaccucuacgacaagguccgccuccagcuccgcgacaacgccaaggagcucggcaacggcugcuucgaguucuaccacaagugcgacaacgagugcauggaguccauccgcaacggcaccuacaacuacccccaguacuccgaggaggcccgccucaagcgcgaggagaucuccggcgucaagcucgaguccaucggcaccuaccagauccucuccaucuacuccaccgucgccuccucccucgcccucgccaucaugaucgccggccucucccucuggaugugcuccaacggcucccuccagugccgcaucugcaucuga

SEQ ID NO: 97574 - RNA, 1707 nt, Artificial Sequence
  derived and/or modified CDS sequence (opt2) from hemagglutinin__InfluenzaA__ABM90511
auggagaagaucguccuccuccucuccaucgucucccucgucaaguccgaccagaucugcaucggcuaccacgccaacaacuccaccgagcaggucgacaccaucaucgagaagaacgucaccgucacccacgcccaggacauccucgagaagacccacaacggcaagcucugcgaccucgacggcgucaagccccucauccucaaggacugcuccgucgccggcuggcuccucggcaaccccaugugcgacgaguucaucaacguccccgagugguccuacaucgucgagaaggccaaccccaccaacgaccucugcuaccccggcuccuucaacgacuacgaggagcucaagcaccuccucucccgcaucaaccacuucgagaagauccagaucauccccaaguccuccugguccgaccacgaggccuccuccggcgucuccuccgccugccccuaccucggcucccccuccuucuuccgcaacgucgucuggcucaucaagaagaacuccaccuaccccaccaucaagaaguccuacaacaacaccaaccaggaggaccuccucguccucuggggcauccaccaccccaacaacgaggaggagcagacccgccucuaccagaaccccaccaccuacaucuccaucggcaccuccacccucaaccagcgccucguccccaagaucgccacccgcuccaaggucaacggccaguccggccgcauggaguucuucuggaccauccucaagcccaacgacgccaucaacuucgaguccaacggcaacuucaucgcccccgaguacgccuacaagaucgucaagaagggcgacuccgccaucaugaaguccgagcucgaguacuccaacugcaacaccaagugccagacccccaugggcgccaucaacuccuccaugcccuuccacaacauccacccccucaccaucggcgagugccccaaguacgucaaguccucccgccucguccucgccaccggccuccgcaacuccccccagcgcgagucccgccgcaagaagcgcggccucuucggcgccaucgccggcuucaucgagggcggcuggcagggcauggucgacggcugguacggcuaccaccacuccaacgagcagggcuccggcuacgccgccgacaaggaguccacccagaaggccaucgacggcgucaccaacaaggucaacuccaucaucgacaagaugaacacccaguucgaggccgucggccgcgaguucaacaaccucgagcgccgcaucgagaaccucaacaagaagauggaggacggcuuccucgacgucuggaccuacaacgccgagcuccucguccucauggagaacgagcgcacccucgacuuccacgacuccaacgucaagaaccucuacgacaagguccgccuccagcuccgcgacaacgccaaggagcucggcaacggcugcuucgaguucuaccacaagugcgacaacgagugcauggaguccauccgcaacggcaccuacaacuacccccaguacuccgaggaggcccgccucaagcgcgaggagaucuccggcgucaagcucgaguccaucggcaccuaccagauccucuccaucuacuccaccgucgccuccucccucgcccucgccaucaugaucgccggccucucccucuggaugugcuccaacggcucccuccagugccgcaucugcaucuga

SEQ ID NO: 97575 - RNA, 1707 nt, Artificial Sequence
  derived and/or modified CDS sequence (opt2) from hemagglutinin__InfluenzaA__ABM90533
auggagaagaucguccuccuccucuccaucgucucccucgucaaguccgaccagaucugcaucggcuaccacgccaacaacuccaccgagcaggucgacaccaucauggagaagaacgucaccgucacccacgcccaggacauccucgagaagacccacaacggcaagcucugcgaccucgacggcgucaagccccucauccucaaggacugcuccgucgccggcuggcuccucggcaaccccaugugcgacgaguucaucaacguccccgagugguccuacaucgucgagaaggccaaccccaccaacgaccucugcuaccccggcuccuucaacgacuacgaggagcucaagcaccuccucucccgcaucaaccacuucgagaagauccagaucauccccaaguccuccugguccgaccacgaggccuccuccggcgucuccuccgccugccccuaccucggcucccccuccuucuuccgcaacgucgucuggcucaucaagaagaacuccaccuaccccaccaucaagaaguccuacaacaacaccaaccaggaggaccuccucguccucuggggcauccaccaccccaacaacgaggaggagcagacccgccucuaccagaaccccaccaccuacaucuccaucggcaccuccacccucaaccagcgccucguccccaagaucgccacccgcuccaaggucaacggccaguccggccgcauggaguucuucuggaccauccucaagcccaacgacgccaucaacuucgaguccaacggcaacuucaucgcccccgaguacgccuacaagaucgucaagaagggcgacuccgccaucaugaaguccgagcucgaguacuccaacugcaacaccaagugccagacccccaugggcgccaucaacuccuccaugcccuuccacaacauccacccccucaccaucggcgagugccccaaguacgucaaguccucccgccucguccucgccaccggccuccgcaacuccccccagcgcgagucccgccgcaagaagcgcggccucuucggcgccaucgccggcuucaucgagggcggcuggcagggcauggucgacggcugguacggcuaccaccacuccaacgagcagggcuccggcuacgccgccgacaaggaguccacccagaaggccaucgacggcgucaccaacaaggucaacuccaucaucgacaagaugaacacccaguucgaggccgucggccgcgaguucaacaaccucgagcgccgcaucgagaaccucaacaagaagauggaggacggcuuccucgacgucuggaccuacaacgccgagcuccucguccucauggagaacgagcgcacccucgacuuccacgacuccaacgucaagaaccucuacgacaagguccgccuccagcuccgcgacaacgccaaggagcucggcaacggcugcuucgaguucuaccacaagugcgacaacgagugcauggaguccauccgcaacggcaccuacaacuacccccaguacuccgaggaggcccgccucaagcgcgaggagaucuccggcgucaagcucgaguccaucggcaccuaccagauccucuccaucuacuccaccgucgccuccucccucgcccucgccaucaugaucgccggccucucccucuggaugugcuccaacggcucccuccagugccgcaucugcaucuga

SEQ ID NO: 97576 - RNA, 1707 nt, Artificial Sequence; identical to SEQ ID NO: 97575
  derived and/or modified CDS sequence (opt2) from hemagglutinin__InfluenzaA__ABM90544

SEQ ID NO: 97577 - RNA, 1701 nt, Artificial Sequence
  derived and/or modified CDS sequence (opt2) from hemagglutinin__InfluenzaA__ABN50900
augaaggccaagcuccucguccuccucugcgcccucuccgccaccgacgccgacaccaucugcaucggcuaccacgccaacaacuccaccgacaccgucgacaccguccucgagaagaacgucaccgucacccacuccgucaaccuccucgaggacucccacaacggcaagcucugccgccucaagggcaucgccccccuccagcucggcaagugcuccaucgccggcuggauccucggcaaccccgagugcgagucccucuucuccaagaaguccugguccuacaucgccgagacccccaacuccgagaacggcaccugcuaccccggcuacuucgccgacuacgaggagcuccgcgagcagcucuccuccgucuccuccuucgagcgcuucgagaucuuccccaaggaguccuccuggcccaagcacaacgucacccgcggcgucaccgccuccugcucccacaagggcaaguccuccuucuaccgcaaccuccucuggcucaccgagaagaacggcuccuaccccaaccucuccaaguccuacgucaacaacaaggagaaggagguccucguccucuggggcguccaccaccccuccaacaucgaggaccagaagaccaucuaccgcaaggagaacgccuacgucuccgucgucuccucccacuacaaccgccgcuucacccccgagaucgccaagcgccccaagguccgcggccaggagggccgcaucaacuacuacuggacccuccucgagcccggcgacaccaucaucuucgaggccaacggcaaccucaucgcccccugguacgccuucgcccucucccgcggcuucggcuccggcaucaucaccuccaacgccuccauggacgagugcgacgccaagugccagaccccccagggcgccaucaacuccucccuccccuuccagaacguccaccccgucaccaucggcgagugccccaaguacguccgcuccaccaagcuccgcauggucaccggccuccgcaacauccccuccauccagucccgcggccucuucggcgccaucgccggcuucaucgagggcggcuggaccggcaugaucgacggcugguacggcuaccaccaccagaacgagcagggcuccggcuacgccgccgaccagaaguccacccagaacgccaucaacggcaucaccaacaaggucaacuccgucaucgagaagaugaacacccaguucaccgccgucggcaaggaguucaacaagcucgagaagcgcauggagaaccucaacaagaaggucgacgacggcuuccucgacaucuggaccuacaacgccgagcuccucguccuccucgagaacgagcgcacccucgacuuccacgacuccaacgucaagaaccucuacgagaaggucaagucccagcucaagaacaacgccaaggagaucggcaacggcugcuucgaguucuaccacaagugcaacaacgagugcauggaguccgucaagaacggcaccuacgacuaccccaaguacuccgaggaguccaagcucaaccgcgagaagaucgacggcgucaagcucgaguccaugggcgucuaccagauccucgccaucuacuccaccgucgccuccucccucguccuccucgucucccucggcgccaucuccuucuggaugugcuccaacggcucccuccagugccgcaucugcaucuga

SEQ ID NO: 97578 - RNA, 1701 nt, Artificial Sequence; identical to SEQ ID NO: 96957
  derived and/or modified CDS sequence (opt2) from hemagglutinin__InfluenzaA__ABN50917

SEQ ID NO: 97579 - RNA, 1701 nt, Artificial Sequence
  derived and/or modified CDS sequence (opt2) from hemagglutinin__InfluenzaA__ABN50928
augaaggccaagcuccucauccuccucugcgccuucaccgccaccgacgccgacaccaucugcaucggcuaccacgccaacaacuccaccgacaccgucgacaccguccucgagaagaacgucaccgucacccacuccgucaaccuccucgaggacucccacaacggcaagcucugccgccucaagggcaucgccccccuccagcucggcaacugcuccaucgccggcuggauccucggcaaccccgagugcgagucccucuucuccaagaaguccugguccuacaucgccgagacccccaacuccgagaacggcaccugcuaccccggcuacuucgccgacuacgaggagcuccgcgagcagcucuccuccgucuccuccuucgagcgcuucgagaucuuccccaaggaguccuccuggcccaaccacaccgucaccaagggcgucaccgccuccugcucccacaagggcaaguccuccuucuaccgcaaccuccucuggcucaccgagaagaacggcuccuaccccaaccucuccaaguccuacgucaacaacaaggagaaggagguccucguccucuggggcguccaccaccccuccaacaucggcgaccagcgcgccaucuaccacaccgagaacgccuacgucuccgucgucuccucccacuacaaccgccgcuucacccccgagaucgccaagcgccccaagguccgcggccaggagggccgcaucaacuacuacuggacccuccucgagcccggcgacaccaucaucuucgaggccaacggcaaccucaucgcccccugguacgccuucgcccucucccgcggcuucggcuccggcaucaucaccuccaacgccuccauggacgagugcgacgccaagugccagaccccccagggcgccaucaacuccucccuccccuuccagaacguccaccccgucaccaucggcgagugccccaaguacguccgcuccaccaagcuccgcauggucaccggccuccgcaacauccccuccauccagucccgcggccucuucggcgccaucgccggcuucaucgagggcggcuggaccggcaugaucgacggcugguacggcuaccaccaccagaacgagcagggcuccggcuacgccgccgaccagaaguccacccagaacgccaucaacggcaucaccaacaaggucaacuccgucaucgagaagaugaacacccaguucaccgccgucggcaaggaguucaacaagcucgagcgccgcauggagaaccucaacaagaaggucgacgacggcuuccucgacaucuggaccuacaacgccgagcuccucguccuccucgagaacgagcgcacccucgacuuccacgacuccaacgucaagaaccucuacgagaaggucaagucccagcucaagaacaacgccaaggagaucggcaacggcugcuucgaguucuaccacaagugcaacaacgagugcauggaguccgucaagaacggcaccuacgacuaccccaaguacuccgaggaguccaagcucaaccgcgagaagaucgacggcgucaagcucgaguccaugggcgucuaccagauccucgccaucuacuccaccgucgccuccucccucguccuccucgucucccucggcgccaucuccuucuggaugugcuccaacggcucccuccagugccgcaucugcaucuga

SEQ ID NO: 97580 - RNA, 1701 nt, Artificial Sequence
  derived and/or modified CDS sequence (opt2) from hemagglutinin__InfluenzaA__ABN50940
augaaggccaagcuccucguccuccucugcgccuucaccgccaccgacgccgacaccaucugcaucggcuaccacgccaacaacuccaccgacaccgucgacaccguccucgagaagaacgucaccgucacccacuccgucaaccuccucgaggacucccacaacggcaagcucugccgccucaagggcaucgccccccuccagcucggcaacugcuccaucgccggcuggauccucggcaaccccgagugcgagucccucuucuccaagaaguccugguccuacaucgccgagacccccaacuccgagaacggcaccugcuaccccggcuacuucuccgacuacgaggagcuccgcgagcagcucuccuccgucuccuccuucgagcgcuucgagaucuuccccaaggaguccuccuggcccaaccacaccgucaccaagggcgucaccgccuccugcucccacaagggcaaguccuccuucuaccgcaaccuccucuggcucaccgagaagaacggcuccuaccccaaccucuccaaguccuacgucaacaacaaggagaaggagguccucguccucuggggcguccaccaccccuccaacaucggcgaccagcgcgccaucuaccacaccgagaacgccuacgucuccgucgucuccucccacuacaaccgccgcuucacccccgagaucgccaagcgccccaagguccgcgaccaggagggccgcaucaacuacuacuggacccuccucgagcccgaggacaccaucaucuucgaggccaacggcaaccucaucgcccccugguacgccuucgcccucucccgcggcuucggcuccggcaucaucaccuccaacgccuccauggacgagugcgacgccaagugccagaccccccagggcgccaucaacuccucccuccccuuccagaacguccaccccgucaccaucggcgagugccccaaguacguccgcuccaccaagcuccgcauggucaccggccuccgcaacauccccuccauccagucccgcggccucuucggcgccaucgccggcuucaucgagggcggcuggaccggcaugaucgacggcugguacggcuaccaccaccagaacgagcagggcuccggcuacgccgccgaccagaaguccacccagaacgccaucaacggcaucaccaacaaggucaacuccgucaucgagaagaugaacacccaguucaccgccgucggcaaggaguucaacaagcucgagcgccgcauggagaaccucaacaagaaggucgacgacggcuuccucgacaucuggaccuacaacgccgagcuccucguccuccucgagaacgagcgcacccucgacuuccacgacuccaacgucaagaaccucuacgagaaggucaagucccagcucaagaacaacgccaaggagaucggcaacggcugcuucgaguucuaccacaagugcaacaacgagugcauggaguccgucaagaacggcaccuacgacuaccccaaguacuccgaggaguccaagcucaaccgcgagaagaucgacggcgucaagcucgaguccaugggcgucuaccagauccucgccaucuacuccaccgucgccuccucccucguccuccucgucucccucggcgccaucuccuucuggaugugcuccaacggcucccuccagugccgcaucugcaucuga

SEQ ID NO: 97581 - RNA, 1701 nt, Artificial Sequence; identical to SEQ ID NO: 97547
  derived and/or modified CDS sequence (opt2) from hemagglutinin__InfluenzaA__ABN50951

SEQ ID NO: 97582 - RNA, 1701 nt, Artificial Sequence
  derived and/or modified CDS sequence (opt2) from hemagglutinin__InfluenzaA__ABN50962
augaaggccaagcuccucguccuccucugcgccuucaccgccaccuacgccgacaccaucugcaucggcuaccacgccaacaacuccaccgacaccgucgacaccguccucgagaagaacgucaccgucacccacuccgucaaccuccucgaggacucccacaacggcaagcucugccgccucaagggcaccgccccccuccagcucggcaacugcuccgucgccggcuggauccucggcaaccccgagugcgagucccucuucuccaaggaguccugguccuacaucgccgagacccccaaccccgagaacggcaccugcuaccccggcuacuucgccgacuacgaggagcuccgcgagcagcucuccuccgucuccuccuucgagcgcuucgagaucuuccccaaggaguccuccuggcccaaccacaccgucaccaagggcgucaccgccuccugcucccacaacggcaaguccuccuucuacaagaaccuccucuggcucaccgagaagaacggccucuaccccaaccucuccaaguccuacgucaacaacaaggagaaggagguccucguccucuggggcguccaccaccccuccaacaucggcgaccagcgcgccaucuaccacaccgagaacgccuacgucuccgucgucuccucccacuacucccgccgcuucacccccgagaucgccaagcgccccaagguccgcgaccaggagggccgcaucaacuacuacuggacccuccucgagcccggcgacaccaucaucuucgaggccaacggcaaccucaucgcccccugguacgccuucgcccucucccgcggcuucggcuccggcaucaucaccuccaacgccuccaugggcgagugcgacgccaagugccagaccccccagggcgccaucaacuccucccuccccuuccagaacguccaccccgucaccaucggcgagugccccaaguacguccgcuccaccaagcuccgcauggucaccggccuccgcaacauccccuccauccagucccgcggccucuucggcgccaucgccggcuucaucgagggcggcuggaccggcaugaucgacggcugguacggcuaccaccaccagaacgagcagggcuccggcuacgccgccgacaagaaguccacccagaacgccaucgacggcaucaccaacaaggucaacuccgucaucgagaagaugaacacccaguucaccgccgucggcaaggaguucaacaagcucgagcgccgcauggagaaccucaacaagaaggucgacgacggcuuccucgacaucuggaccuacaacgccgagcuccucguccuccucgagaacgagcgcacccucgacuuccacgacuccaacgucaagaaccucuacgagaaggucaagaaccagcucaagaacaacgccaaggagaucggcaacggcugcuucgaguucuaccacaagugcaacaacgagugcauggaguccgucaagaacggcaccuacgacuaccccaaguacuccgaggaguccaagcucaagcgcgagaagaucgacggcgucaagcucgaguccaugggcgucuaccagauccucgccaucuacuccaccgucgccuccucccucguccuccucgucucccucggcgccaucuccuucuggaugugcuccaacggcucccuccagugccgcaucugcaucuga

SEQ ID NO: 97583 - RNA, 1701 nt, Artificial Sequence; identical to SEQ ID NO: 96946
  derived and/or modified CDS sequence (opt2) from hemagglutinin__InfluenzaA__ABN50973

SEQ ID NO: 97584 - RNA, 1701 nt, Artificial Sequence; identical to SEQ ID NO: 96291
  derived and/or modified CDS sequence (opt2) from hemagglutinin__InfluenzaA__ABN50984

SEQ ID NO: 97585 - RNA, 1701 nt, Artificial Sequence; identical to SEQ ID NO: 96292
  derived and/or modified CDS sequence (opt2) from hemagglutinin__InfluenzaA__ABN50995

SEQ ID NO: 97586 - RNA, 1701 nt, Artificial Sequence
  derived and/or modified CDS sequence (opt2) from hemagglutinin__InfluenzaA__ABN51043
augaagaccaucaucgcccucuccuacauccucugccucgucuucgcccagaagcuccccggcaacgacaacuccaccgccacccucugccucggccaccacgccguccccaacggcaccaucgucaagaccaucaccaacgaccagaucgaggucaccaacgccaccgagcucguccaguccuccuccaccggcgagaucugcgacuccccccaccagauccucgacggcgagaacugcacccucaucgacgcccuccucggcgacccccagugcgacggcuuccagaacaagaagugggaccucuucgucgagcgcuccaaggccuacuccaacugcuaccccuacgacguccccgacuacgccucccuccgcucccucgucgccuccuccggcacccucgaguucaacaacgaguccuucaacuggaccggcgucacccagaacggcaccuccuccgccugcaagcgccgcuccaacaacuccuucuucucccgccucaacuggcucacccaccucaaguucaaguaccccgcccucaacgucaccaugcccaacaacgagaaguucgacaagcucuacaucuggggcguccaccaccccggcaccgacaacgaccagaucuuccucuacgcccaggccuccggccgcaucaccgucuccaccaagcgcucccagcagaccgucauccccaacaucggcucccgcccccgcguccgcgacauccccucccgcaucuccaucuacuggaccaucgucaagcccggcgacauccuccucaucaacuccaccggcaaccucaucgccccccgcggcuacuucaagauccgcuccggcaaguccuccaucaugcgcuccgacgcccccaucggcaagugcaacuccgagugcaucacccccaacggcuccauccccaacgacaagcccuuccagaacgucaaccgcaucaccuacggcgccugcccccgcuacgucaagcagaacacccucaagcucgccaccggcaugcgcaacguccccgagaagcagacccgcggcaucuucggcgccaucgccggcuucaucgagaacggcugggagggcauggucgacggcugguacggcuuccgccaccagaacuccgagggcaucggccaggccgccgaccucaaguccacccaggccgccaucaaccagaucaacggcaagcucaaccgccucaucggcaagaccaacgagaaguuccaccagaucgagaaggaguucuccgaggucgagggccgcauccaggaccucgagaaguacgucgaggacaccaagaucgaccucugguccuacaacgccgagcuccucgucgcccucgagaaccagcacaccaucgaccucaccgacuccgagaugaacaagcucuucgagcgcaccaagaagcagcuccgcgagaacgccgaggacaugggcaacggcugcuucaagaucuaccacaagugcgacaacgccugcaucggcuccauccgcaacggcaccuacgaccacgacgucuaccgcgacgaggcccucaacaaccgcuuccagaucaagggcgucgagcucaaguccggcuacaaggacuggauccucuggaucuccuucgccaucuccugcuuccuccucugcgucguccuccucggcuucaucaugugggccugccagaagggcaacauccgcugcaacaucugcaucuga

SEQ ID NO: 97587 - RNA, 1701 nt, Artificial Sequence; identical to SEQ ID NO: 97432
  derived and/or modified CDS sequence (opt2) from hemagglutinin__InfluenzaA__ABN51054

SEQ ID NO: 97588 - RNA, 1701 nt, Artificial Sequence
  derived and/or modified CDS sequence (opt2) from hemagglutinin__InfluenzaA__ABN51066
augaaggccaagcuccucguccuccucugcgccuucaccgccaccuacgccgacaccaucugcaucggcuaccacgccaacaacuccaccgacaccgucgacaccguccucgagaagaacgucaccgucacccacuccgucaaccuccucgaggacucccacaacggcaagcucugccgccucaagggcaccgccccccuccagcucggcaacugcuccgucgccggcuggauccucggcaaccccgagugcgagucccucuucuccaaggaguccugguccuacaucgccgagacccccaaccccgagaacggcaccugcuaccccggcuacuucgccgacuacgaggagcuccgcgagcagcucuccuccgucuccuccuucgagcgcuucgagaucuuccccaagaaguccuccuggcccaaccacaccgucaccaagggcgucaccgccuccugcucccacaacggcaaguccuccuucuacaagaaccuccucuggcucaccgagaagaacggccucuaccccaaccucuccaaguccuacgucaacaacaaggagaaggagguccucguccucuggggcguccaccaccccuccaacaucggcgaccagcgcaccaucuaccacaccgagaacgccuacgucuccgucgucuccucccacuacucccgccgcuucacccccgagaucgccaagcgccccaagguccgcgaccaggagggccgcaucaacuacuacuggacccuccucgagcccggcgacaccaucaucuucgaggccaacggcaaccucaucgcccccugguacgccuucgcccucucccgcggcuucggcuccggcaucaucaccuccaacgccuccaugggcgacugcgacgccaagugccagaccccccagggcgccaucaacuccucccuccccuuccagaacguccaccccgucaccaucggcgagugccccaaguacguccgcuccaccaagcuccgcauggucaccggccuccgcaacauccccuccauccagucccgcggccucuucggcgccaucgccggcuucaucgagggcggcuggaccggcaugaucgacggcugguacggcuaccaccaccagaacgagcagggcuccggcuacgccgccgacaagaaguccacccagaacgccaucgacggcaucaccaacaaggucaacuccgucaucgagaagaugaacacccaguucaccgccgucggcaaggaguucaacaagcucgagcgccgcauggagaaccucaacaagaaggucgacgacggcuuccucgacaucuggaccuacaacgccgagcuccucguccuccucgagaacgagcgcacccucgacuuccacgacuccaacgucaagaaccucuacgagaaggucaagaaccagcucaagaacaacgccaaggagaucggcaacggcugcuucgaguucuaccacaagugcaacaacgagugcaucgaguccgucaagaacggcaccuacgacuaccccaaguacuccgaggaguccaagcucaagcgcgagaagaucgacggcgucaagcucgaguccaugggcgucuaccagauccucgccaucuacuccaccgucgccuccucccucguccuccucgucucccucggcgccaucggcuucuggaugugcuccaacggcucccuccagugccgcaucugcaucuga

SEQ ID NO: 97589 - RNA, 1698 nt, Artificial Sequence; identical to SEQ ID NO: 96332
  derived and/or modified CDS sequence (opt2) from hemagglutinin__InfluenzaA__ABN51077

SEQ ID NO: 97590 - RNA, 1698 nt, Artificial Sequence; identical to SEQ ID NO: 96335
  derived and/or modified CDS sequence (opt2) from hemagglutinin__InfluenzaA__ABN51088

SEQ ID NO: 97591 - RNA, 1701 nt, Artificial Sequence
  derived and/or modified CDS sequence (opt2) from hemagglutinin__InfluenzaA__ABN51099
augaagaccaucaucgcccucuccuacaucuucugccucgcccucggccaggaccuccccggcaacgacaacuccaccgccacccucugccucggccaccacgccguccccaacggcacccucgucaagaccaucaccaacgaccagaucgaggucaccaacgccaccgagcucguccaguccuccuccaccggcaagaucugcaacaacccccaccgcauccucgacggcaucgacugcacccucaucgacgcccuccucggcgacccccacugcgacgucuuccagaacgagaccugggaccucuucgucgagcgcuccaaggccuucuccaacugcuaccccuacgacguccccgacuacgccucccuccgcucccucgucgccuccuccggcacccucgaguucaucaccgagggcuucaccuggaccggcgucacccagaacggcggcuccaacgccugcaagcgcggccccggcuccggcuucuucucccgccucaacuggcucaccaaguccggcuccaccuaccccguccucaacgucaccaugcccaacaacgacaacuucgacaagcucuacaucuggggcguccaccaccccuccaccaaccaggagcagaccucccucuacguccaggccuccggccgcgucaccgucuccacccgccgcucccagcagaccaucauccccaacaucggcucccgccccuggguccgcggccucuccucccgcaucuccaucuacuggaccaucgucaagcccggcgacguccucgucaucaacuccaacggcaaccucaucgccccccgcggcuacuucaagaugcgcaccggcaaguccuccaucaugcgcuccgacgcccccaucgacaccugcaucuccgagugcaucacccccaacggcuccauccccaacgacaagcccuuccagaacgucaacaagaucaccuacggcgccugccccaaguacgucaagcagaacacccucaagcucgccaccggcaugcgcaacguccccgagaagcagacccgcggccucuucggcgccaucgccggcuucaucgagaacggcugggagggcaugaucgacggcugguacggcuuccgccaccagaacuccgagggcaccggccaggccgccgaccucaaguccacccaggccgccaucgaccagaucaacggcaagcucaaccgcgucaucgagaagaugaacgagaaguuccaccagaucgagaaggaguucuccgaggucgagggccgcauccaggaccucgagaaguacgucgaggacaccaagaucgaccucugguccuacaacgccgagcuccucgucgcccucgagaaccagcacaccaucgaccucaccgacuccgagaugaacaagcucuucgagaagacccgccgccagcuccgcgagaacgccgaggacaugggcaacggcugcuucaagaucuaccacaagugcgacaacgccugcaucgaguccauccgcaacggcaccuacgaccacgacgucuaccgcgacgaggcccucaacaaccgcuuccagaucaagggcgucgagcucaaguccggcuacaaggacuggauccucuggaucuccuucgccaucuccugcuuccuccucugcgucguccuccucggcuucaucaugugggccugccagcgcggcaacauccgcugcaacaucugcaucuga

SEQ ID NO: 97592 - RNA, 1701 nt, Artificial Sequence
  derived and/or modified CDS sequence (opt2) from hemagglutinin__InfluenzaA__ABN51110
augaagaccaucaucgcccucuccuacaucuucugccucgcccucggccaggaccuccccggcaacgacaacuccaccgccacccucugccucggccaccacgccguccccaacggcacccucgucaagaccaucaccgacgaccagaucgaggucaccaacgccaccgagcucguccaguccuccuccaccggcaagaucugcaacaacccccaccgcauccucgacggcaucaacugcacccucaucgacgcccuccucggcgacccccacugcgacgucuuccaggacgagaccugggaccucuucgucgagcgcuccaaggccuucuccaacugcuaccccuacgacguccccgacuacgccucccuccgcucccucgucgccuccuccggcacccucgaguucaucaccgagggcuucaccuggaccggcgucacccagaacggcggcuccaacgccugcaagcgcggccccggcuccggcuucuucucccgccucaacuggcucaccaaguccggcuccaccuaccccguccucaacgucaccaugcccaacaacgacaacuucgacaagcucuacaucuggggcguccaccaccccuccaccaaccaggagcagaccucccucuacguccaggccuccggccgcgucaccgucuccacccgccgcucccagcagaccaucauccccaacaucggcucccgccccuggguccgcggccucuccucccgcaucuccaucuacuggaccaucgucaagcccggcgacguccucgucaucaacuccaacggcaaccucaucgccccccgcggcuacuucaagaugcgcaccggcaaguccuccaucaugcgcuccgacgcccccaucgacaccugcaucuccgagugcaucacccccaacggcuccauccccaacgacaagcccuuccagaacgucaacaagaucaccuacggcgccugccccaaguacgucaagcagaacacccucaagcucgccaccggcaugcgcaacguccccgagaagcagacccgcggccucuucggcgccaucgccggcuucaucgagaacggcugggagggcaugaucgacggcugguacggcuuccgccaccagaacuccgagggcaccggccaggccgccgaccucaaguccacccaggccgccaucgaccagaucaacggcaagcucaaccgcgucaucgagaagaccaacgagaaguuccaccagaucgagaaggaguucuccgaggucgagggccgcauccaggaccucgagaaguacgucgaggacaccaagaucgaccucugguccuacaacgccgagcuccucgucgcccucgagaaccagcacaccaucgaccucaccgacuccgagaugaacaagcucuucgagaagacccgccgccagcuccgcgagaacgccgaggacaugggcaacggcugcuucaagaucuaccacaagugcgacaacgccugcaucgaguccauccgcaacggcaccuacgaccacgacgucuaccgcgacgaggcccucaacaaccgcuuccagaucaagggcgucgagcucaaguccggcuacaaggacuggauccucuggaucuccuucgccaucuccugcuuccuccucugcgucguccuccucggcuucaucaugugggccugccagcgcggcaacauccgcugcaacaucugcaucuga

SEQ ID NO: 97593 - RNA, 1701 nt, Artificial Sequence
  derived and/or modified CDS sequence (opt2) from hemagglutinin__InfluenzaA__ABN51121
augaagaccaucaucgcccucuccuacaucuucugccucgcccucggccaggaccuccccggcaacgacaacuccaccgccacccucugccucggccaccacgccguccccaacggcacccucgucaagaccaucaccgacgaccagaucgaggucaccaacgccaccgagcucguccaguccuccuccaccggcaagaucugcaacaacccccaccgcauccucgacggcaucaacugcacccucaucgacgcccuccucggcgacccccacugcgacgucuuccaggacgagaccugggaccucuucgucgagcgcuccaaggccuucuccaacugcuaccccuacgacguccccgacuacgccucccuccgcucccucgucgccuccuccggcacccucgaguucaucaccgagggcuucaccuggaccggcgucacccagaacggcggcuccaacgccugcaagcgcggccccggcuccggcuucuucucccgccucaacuggcucaccaaguccggcuccaccuaccccguccucaacgucaccaugcccaacaacgacaacuucgacaagcucuacaucuggggcguccaccaccccuccaccaaccaggagcagaccucccucuacguccaggccuccggccgcgucaccgucuccacccgccgcucccagcagaccaucauccccaacaucggcucccgccccuggguccgcggccucuccucccgcaucuccaucuacuggaccaucgucaagcccggcgacguccucgucaucaacuccaacggcaaccucaucgccccccgcggcuacuucaagaugcgcaccggcaaguccuccaucaugcgcuccgacgcccccaucgacaccugcaucuccgagugcaucacccccaacggcuccauccccaacgacaagcccuuccagaacgucaacaagaucaccuacggcaccugccccaaguacgucaagcagaacacccucaagcucgccaccggcaugcgcaacguccccgagaagcagacccgcggccucuucggcgccaucgccggcuucaucgagaacggcugggagggcaugaucgacggcugguacggcuuccgccaccagaacuccgagggcaccggccaggccgccgaccucaaguccacccaggccgccaucgaccagaucaacggcaagcucaaccgcgucaucgagaagaccaacgagaaguuccaccagaucgagaaggaguucuccgaggucgagggccgcauccaggaccucgagaaguacgucgaggacaccaagaucgaccucugguccuacaacgccgagcuccucgucgcccucgagaaccagcacaccaucgaccucaccgaccucgagaugaacaagcucuucgagaagacccgccgccagcuccgcgagaacgccgaggacaugggcaacggcugcuucaagaucuaccacaagugcgacaacgccugcaucgaguccauccgcaacggcaccuacgaccacgacgucuaccgcgacgaggcccucaacaaccgcuuccagaucaagggcgucgagcucaaguccggcuacaaggacuggauccucuggaucuccuucgccaucuccugcuuccuccucugcgucguccuccucggcuucaucaugugggccugccagcgcggcaacauccgcugcaacaucugcaucuga

SEQ ID NO: 97594 - RNA, 1701 nt, Artificial Sequence
  derived and/or modified CDS sequence (opt2) from hemagglutinin__InfluenzaA__ABN51132
augaagaccaucaucgcccucuccuacaucuucugccucgcccucggccaggaccuccccggcaacgacaacuccaccgccacccucugccucggccaccacgccguccccaacggcacccucgucaagaccaucaccgacgaccagaucgaggucaccaacgccaccgagcucguccaguccuccuccaccggcaagaucugcaacaacccccaccgcauccucgacggcaucaacugcacccucaucgacgcccuccucggcgacccccacugcgacgucuuccaggacgagaccugggaccucuucgucgagcgcuccaaggccuucuccaacugcuaccccuacgacguccccgacuacgccucccuccgcucccucgucgccuccuccggcacccucgaguucaucaccgagggcuucaccuggaccggcgucacccagaacggcggcuccaacgccugcaagcgcggccccggcuccggcuucuucucccgccucaacuggcucaccaaguccggcuccaccuaccccguccucaacgucaccaugcccaacaacgacaacuucgacaagcucuacaucuggggcguccaccaccccuccaccaaccaggagcagaccucccucuacguccaggccuccggccgcgucaccgucuccacccgccgcucccagcagaccaucauccccaacaucggcucccgccccuggguccgcggccucuccucccgcaucuccaucuacuggaccaucgucaagcccggcgacguccucgucaucaacuccaacggcaaccucaucgccccccgcggcuacuucaagaugcgcaccggcaaguccuccaucaugcgcuccgacgccuccaucgacaccugcaucuccgagugcaucacccccaacggcuccauccccaacgacaagcccuuccagaacgucaacaagaucaccuacggcgccugccccaaguacgucaagcagaacacccucaagcucgccaccggcaugcgcaacguccccgagaagcagacccgcggccucuucggcgccaucgccggcuucaucgagaacggcugggagggcaugaucgacggcugguacggcuuccgccaccagaacuccgagggcaccggccaggccgccgaccucaaguccacccaggccgccaucgaccagaucaacggcaagcucaaccgcgucaucgagaagaccaacgagaaguuccaccagaucgagaaggaguucuccgaggucgagggccgcauccaggaccucgagaaguacgucgaggacaccaagaucgaccucugguccuacaacgccgagcuccucgucgcccucgagaaccagcacaccaucgaccucaccgacuccgagaugaacaagcucuucgagaagacccgccgccagcuccgcgagaacgccgaggacaugggcaacggcugcuucaagaucuaccacaagugcgacaacgccugcaucgaguccauccgcaacggcaccuacgaccacgacgucuaccgcgacgaggcccucaacaaccgcuuccagaucaagggcgucgagcucaaguccggcuacaaggacuggauccucuggaucuccuucgccaucuccugcuuccuccucugcgucguccuccucggcuucaucaugugggccugccagcgcggcaacauccgcugcaacaucugcaucuga

SEQ ID NO: 97595 - RNA, 1698 nt, Artificial Sequence; identical to SEQ ID NO: 96836
  derived and/or modified CDS sequence (opt2) from hemagglutinin__InfluenzaA__ABN51143

SEQ ID NO: 97596 - RNA, 1701 nt, Artificial Sequence
  derived and/or modified CDS sequence (opt2) from hemagglutinin__InfluenzaA__ABN51154
augaagaccaucaucgcccucuccuacauccucugccucgucuucacccagaagcuccccggcaacgacaacuccaccgccacccucugccucggccaccacgccguccccaacggcacccucgucaagaccaucaccaacgaccagaucgaggucaccaacgccaccgagcucguccaguccuccuccaccggccgcaucugcgacuccccccaccagauccucgacggcgagaacugcacccucaucgacgcccuccucggcgacccccacugcgacggcuuccagaacaaggagugggaccucuucgucgagcgcuccaaggccuacuccaacugcuaccccuacgacguccccgacuacgucucccuccgcucccucgucgccuccuccggcacccucgaguucaacaacgaguccuucaacuggaccggcgucgcccagaacggcaccuccuccgccugcaagcgccgcuccgacaaguccuucuucucccgccucaacuggcuccaccagcucaaguacaaguaccccgcccucaacgucaccaugcccaacaacgagaaguucgacaagcucuacaucuggggcguccaccaccccggcaccgacuccgaccagaucucccucuacgcccaggccuccggccgcgucaccgucuccaccaagcgcucccagcagaccgucauccccaacaucggcuccggccccuggguccgcggcgucuccucccgcaucuccaucuacuggaccaucgucaagcccggcgacauccuccucaucaacuccaccggcaaccucaucgccccccgcggcuacuucaagauccgcuccggcaaguccuccaucaugcgcuccgacgcccccaucggcaagugcaacuccgagugcaucacccccaacggcuccauccccaacgacaagcccuuccagaacgucaaccgcaucaccuacggccccugcccccgcuacgucaagcagaacacccucaagcucgccaccggcaugcgcaacguccccgagaagcagacccgcggcaucuucggcgccaucgccggcuucaucgagaacggcugggagggcaugauggacggcugguacggcuuccgccaccagaacuccgagggcaccggccaggccgccgaccucaaguccacccaggccgccaucaaccagaucaacggcaagcucaaccgccucaucgagaagaccaacgagaaguuccaccagaucgagaaggaguucuccgaggucgagggccgcauccaggaccucgagaaguacgucgaggacaccaagaucgaccucugguccuacaacgccgagcuccucgucgcccucgagaaccagcacaccaucgaccucaccgacuccgagaugaacaagcucuucgagcgcaccaagaagcagcuccgcgagaacgccgaggacaugggcaacggcugcuucaagaucuaccacaagugcgacaacgccugcaucggcuccauccgcaacggcaccuacgaccacgacgucuaccgcgacgaggcccucaacaaccgcuuccagaucaagggcgucgagcucaaguccggcuacaaggacuggauccucuggaucuccuucgccaucuccugcuuccuccucugcaucguccuccucggcuucaucaugugggccugccagaagggcaacauccgcugcaacaucugcaucuga

SEQ ID NO: 97597 - RNA, 1701 nt, Artificial Sequence
  derived and/or modified CDS sequence (opt2) from hemagglutinin__InfluenzaA__ABN59390
augaagaccaucaucgcccucuccuacaucaucugccucgucuucgcccagaagcuccccggcaacgacaacuccaccgccacccucugccucggccaccacgccguccccaacggcaccaucgucaagaccaucaccaacgaccagaucgaggucaccaacgccaccgagcucguccaguccuccuccaccggcgagaucugcgacuccccccaccagauccucgacggcgagaacugcacccucaucgacgcccuccucggcgacccccagugcgacggcuuccagaacaagaagugggaccucuucgucgagcgcuccaaggccuacuccaacugcuaccccuacgacguccccgacuacgccucccuccgcucccucgucgccuccuccggcacccucgaguucaacaacgaguccuucaacuggaccggcgucacccagaacggcaccuccuccgccugcaagcgccgcuccaacaacuccuucuucucccgccucaacuggcucacccaccucaaguucaaguaccccgcccucaacgucaccaugcccaacaacgagaaguucgacaagcucuacaucuggggcguccaccaccccggcaccgacaacgaccagaucuuccucuacgcccaggccuccggccgcaucaccgucuccaccaagcgcucccagcagaccgucauccccaacaucggcucccgcccccgcguccgcaacauccccucccgcaucuccaucuacuggaccaucgucaagcccggcgacauccuccucaucaacuccaccggcaaccucaucgccccccgcggcuacuuccgcauccgcuccggcaaguccuccaucaugcgcuccgacgcccccaucggcaagugcaacuccgagugcaucacccccaacggcuccauccccaacgacaagcccuuccagaacgucaaccgcaucaccuacggcgccugcccccgcuacgucaagcagaacacccucaagcucgccaccggcaugcgcaacguccccgagaagcagacccgcggcaucuucggcgccaucgccggcuucaucgagaacggcugggagggcauggucgacggcugguacggcuuccgccaccagaacuccgagggcaucggccaggccgccgaccucaaguccacccaggccgccaucaaccagaucaacggcaagcucaaccgccucaucggcaagaccaacgagaaguuccaccagaucgagaaggaguucuccgaggucgagggccgcauccaggaccucgagaaguacgucgaggacaccaagaucgaccucugguccuacaacgccgagcuccucgucgcccucgagaaccagcacaccaucgaccucaccgacuccgagaugaacaagcucuucgagcgcaccaagaagcagcuccgcgagaacgccgaggacaugggcaacggcugcuucaagaucuaccacaagugcgacaacgccugcaucggcuccauccgcaacggcaccuacgaccacgacgucuaccgcgacgaggcccucaacaaccgcuuccagaucaagggcgucgagcucaaguccggcuacaaggacuggauccucuggaucuccuucgccaucuccugcuuccuccucugcgucgcccuccucggcuucaucaugugggccugccagaagggcaacauccgcugcaacaucugcaucuga

SEQ ID NO: 97598 - RNA, 1701 nt, Artificial Sequence
  derived and/or modified CDS sequence (opt2) from hemagglutinin__InfluenzaA__ABN59401
augaaggccaagcuccucguccuccucugcgcccucuccgccaccgacgccgacaccaucugcaucggcuaccacgccaacaacuccaccgacaccgucgacaccguccucgagaagaacgucaccgucacccacuccgucaaccuccucgaggacucccacaacggcaagcucugccgccucaagggcaucgccccccuccagcucggcaagugcaacaucgccggcuggauccucggcaaccccgagugcgagucccucuucuccaagaaguccugguccuacaucgccgagacccccaacuccgagaacggcaccugcuaccccggcuacuucgccgacuacgaggagcuccgcgagcagcucuccuccgucuccuccuucgagcgcuucgagaucuuccccaaggagcgcuccuggcccaagcacaacaucacccgcggcgucaccgccgccugcucccacaagggcaaguccuccuucuaccgcaaccuccucuggcucaccgagaagaacggcuccuaccccaaccucaacaaguccuacgucaacaacaaggagaaggagguccucguccucuggggcguccaccaccccuccaacaucgaggaccagaagacccucuaccgcaaggagaacgccuacgucuccgucgucuccuccaacuacaaccgccgcuucacccccgagaucgccgagcgccccaagguccgcggccaggccggccgcaucaacuacuacuggacccuccucgagcccggcgacaccaucaucuucgaggccaacggcaaccucaucgcccccuggcacgccuucgcccucucccgcggcuucggcuccggcaucaucaccuccaacgccuccauggacgagugcgacaccaagugccagaccccccagggcgccaucaacuccucccuccccuuccagaacauccaccccgucaccaucggcgagugccccaaguacguccgcuccaccaagcuccgcauggucaccggccuccgcaacauccccuccauccagucccgcggccucuucggcgccaucgccggcuucaucgagggcggcuggaccggcaugaucgacggcugguacggcuaccaccaccagaacgagcagggcuccggcuacgccgccgaccagaaguccacccagaacgccaucaacggcaucaccaacaaggucaacuccgucaucgagaagaugaacacccaguucaccgccgucggcaaggaguucaacaagcucgagaagcgcauggagaaccucaacaagaaggucgacgacggcuuccucgacaucuggaccuacaacgccgagcuccucguccuccucgagaacgagcgcacccucgacuuccacgacuccaacgucaagaaccucuacgagaaggucaagucccagcucaagaacaacgccaaggagaucggcaacggcugcuucgaguucuaccacaagugcaacaacgagugcauggaguccgucaagaacggcaccuacgacuaccccaaguacuccgaggaguccaagcucaaccgcgagaagaucgacggcgucaagcucgaguccaugggcgucuaccagauccucgccaucuacuccaccgucgccuccucccucguccuccucgucucccucggcgccaucuccuucuggaugugcuccaacggcucccuccagugccgcaucugcaucuga

SEQ ID NO: 97599 - RNA, 1698 nt, Artificial Sequence
  derived and/or modified CDS sequence (opt2) from hemagglutinin__InfluenzaA__ABN59412
augaaggccaaccuccucguccuccucugcgcccucgccgccgccgacgccgacaccaucugcaucggcuaccacgccaacaacuccaccgacaccgucgacaccguccucgagaagaacgucaccgucacccacuccgucaaccuccucgaggacucccacaacggcaagcucugccgccucaagggcaucgccccccuccagcucggcaagugcaacaucgccggcuggcuccucggcaaccccgagugcgacccccuccuccccguccgcuccugguccuacaucgucgagacccccaacuccgagaacggcaucugcuaccccggcgacuucaucgacuacgaggagcuccgcgagcagcucuccuccgucuccuccuucgagcgcuucgagaucuuccccaaggaguccuccuggcccaaccacaacaccaacggcgucaccgccgccugcucccacgagggcaaguccuccuucuaccgcaaccuccucuggcucaccgagaaggagggcuccuaccccaagcucaagaacuccuacgucaacaagaagggcaaggagguccucguccucuggggcauccaccacccccccaacuccaaggagcagcagaaccucuaccagaacgagaacgccuacgucuccgucgucaccuccaacuacaaccgccgcuucacccccgagaucgccgagcgccccaagguccgcgaccaggccggccgcaugaacuacuacuggacccuccucaagcccggcgacaccaucaucuucgaggccaacggcaaccucaucgcccccauguacgccuucgcccucucccgcggcuucggcuccggcaucaucaccuccaacgccuccaugcacgagugcaacaccaagugccagaccccccucggcgccaucaacuccucccuccccuaccagaacauccaccccgucaccaucggcgagugccccaaguacguccgcuccgccaagcuccgcauggucaccggccuccgcaacauccccuccauccagucccgcggccucuucggcgccaucgccggcuucaucgagggcggcuggaccggcaugaucgacggcugguacggcuaccaccaccagaacgagcagggcuccggcuacgccgccgaccagaaguccacccagaacgccaucaacggcaucaccaacaaggucaacaccgucaucgagaagaugaacauccaguucaccgccgucggcaaggaguucaacaagcucgagaagcgcauggagaaccucaacaagaaggucgacgacggcuuccucgacaucuggaccuacaacgccgagcuccucguccuccucgagaacgagcgcacccucgaguuccacgacuccaacgucaagaaccucuacgagaaggucaagucccagcucaagaacaacgccaaggagaucggcaacggcugcuucgaguucuaccacaagugcgacaacgagugcauggaguccguccgcaacggcaccuacgacuaccccaaguacuccgaggaguccaagcucaaccgcgagaaggucgacggcgucaagcucgaguccaugggcaucuaccagauccucgccaucuacuccaccgucgccuccucccucguccuccucgucucccucggcgccaucuccuucuggaugugcuccaacggcucccuccagugccgcaucugcaucuga

SEQ ID NO: 97600 - RNA, 1701 nt, Artificial Sequence
  derived and/or modified CDS sequence (opt2) from hemagglutinin__InfluenzaA__ABN59423
augaaggccaagcuccucguccuccucugcgcccucuccgccaccgacgccgacaccaucugcaucggcuaccacgccaacaacuccaccgacaccgucgacaccguccucgagaagaacgucaccgucacccacuccgucaaccuccucgaggacucccacaacggcaagcucugccgccucaagggcaucgccccccuccagcucggcaagugcuccaucgccggcuggauccucggcaaccccgagugcgagucccucuucuccaagaaguccugguccuacaucgccgagacccccaacuccgagaacggcaccugcuaccccggcuacuucgccgacuacgaggagcuccgcgagcagcucuccuccgucuccuccuucgagcgcuucgagaucuuccccaaggagcgcuccuggcccaagcacaacgucacccgcggcgucaccgccuccugcucccacaagggcaaguccuccuucuaccgcaaccuccucuggcucaccgagaagaacggcuccuaccccaaccucuccaaguccuacgucaacaacaaggagaaggagguccucguccucuggggcguccaccaccccuccaacaucgagaaccagaagaccaucuaccgcaaggagaacgccuacgucuccgucgucuccuccaacuacaaccgccgcuucacccccgagaucgccgagcgccccaagguccgcgaccaggagggccgcaucaacuacuacuggacccuccucgagcccggcgacaccaucaucuucgaggccaacggcaaccucaucgcccccugguacgccuucgcccucucccgcggcuucggcuccggcaucaucaccuccaacgccuccauggacgagugcgacaccaagugccagaccccccagggcgccaucaacuccucccuccccuuccagaacguccaccccgucaccaucggcgagugccccaaguacguccgcuccaccaagcuccgcauggucaccggccuccgcaacauccccuccauccagucccgcggccucuucggcgccaucgccggcuucaucgagggcggcuggaccggcaugaucgacggcugguacggcuaccaccaccagaacgagcagggcuccggcuacgccgccgaccagaaguccacccagaacgccaucaacggcaucaccaacaaggucaacuccgucaucgagaagaugaacacccaguucaccgccgucggcaaggaguucaacaagcucgagaagcgcauggagaaccucaacaagaaggucgacgacggcuuccucgacaucuggaccuacaacgccgagcuccucguccuccucgagaacgagcgcacccucgacuuccacgacuccaacgucaagaaccucuacgagaaggucaagucccagcucaagaacaacgccaaggagaucggcaacggcugcuucgaguucuaccacaagugcaacaacgagugcauggaguccgucaagaacggcaccuacgacuaccccaaguacuccgaggaguccaagcucaaccgcgagaagaucgacggcgucaagcucgaguccaugggcgucuaccagauccucgccaucuacuccaccgucgccuccucccucguccuccucgucucccucggcgccaucuccuucuggaugugcuccaacggcucccuccagugccgcaucugcaucuga

SEQ ID NO: 97601 - RNA, 1701 nt, Artificial Sequence; identical to SEQ ID NO: 96802
  derived and/or modified CDS sequence (opt2) from hemagglutinin__InfluenzaA__ABO32656

SEQ ID NO: 97602 - RNA, 1701 nt, Artificial Sequence
  derived and/or modified CDS sequence (opt2) from hemagglutinin__InfluenzaA__ABO32667
augaagaccaucaucgcccucuccuacauccucugccucgucuucgcccagaagcuccccggcaacgacaacuccaccgccacccucugccucggccaccacgccguccccaacggcacccucgucaagaccaucaccaacgaccagaucgaggucaccaacgccaccgagcucguccaguccuccuccaccggcggcaucugcgacuccccccaccagauccucgacggcgagaacugcacccucaucgacgcccuccucggcgacccccacugcgacggcuuccagaacaaggagugggaccucuucgucgagcgcuccaaggccuacuccaacugcuaccccuacgacguccccgacuacgccucccuccgcucccucgucgccuccuccggcacccucgaguucaacaacgaguccuucaacuggaccggcgucgcccagaacggcaccuccuccgccugcaagcgccgcuccaacaaguccuucuucucccgccucaacuggcuccaccagcucaaguacaaguaccccgcccucaacgucaccaugcccaacaacgagaaguucgacaagcucuacaucuggggcguccaccaccccuccaccgacuccgaccagaucucccucuacgcccaggccuccggccgcgucaccgucuccaccaagcgcucccagcagaccgucauccccaacaucggcucccgccccuggguccgcgacgucuccucccgcaucuccaucuacuggaccaucgucaagcccggcgacauccuccucaucaacuccaccggcaaccucaucgccccccgcggcuacuucaagauccgcuccggcaaguccuccaucaugcgcuccgacgcccccaucggcaagugcaacuccgagugcaucacccccaacggcuccauccccaacgacaagcccuuccagaacgucaaccgcaucaccuacggcgccugcccccgcuacgucaagcagaacacccucaagcucgccaccggcaugcgcaacguccccgagaagcagacccgcggcaucuucggcgccaucgccggcuucaucgagaacggcugggagggcauggucgacggcugguacggcuuccgccaccagaacuccgagggcaccggccaggccgccgaccucaaguccacccaggccgccaucaaccagaucaacggcaagcucaaccgccucaucggcaagaccaacgagaaguuccaccagaucgagaaggaguucuccgaggucgagggccgcauccaggaccucgagaaguacgucgaggacaccaagaucgaccucugguccuacaacgccgagcuccucgucgcccucgagaaccagcacaccaucgaccucaccgacuccgagaugaacaagcucuucgagcgcaccaagaagcagcuccgcgagaacgccgaggacaugggcaacggcugcuucaagaucuaccacaagugcgacaacgccugcaucggcuccauccgcaacggcaccuacgaccacgacgucuaccgcgacgaggcccucaacaaccgcuuccagaucaagggcgucgagcucaaguccggcuacaaggacuggauccucuggaucuccuucgccaucuccugcuuccuccucugcgucguccuccucggcuucaucaugugggccugccagaagggcaacauccgcugcaacaucugcaucuga

SEQ ID NO: 97603 - RNA, 1698 nt, Artificial Sequence
  derived and/or modified CDS sequence (opt2) from hemagglutinin__InfluenzaA__ABO32678
augaaggucaagcuccucguccuccucugcaccuucaccgccaccuacgccgacaccaucugcaucggcuaccacgccaacaacuccaccgacaccgucgacaccguccucgagaagaacgucaccgucacccacuccgucaaccuccucgaggacucccacaacggcaagcucugccuccucaagggcaucgccccccuccagcucggcaacugcuccgucgccggcuggauccucggcaaccccgagugcgagcuccucaucuccaaggaguccugguccuacaucgucgagacccccaaccccgagaacggcaccugcuaccccggcuacuucgccgacuacgaggagcuccgcgagcagcucuccuccgucuccuccuucgagcgcuucgagaucuuccccaaggaguccuccuggcccaaccacaccgucaccggcgucuccgccuccugcucccacaacggcaaguccuccuucuaccgcaaccuccucuggcucaccggcaagaacggccucuaccccaaccucuccaaguccuacgccaacaacaaggagaaggagguccucguccucuggggcguccaccacccccccaacaucggcgaccagcgcgcccucuaccacaccgagaacgccuacgucuccgucgucuccucccacuacucccgccgcuucacccccgagaucgccaagcgccccaagguccgcgaccaggagggccgcaucaacuacuacuggacccuccucgagcccggcgacaccaucaucuucgaggccaacggcaaccucaucgccccccgcuucgccuucgcccucucccgcggcuucggcuccggcaucaucaccuccaacgcccccauggacgagugcgacgccaagugccagaccccccagggcgccaucaacuccucccuccccuuccagaacguccaccccgucaccaucggcgagugccccaaguacguccgcuccgccaagcuccgcauggccaccggccuccgcaacauccccuccauccagucccgcggccucuucggcgccaucgccggcuucaucgagggcggcuggaccggcauggucgacggcugguacggcuaccaccaccagaacgagcagggcuccggcuacgccgccgaccagaaguccacccagaacgccaucaacggcaucaccaacaaggucaacuccgucaucgagaagaugaacacccaguucaccgccgucggcaaggaguucuccaagcucgagcgccgcauggagaaccuccacaagaaggucgacgacggcuuccucgacaucuggaccuacaacgccgagcuccucguccuccucgagaacgagcgcacccucgacuuccacgacuccaacgucaagaaccucuacgagaaggucaagucccagcucaagaacaacgccaaggagaucggcaacggcugcuucgaguucuaccacaagugcaacgacgagugcauggaguccgucaagaacggcaccuacgacuaccccaaguacuccgaggaguccaagcucaaccgcgagaagaucgacggcgucaagcucgaguccaugggcgucuaccagauccucgccaucuacuccaccgucgccuccucccucguccuccucgucucccucggcgccaucuccuucuggaugugcuccaacggcucccuccagugccgcaucugcaucuga

SEQ ID NO: 97604 - RNA, 1701 nt, Artificial Sequence
  derived and/or modified CDS sequence (opt2) from hemagglutinin__InfluenzaA__ABO32692
augaagaccaucaucgcccucuccuacauccucugccucgucuucgcccagaagcuccccggcaacgacaacuccaccgccacccucugccucggccaccacgccguccccaacggcaccaucgucaagaccaucaccaacgaccagaucgaggucaccaacgccaccgagcucguccaguccuccuccaccggcggcaucugcgacuccccccaccagauccucgacggcgagaacugcacccucaucgacgcccuccucggcgacccccagugcgacggcuuccagaacaagaagugggaccucuucgucgagcgcuccaaggccuacuccaacugcuaccccuacgacguccccgacuacgccucccuccgcucccucgucgccuccuccggcacccucgaguucaacaacgaguccuucaacuggaccggcgucacccagaacggcaccuccuccgccugcaagcgccgcuccaacaacuccuucuucucccgccucaacuggcucacccaccucaaguucaaguaccccgcccucaacgucaccaugcccaacaacgagaaguucgacaagcucuacaucuggggcguccaccaccccggcaccgacaacgaccagaucuuccucuacgcccaggccuccggccgcaucaccgucuccaccaagcgcucccagcagaccgucauccccaacaucggcucccgcccccgcguccgcaacauccccucccgcaucuccaucuacuggaccaucgucaagcccggcgacauccuccucaucaacuccaccggcaaccucaucgccccccgcggcuacuucaagauccgcuccggcaaguccuccaucaugcgcuccgacgcccccaucggcaagugcaacuccgagugcaucacccccaacggcuccauccccaacgacaagcccuuccagaacgucaaccgcaucaccuacggcgccugcccccgcuacgucaagcagaacacccucaagcucgccaccggcaugcgcaacguccccgagaagcagacccgcggcaucuucggcgccaucgccggcuucaucgagaacggcugggagggcauggucgacggcugguacggcuuccgccaccagaacuccgagggcaucggccaggccgccgaccucaaguccacccaggccgccaucaaccagaucaacggcaagcucaaccgccucaucggcaagaccaacgagaaguuccaccagaucgagaaggaguucuccgaggucgagggccgcauccaggaccucgagaaguacgucgaggacaccaagaucgaccucugguccuacaacgccgagcuccucgucgcccucgagaaccagcacaccaucgaccucaccgacuccgagaugaacaagcucuucgagcgcaccaagaagcagcuccgcgagaacgccgaggacaugggcaacggcugcuucaagaucuaccacaagugcgacaacgccugcaucggcuccauccgcaacggcaccuacgaccacgacgucuaccgcgacgaggcccucaacaaccgcuuccagaucaagggcgucgagcucaaguccggcuacaaggacuggauccucuggaucuccuucgccaucuccugcuuccuccucugcgucguccuccucggcuucaucaugugggccugccagaagggcaacauccgcugcaacaucugcaucuga

SEQ ID NO: 97605 - RNA, 1701 nt, Artificial Sequence; identical to SEQ ID NO: 97469
  derived and/or modified CDS sequence (opt2) from hemagglutinin__InfluenzaA__ABO32751

SEQ ID NO: 97606 - RNA, 1701 nt, Artificial Sequence; identical to SEQ ID NO: 97469
  derived and/or modified CDS sequence (opt2) from hemagglutinin__InfluenzaA__ABO32762

SEQ ID NO: 97607 - RNA, 1701 nt, Artificial Sequence; identical to SEQ ID NO: 97491
  derived and/or modified CDS sequence (opt2) from hemagglutinin__InfluenzaA__ABO32775

SEQ ID NO: 97608 - RNA, 1701 nt, Artificial Sequence; identical to SEQ ID NO: 96279
  derived and/or modified CDS sequence (opt2) from hemagglutinin__InfluenzaA__ABO32790

SEQ ID NO: 97609 - RNA, 1701 nt, Artificial Sequence
  derived and/or modified CDS sequence (opt2) from hemagglutinin__InfluenzaA__ABO32803
augaagaccaucaucgcccucuccuacauccucugccucgucuucgcccagaagcuccccggcaacgacaacuccaccgccacccucugccucggccaccacgccguccccaacggcaccaucgucaagaccaucaccaacgaccagaucgaggucaccaacgccaccgagcucguccaguccuccuccaccggcggcaucugcgacuccccccaccagauccucgacggcgagaacugcacccucaucgacgcccuccucggcgacccccagugcgacggcuuccagaacaagaagugggaccucuucgucgagcgcuccaaggccuacuccaacugcuaccccuacgacguccccgacuacgucucccuccgcucccucgucgccuccuccggcacccucgaguucaacaacgaguccuucaacuggaccggcgucacccagaacggcaccuccuccgccugcaagcgccgcuccaacaacuccuucuucucccgccucaacuggcucacccaccucaaguucaaguaccccgcccucaacgucaccaugcccaacaacgagaaguucgacaagcucuacaucuggggcguccaccaccccggcaccgacaacgaccagaucucccucuacgcccaggccuccggccgcaucaccgucuccaccaagcgcucccagcagaccgucauccccaacaucggcucccgcccccgcguccgcgacauccccucccgcaucuccaucuacuggaccaucgucaagcccggcgacacccuccucaucaacuccaccggcaaccucaucgccccccgcggcuacuucaagauccgcuccggcaaguccuccaucaugcgcuccgacgcccccaucgacaagugcaacuccgagugcaucacccccaacggcuccauccccaacgacaagcccuuccagaacgucaaccgcaucaccuacggcgccugcccccgcuacgucaagcagaacacccucaagcucgccaccggcaugcgcaacguccccgagaagcagacccgcggcaucuucggcgccaucgccggcuucaucgagaacggcugggagggcauggucgacggcugguacggcuuccgccaccagaacuccgagggcaucggccaggccgccgaccucaaguccacccaggccgccaucaaccagaucaacggcaagcucaaccgccucaucggcaagaccaacgagaaguuccaccagaucgagaaggaguucuccgaggucgagggccgcauccaggaccucgagaaguacgucgaggacaccaagaucgaccucugguccuacaacgccgagcuccucgucgcccucgagaaccagcacaccaucgaccucaccgacuccgagaugaacaagcucuucgagcgcaccaagaagcagcuccgcgagaacgccgaggacaugggcaacggcugcuucaagaucuaccacaagugcgacaacgccugcaucggcuccauccgcaacggcaccuacgaccacgacgucuaccgcgacgaggcccucaacaaccgcuuccagaucaagggcgucgagcucaaguccggcuacaaggacuggauccucuggaucuccuucgccaucuccugcuuccuccucugcgucgcccuccucggcuucaucaugugggccugccagaagggcaacauccgcugcaacaucugcaucuga

SEQ ID NO: 97610 - RNA, 1701 nt, Artificial Sequence; identical to SEQ ID NO: 96669
  derived and/or modified CDS sequence (opt2) from hemagglutinin__InfluenzaA__ABO32816

SEQ ID NO: 97611 - RNA, 1701 nt, Artificial Sequence; identical to SEQ ID NO: 96292
  derived and/or modified CDS sequence (opt2) from hemagglutinin__InfluenzaA__ABO32827

SEQ ID NO: 97612 - RNA, 1701 nt, Artificial Sequence
  derived and/or modified CDS sequence (opt2) from hemagglutinin__InfluenzaA__ABO32838
augaagaccaucaucgcccucuccuacauccucugccucgucuucgcccagaagcuccccggcaacgacaacuccaccgccacccucugccucggccaccacgccguccccaacggcaccaucgucaagaccaucaccaacgaccagaucgaggucaccaacgccaccgagcucguccaguccuccuccaccggcggcaucugcgacuccccccaccagauccucgacggcgagaacugcacccucaucgacgcccuccucggcgacccccagugcgacggcuuccagaacaagcgcugggaccucuucgucgagcgcuccaaggccuacuccaacugcuaccccuacgacguccccgacuacgccucccuccgcucccucgucgccuccuccggcacccucgaguucaacaacgaguccuucaacuggaccggcgucacccagaacggcaccuccuccgccugcaagcgccgcuccaacaacuccuucuucucccgccucaacuggcucacccaccucaaguucaaguaccccgcccucaacgucaccaugcccaacaacgagaaguucgacaagcucuacaucuggggcguccaccaccccggcaccgacaacgaccagaucuuccucuacgcccaggccuccggccgcaucaccgucuccaccaagcgcucccagcagaccgucauccccaacaucggcucccgcccccgcguccgcaacauccccucccgcaucuccaucuacuggaccaucgucaagcccggcgacauccuccucaucaacuccaccggcaaccucaucgccccccgcggcuacuucaagauccgcuccggcaaguccuccaucaugcgcuccgacgcccccaucggcaagugcaacuccgagugcaucacccccaacggcuccauccccaacgacaagcccuuccagaacgucaaccgcaucaccuacggcgccugcccccgcuacgucaagcagaacacccucaagcucgccaccggcaugcgcaacguccccgagaagcagacccgcggcaucuucggcgccaucgccggcuucaucgagaacggcugggagggcauggucgacggcugguacggcuuccgccaccagaacuccgagggcaucggccaggccgccgaccucaaguccacccaggccgccaucaaccagaucaacggcaagcucaaccgccucaucggcaagaccaacgagaaguuccaccagaucgagaaggaguucuccgaggucgagggccgcauccaggaccucgagaaguacgucgaggacaccaagaucgaccucugguccuacaacgccgagcuccucgucgcccucgagaaccagcacaccaucgaccucaccgacuccgagaugaacaagcucuucgagcgcaccaagaagcagcuccgcgagaacgccgaggacaugggcaacggcugcuucaagaucuaccacaagugcgacaacgccugcaucggcuccauccgcaacggcaccuacgaccacgacgucuaccgcgacgaggcccucaacaaccgcuuccagaucaagggcgucgagcucaaguccggcuacaaggacuggauccucuggaucuccuucgccaucuccugcuuccuccucugcgucgcccuccucggcuucaucaugugggccugccagaagggcaacauccgcugcaacaucugcaucuga

SEQ ID NO: 97613 - RNA, 1701 nt, Artificial Sequence; identical to SEQ ID NO: 97612
  derived and/or modified CDS sequence (opt2) from hemagglutinin__InfluenzaA__ABO32849

SEQ ID NO: 97614 - RNA, 1701 nt, Artificial Sequence
  derived and/or modified CDS sequence (opt2) from hemagglutinin__InfluenzaA__ABO32860
augaagaccaucaucgcccucuccuacauccucugccucgucuucgcccagaagcuccccggcaacgacaacuccaccgccacccucugccucggccaccacgccguccccaacggcaccaucgucaagaccaucaccaacgaccagaucgaggucaccaacgccaccgagcucguccaguccuccuccaccggcggcaucugcgacuccccccaccagauccucgacggcgagaacugcacccucaucgacgcccuccucggcgacccccagugcgacggcuuccagaacaagcgcugggaccucuucgucgagcgcuccaaggccuacuccaacugcuaccccuacgacguccccgacuacgccucccuccgcucccucgucgccuccuccggcacccucgaguucaacaacgaguccuucaacuggaccggcgucacccagaacggcaccuccuccgccugcaagcgccgcuccaacaacuccuucuucucccgccucaacuggcucacccaccucaaguucaaguaccccgcccucaacgucaccaugcccaacaacgagaaguucgacaagcucuacaucuggggcguccaccaccccggcaccgacaacgaccagaucuuccucuacgcccaggccuccggccgcaucaccgucuccaccaagcgcucccagcagaccgucauccccaacaucggcucccgcccccgcguccgcgacauccccucccgcaucuccaucuacuggaccaucgucaagcccggcgacauccuccucaucaacuccaccggcaaccucaucgccccccgcggcuacuucaagauccgcuccggcaaguccuccaucaugcgcuccgacgcccccaucggcaagugcaacuccgagugcaucacccccaacggcuccauccccaacgacaagcccuuccagaacgucaaccgcaucaccuacggcgccugcccccgcuacgucaagcagaacacccucaagcucgccaccggcaugcgcaacguccccgagaagcagacccgcggcaucuucggcgccaucgccggcuucaucgagaacggcugggagggcauggucgacggcugguacggcuuccgccaccagaacuccgagggcaucggccaggccgccgaccucaaguccacccaggccgccaucaaccagaucaacggcaagcucaaccgccucaucggcaagaccaacgagaaguuccaccagaucgagaaggaguucuccgaggucgagggccgcauccaggaccucgagaaguacgucgaggacaccaagaucgaccucugguccuacaacgccgagcuccucgucgcccucgagaaccagcacaccaucgaccucaccgacuccgagaugaacaagcucuucgagcgcaccaagaagcagcuccgcgagaacgccgaggacaugggcaacggcugcuucaagaucuaccacaagugcgacaacgccugcaucggcuccauccgcaacggcaccuacgaccacgacgucuaccgcgacgaggcccucaacaaccgcuuccagaucaagggcgucgagcucaaguccggcuacaaggacuggauccucuggaucuccuucgccaucuccugcuuccuccucugcgucgcccuccucggcuucaucaugugggccugccagaagggcaacauccgcugcaacaucugcaucuga

SEQ ID NO: 97615 - RNA, 1701 nt, Artificial Sequence; identical to SEQ ID NO: 97597
  derived and/or modified CDS sequence (opt2) from hemagglutinin__InfluenzaA__ABO32871

SEQ ID NO: 97616 - RNA, 1701 nt, Artificial Sequence
  derived and/or modified CDS sequence (opt2) from hemagglutinin__InfluenzaA__ABO32882
augaagaccaucaucgcccucuccuacaucaucugccucgucuucgcccagaagcuccccggcaacgacaacuccaccgccacccucugccucggccaccacgccguccccaacggcaccaucgucaagaccaucaccaacgaccagaucgaggucaccaacgccaccgagcucguccaguccuccuccaccggcgagaucugcgacuccccccaccagauccucgacggcgagaacugcacccucaucgacgcccuccucggcgacccccagugcgacggcuuccagaacaagaagugggaccucuucgucgagcgcuccaaggccuacuccaacugcuaccccuacgacguccccgacuacgccucccuccgcucccucgucgccuccuccggcacccucgaguucaacaacgaguccuucaacuggaccggcgucacccagaacggcaccuccuccgccugcaagcgccgcuccaacaacuccuucuucucccgccucaacuggcucacccaccucaaguucaaguaccccgcccucaacgucaccaugcccaacaacgagaaguucgacaagcucuacaucuggggcguccaccaccccggcaccgacaacgaccagaucuuccccuacgcccaggccuccggccgcaucaccgucuccaccaagcgcucccagcagaccgucauccccaacaucggcucccgcccccgcguccgcaacauccccucccgcaucuccaucuacuggaccaucgucaagcccggcgacauccuccucaucaacuccaccggcaaccucaucgccccccgcggcuacuuccgcauccgcuccggcaaguccuccaucaugcgcuccgacgcccccaucggcaagugcaacuccgagugcaucacccccaacggcuccauccccaacgacaagcccuuccagaacgucaaccgcaucaccuacggcgccugcccccgcuacgucaagcagaacacccucaagcucgccaccggcaugcgcaacguccccgagaagcagacccgcggcaucuucggcgccaucgccggcuucaucgagaacggcugggagggcauggucgacggcugguacggcuuccgccaccagaacuccgagggcaucggccaggccgccgaccucaaguccacccaggccgccaucaaccagaucaacggcaagcucaaccgccucaucggcaagaccaacgagaaguuccaccagaucgagaaggaguucuccgaggucgagggccgcauccaggaccucgagaaguacgucgaggacaccaagaucgaccucugguccuacaacgccgagcuccucgucgcccucgagaaccagcacaccaucgaccucaccgacuccgagaugaacaagcucuucgagcgcaccaagaagcagcuccgcgagaacgccgaggacaugggcaacggcugcuucaagaucuaccacaagugcgacaacgccugcaucggcuccauccgcaacggcaccuacgaccacgacgucuaccgcgacgaggcccucaacaaccgcuuccagaucaagggcgucgagcucaaguccggcuacaaggacuggauccucuggaucuccuucgccaucuccugcuuccuccucugcgucgcccuccucggcuucaucaugugggccugccagaagggcaacauccgcugcaacaucugcaucuga

SEQ ID NO: 97617 - RNA, 1701 nt, Artificial Sequence
  derived and/or modified CDS sequence (opt2) from hemagglutinin__InfluenzaA__ABO32893
augaagaccaucaucgcccucuccuacauccucugccucgucuucgcccagaagcuccccggcaacgacaacuccaccgccacccucugccucggccaccacgccguccccaacggcaccaucgucaagaccaucaccaacgaccagaucgaggucaccaacgccaccgagcucguccaguccuccuccaccggcgagaucugcgacuccccccaccagauccucgacggcgagaacugcacccucaucgacgcccuccucggcgacccccagugcgacggcuuccagaacaagaagugggaccucuucgucgagcgcuccaaggccuacuccaacugcuaccccuacgacguccccgacuacgccucccuccgcucccucgucgccuccuccggcacccucgaguucaacaacgaguccuucaacuggaccggcgucacccagaacggcaccuccuccgccugcaagcgccgcuccaacaacuccuucuucucccgccucaacuggcucacccaccucaaguucaaguaccccgcccucaacgucaccaugcccaacaacgagaaguucgacaagcucuacaucuggggcguccaccaccccggcaccgacaacgaccagaucuuccucuacgcccaggccuccggccgcaucaccgucuccaccaagcgcucccagcagaccgucauccccaacaucggcucccgcccccgcguccgcaacauccccucccgcaucuccaucuacuggaccaucgucaagcccggcgacauccuccucaucaacuccaccggcaaccucaucgccccccgcggcuacuucaagauccgcuccggcaaguccuccaucaugcgcuccgacgcccccaucggcaagugcaacuccgagugcaucacccccaacggcuccauccccaacgacaagcccuuccagaacgucaaccgcaucaccuacggcgccugcccccgcuacgucaagcagaacacccucaagcucgccaccggcaugcgcaacguccccgagaagcagacccgcggcaucuucggcgccaucgccggcuucaucgagaacggcugggagggcauggucgacggcugguacggcuuccgccaccagaacuccgagggcaucggccaggccgccgaccucaaguccacccaggccgccaucaaccagaucaacggcaagcucaaccgccucaucggcaagaccaacgagaaguuccaccagaucgagaaggaguucuccgaggucgagggccgcauccaggaccucgagaaguacgucgaggacaccaagaucgaccucugguccuacaacgccgagcuccucgucgcccucgagaaccagcacaccaucgaccucaccgacuccgagaugaacaagcucuucgagcgcaccaagaagcagcuccgcgagaacgccgaggacaugggcaacggcugcuucaagaucuaccacaagugcgacaacgccugcaucggcuccauccgcaacggcaccuacgaccacgacgucuaccgcgacgaggcccucaacaaccgcuuccagaucaagggcgucgagcucaaguccggcuacaaggacuggauccucuggaucuccuucgccaucuccugcuuccuccucugcgucguccuccucggcuucaucaugugggccugccagaagggcaacauccgcugcaacaucugcaucuga

SEQ ID NO: 97618 - RNA, 1701 nt, Artificial Sequence; identical to SEQ ID NO: 97617
  derived and/or modified CDS sequence (opt2) from hemagglutinin__InfluenzaA__ABO32904

SEQ ID NO: 97619 - RNA, 1701 nt, Artificial Sequence; identical to SEQ ID NO: 97432
  derived and/or modified CDS sequence (opt2) from hemagglutinin__InfluenzaA__ABO32915

SEQ ID NO: 97620 - RNA, 1701 nt, Artificial Sequence; identical to SEQ ID NO: 97432
  derived and/or modified CDS sequence (opt2) from hemagglutinin__InfluenzaA__ABO32926

SEQ ID NO: 97621 - RNA, 1701 nt, Artificial Sequence
  derived and/or modified CDS sequence (opt2) from hemagglutinin__InfluenzaA__ABO32937
augaagaccaucaucgcccucuccuacauccucugccucgucuucgcccagaagcuccccggcaacgacaacuccaccgccacccucugccucggccaccacgccguccccaacggcaccaucguccgcaccaucaccaacgaccagaucgaggucaccaacgccaccgagcucguccaguccuccuccaccggcgagaucugcgacuccccccaccagauccucgacggcgagaacugcacccucaucgacgcccuccucggcgacccccagugcgacggcuuccagaacaagaagugggaccucuucgucgagcgcuccaaggccuacuccaacugcuaccccuacgacguccccgacuacgccucccuccgcucccucgucgccuccuccggcacccucgaguucaacaacgaguccuucaacuggaccggcgucacccagaacggcaccuccuccuccugcaagcgccgcuccaacaacuccuucuucucccgccucaacuggcucacccaccucaaguucaaguaccccgcccucaacgucaccaugcccaacaacgagaaguucgacaagcucuacaucuggggcguccaccaccccggcaccgacaacgaccagaucuuccucuacgcccaggccuccggccgcaucaccgucuccaccaagcgcucccagcagaccgucauccccaacaucggcucccgcccccgcguccgcaacauccccucccgcaucuccaucuacuggaccaucgucaagcccggcgacauccuccucaucaacuccaccggcaaccucaucgccccccgcggcuacuucaagauccgcuccggcaaguccuccaucaugcgcuccgacgcccccaucggcaagugcaacuccgagugcaucacccccaacggcuccauccccaacgacaagcccuuccagaacgucaaccgcaucaccuacggcgccugcccccgcuacgucaagcagaacacccucaagcucgccaccggcaugcgcaacguccccgagaagcagacccgcggcaucuucggcgccaucgccggcuucaucgagaacggcugggagggcauggucgacggcugguacggcuuccgccaccagaacuccgagggcaucggccaggccgccgaccucaaguccacccaggccgccaucaaccagaucaacggcaagcucaaccgccucaucggcaagaccaacgagaaguuccaccagaucgagaaggaguucuccgaggucgagggccgcauccaggaccucgagaaguacgucgaggacaccaagaucgaccucugguccuacaacgccgagcuccucgucgcccucgagaaccagcacaccaucgaccucaccgacuccgagaugaacaagcucuucgagcgcaccaagaagcagcuccgcgagaacgccgaggacaugggcaacggcugcuucaagaucuaccacaagugcgacaacgccugcaucggcuccauccgcaacggcaccuacgaccacgacgucuaccgcgacgaggcccucaacaaccgcuuccagaucaagggcgucgagcucaaguccggcuacaaggacuggauccucuggaucuccuucgccaucuccugcuuccuccucugcgucgcccuccucggcuucaucaugugggccugccagaagggcaacauccgcugcaacaucugcaucuga

SEQ ID NO: 97622 - RNA, 1698 nt, Artificial Sequence
  derived and/or modified CDS sequence (opt2) from hemagglutinin__InfluenzaA__ABO32948
augcgcgccaagcuccucguccuccucugcaccuucaccgccaccuacgccgacaccaucugcaucggcuaccacgccaacaacuccaccgacaccgucgacaccguccucgagaagaacgucaccgucacccacuccgucaaccuccucgaggacucccacaacggcaagcucugccuccucaagggcaucgccccccuccagcucggcaacugcuccgucgccggcuggauccucggcaaccccgagugcgagcuccucaucuccaaggaguccugguccuacaucgucgagacccccaaccccgagaacggcaccugcuaccccggcuacuucgccgacuacgaggagcuccgcgagcagcucuccuccgucuccuccuucgagcgcuucgagaucuuccccaagggcuccuccuggcccaaccacaccgucaccggcgucuccgccuccugcucccacaacggcaaguccuccuucuaccgcaaccuccucuggcucaccggcaagaacggccucuaccccaaccucuccauguccuacgucaacaacaaggagaaggagguccucguccucuggggcguccaccacccccccaacaucggcgaccagcgcgcccucuaccacaccgagaacgccuacgucuccgucgucuccucccacuacucccgccgcuucacccccgagaucgccaagcgccccaagguccgcgaccaggagggccgcaucaacuacuacuggacccuccucgagcccggcgacaccaucaucuucgaggccaacggcaaccucaucgcccccugguacgccuucgcccucucccgcggcuucggcuccggcaucaucaccuccaacgcccccauggacgagugcgacgccaagugccagaccccccagggcgccaucaacuccucccuccccuuccagaacguccaccccgucaccaucggcgagugccccaaguacguccgcuccgccaagcuccgcauggucaccggccuccgcaacauccccuccauccagucccgcggccucuucggcgccaucgccggcuucaucgagggcggcuggaccggcauggucgacggcugguacggcuaccaccaccagaacgagcagggcuccggcuacgccgccgaccagaaguccacccagaacgccaucaacggcaucaccaacaaggucaacuccgucaucgagaagaugaacacccaguucaccgccgucggcaaggaguucaacaagcucgagcgccgcauggagaaccucaacaagaaggucgacgacggcuuccucgacaucuggaccuacaacgccgagcuccucguccuccucgagaacgagcgcacccucgacuuccacgacuccaacgucaagaaccucuacgagaaggucaagucccagcucaagaacaacgccaaggagaucggcaacggcugcuucgaguucuaccacaagugcaacaacgagugcauggaguccgucaagaacggcaccuacgacuaccccaaguacuccgaggaguccaagcucaaccgcgagaagaucgacggcgucaagcucgaguccaugggcgucuaccagauccucgccaucuacuccaccgucgccuccucccucguccuccucgucucccucggcgccaucuccuucuggaugugcuccaacggcucccuccagugccgcaucugcaucuga

SEQ ID NO: 97623 - RNA, 1698 nt, Artificial Sequence
  derived and/or modified CDS sequence (opt2) from hemagglutinin__InfluenzaA__ABO32959
augaaggccaagcuccucguccuccucugcaccuucaccgccaccuacgccgacaccaucugcaucggcuaccacgccaacaacuccaccgacaccgucgacaccguccucgagaagaacgucaccgucacccacuccgucaaccuccucgaggacucccacaacggcaagcucugccuccucaagggcaucgccccccuccagcucggcaacugcuccgucgccggcuggauccucggcaaccccgagugcgagcuccucaucuccaaggaguccugguccuacaucgucgagacccccaaccccgagaacggcaccugcuaccccggcuacuucgccgacuacgaggagcuccgcgagcagcucuccuccgucuccuccuucgagcgcuucgagaucuuccccaaggaguccuccuggcccaaccacaccgucaccggcgucuccgccuccugcucccacaacggcaaguccuccuucuaccgcaaccuccucuggcucaccggcaagaacggccucuaccccaaccucucccgcuccuacgucaacaacaaggagaaggagguccucguccucuggggcguccaccacccccccaacaucggcgaccagcgcgcccucuaccacaccgagaacgccuacgucuccgucgucuccucccacuacucccgccgcuucacccccgagaucgccaagcgccccaagguccgcgaccaggagggccgcaucaacuacuacuggacccuccucgagcccggcgacacccucaucuucgaggccaacggcaaccucaucgcccccugguacgccuucgcccucucccgcggcuucggcuccggcaucaucaccuccaacgcccccauggacgagugcgacgccaagugccagaccccccagggcgccaucaacuccucccuccccuuccagaacguccaccccgucaccaucggcgagugccccaaguacguccgcuccaccaagcuccgcauggucaccggccuccgcaacauccccuccauccagucccgcggccucuucggcgccaucgccggcuucaucgagggcggcuggaccggcauggucgacggcugguacggcuaccaccaccagaacgagcagggcuccggcuacgccgccgaccagaaguccacccagaacgccaucaacggcaucaccaacaaggucaacuccgucaucgagaagaugaacacccaguucaccgccgucggcaaggaguucaacaagcucgagcgccgcauggagaaccucaacaagaaggucgacgacggcuuccucgacaucuggaccuacaacgccgagcuccucguccuccucgagaacgagcgcacccucgacuuccacgacuccaacgucaagaaccucuacgagaaggucaagucccagcucaagaacaacgccaaggagaucggcaacggcugcuucgaguucuaccacaagugcaacaacgagugcauggaguccgucaagaacggcaccuacgacuaccccaaguacuccgaggaguccaagcucaaccgcgagaagaucgacggcgucaagcucgaguccaugggcgucuaccagauccucgccaucuacuccaccgucgccuccucccucguccuccucgucucccucggcgccaucuccuucuggaugugcuccaacggcucccuccagugccgcaucugcaucuga

SEQ ID NO: 97624 - RNA, 1698 nt, Artificial Sequence; identical to SEQ ID NO: 97240
  derived and/or modified CDS sequence (opt2) from hemagglutinin__InfluenzaA__ABO32970

SEQ ID NO: 97625 - RNA, 1701 nt, Artificial Sequence
  derived and/or modified CDS sequence (opt2) from hemagglutinin__InfluenzaA__ABO32981
augaaggccaagcuccucguccuccucugcgcccucuccgccaccgacgccgacaccaucugcaucggcuaccacgccaacaacuccaccgacaccgucgacaccguccucgagaagaacgucaccgucacccacuccgucaaccuccucgaggacucccacaacggcaagcucugccgccucaagggcaucgccccccuccagcucggcaagugcuccaucgccggcuggauccucggcaaccccgagugcgagucccucuucuccaagaaguccugguccuacaucgccgagacccccaacuccgagaacggcaccugcuaccccggcuacuucgccgacuacgaggagcuccgcgagcagcucuccuccgucuccuccuucgagcgcuucgagaucuuccccaaggagcgcuccuggcccaagcacaacgucacccgcggcgucaccgccuccugcucccacaagggcaaguccuccuucuaccgcaaccuccucuggcucaccgagaagaacggcuccuaccccaaccucuccaaguccuacgucaacaacaaggagaaggagguccucguccucuggggcguccaccaccccuccaacaucaaggaccagaagaccaucuaccgcaaggagaacgccuacgucuccgucgucuccuccaacuacaaccgccgcuucacccccgagaucgccgagcgccccaagguccgcgaccaggccggccgcaucaacuacuacuggacccuccucgagcccggcgacaccaucaucuucgaggccaacggcaaccucaucgcccccugguacgccuucgcccucucccgcggcuucggcuccggcaucaucaccuccaacgccuccauggacgagugcgacaccaagugccagaccccccagggcgccaucaacuccucccuccccuuccagaacguccaccccgucaccaucggcgagugccccaaguacguccgcuccaccaagcuccgcauggucaccggccuccgcaacauccccuccauccagucccgcggccucuucggcgccaucgccggcuucaucgagggcggcuggaccggcaugaucgacggcugguacggcuaccaccaccagaacgagcagggcuccggcuacgccgccgaccagaaguccacccagaacgccaucaacggcaucaccaacaaggucaacuccgucaucgagaagaugaacacccaguucaccgccgucggcaaggaguucaacaagcucgagaagcgcauggagaaccucaacaagaaggucgacgacggcuuccucgacaucuggaccuacaacgccgagcuccucguccuccucgagaacgagcgcacccucgacuuccacgacuccaacgucaagaaccucuacgagaaggucaagucccagcucaagaacaacgccaaggagaucggcaacggcugcuucgaguucuaccacaagugcaacaacgagugcauggaguccgucaagaacggcaccuacgacuaccccaaguacuccgaggaguccaagcucaaccgcgagaagaucgacggcgucaagcucgaguccaugggcgucuaccagauccucgccaucuacuccaccgucgccuccucccucguccuccucgucucccucggcgccaucuccuucuggaugugcuccaacggcucccuccagugccgcaucugcaucuga

SEQ ID NO: 97626 - RNA, 1701 nt, Artificial Sequence
  derived and/or modified CDS sequence (opt2) from hemagglutinin__InfluenzaA__ABO32992
augaaggccaagcuccucguccuccucugcgcccucuccgccaccgacgccgacaccaucugcaucggcuaccacgccaacaacuccaccgacaccgucgacaccguccucgagaagaacgucaccgucacccacuccgucaaccuccucgaggacucccacaacggcaagcucugccgccucaagggcaucgccccccuccagcucggcaagugcuccaucgccggcuggauccucggcaaccccgagugcgagucccucuucuccaagaaguccugguccuacaucgccgagacccccaacuccgagaacggcaccugcuaccccggcuacuucgccgacuacgaggagcuccgcgagcagcucuccuccgucuccuccuucgagcgcuucgagaucuuccccaaggagcgcuccuggcccaagcacgacgucacccgcggcgucaccgccuccugcucccacaagggcaaguccuccuucuaccgcaaccuccucuggcucaccgagaagaacggcuccuaccccaaccucuccaaguccuacgucaacaacaaggagaaggagguccucguccucuggggcguccaccaccccuccaacaucgaggaccagaagaccaucuaccgcaaggagaacgccuacgucuccgucgucuccuccaacuacaaccgccgcuucacccccgagaucuccgagcgccccaagguccgcgaccagaagggccgcaucaacuacuacuggacccuccucgagcccggcgacaccaucaucuucgaggccaacggcaaccucaucgcccccugguacgccuucgcccucucccgcggcuucggcuccggcaucaucaccuccaacgccuccauggacgagugcgacaccaagugccagaccccccagggcgccaucaacuccucccuccccuuccagaacguccaccccgucaccaucggcgagugccccaaguacguccgcuccaccaagcuccgcauggucaccggccuccgcaacauccccuccauccagucccgcggccucuucggcgccaucgccggcuucaucgagggcggcuggaccggcaugaucgacggcugguacggcuaccaccaccagaacgagcagggcuccggcuacgccgccgaccagaaguccacccagaacgccaucaacggcaucaccaacaaggucaacuccgucaucgagaagaugaacacccaguucaccgccgucggcaaggaguucaacaagcucgagaagcgcauggagaaccucaacaagaaggucgacgacggcuuccucgacaucuggaccuacaacgccgagcuccucguccuccucgagaacgagcgcacccucgacuuccacgacuccaacgucaagaaccucuacgagaaggucaagucccagcucaagaacaacgccaaggagaucggcaacggcugcuucgaguucuaccacaagugcaacaacgagugcauggaguccgucaagaacggcaccuacgacuaccccaaguacuccgaggaguccaagcucaaccgcgagaagaucgacggcgucaagcucgaguccaugggcgucuaccagauccucgccaucuacuccaccgucgccuccucccucguccuccucgucucccucggcgccaucuccuucuggaugugcuccaacggcucccuccagugccgcaucugcaucuga

SEQ ID NO: 97627 - RNA, 1701 nt, Artificial Sequence
  derived and/or modified CDS sequence (opt2) from hemagglutinin__InfluenzaA__ABO33006
augaaggccaagauccucguccuccucugcgcccucuccgccaccgacgccgacaccaucugcaucggcuaccacgccaacaacuccaccgacaccgucgacaccguccucgagaagaacgucaccgucacccacuccgucaaccuccucgaggacucccacaacggcaagcucugccgccucaagggcaucgccccccuccagcucggcaagugcuccaucgccggcuggauccucggcaaccccgagugcgagucccucuucuccaagaaguccugguccuacaucgccgagacccccaacuccgagaacggcaccugcuaccccggcuacuucgccgacuacgaggagcuccgcgagcagcucuccuccgucuccuccuucgagcgcuucgagaucuuccccaaggagcgcuccuggcccaagcacaacgucacccgcggcgucaccgccuccugcucccacaagggcaaguccuccuucuaccgcaaccuccucuggcucaccgagaagaacggcuccuaccccaaccucuccaaguccuacgucaacaacaaggagaaggagguccucguccucuggggcguccaccaccccuccaacaucgaggaccagaagaccaucuaccgcaaggagaacgccuacgucuccgucgucuccuccaacuacaaccgccgcuucacccccgagaucuccaagcgccccaagguccgcgaccaggagggccgcaucaacuacuacuggacccuccucgagcccggcgacaccaucaucuucgaggccaacggcaaccucaucgcccccugguacgccuucgcccucucccgcggcuucggcuccggcaucaucaccuccaacgccuccauggacgagugcgacaccaagugccagaccccccagggcgccaucaacuccucccuccccuuccagaacguccaccccgucaccaucggcgagugccccaaguacguccgcuccaccaagcuccgcauggucaccggccuccgcaacauccccuccauccagucccgcggccucuucggcgccaucgccggcuucaucgagggcggcuggaccggcaugaucgacggcugguacggcuaccaccaccagaacgagcagggcuccggcuacgccgccgaccagaaguccacccagaacgccaucaacggcaucaccaacaaggucaacuccgucaucgagaagaugaacacccaguucaccgccgucggcaaggaguucaacaagcucgagaagcgcauggagaaccucaacaagaaggucgacgacggcuuccucgacaucuggaccuacaacgccgagcuccucguccuccucgagaacgagcgcacccucgacuuccacgacuccaacgucaagaaccucuacgagaaggucaagucccagcucaagaacaacgccaaggagaucggcaacggcugcuucgaguucuaccacaagugcaacaacgagugcauggaguccgucaagaacggcaccuacgacuaccccaaguacuccgaggaguccaagcucaaccgcgagaagaucgacggcgucaagcucgaguccaugggcgucuaccagauccucgccaucuacuccaccgucgccuccucccucguccuccucgucucccucggcgccaucuccuucuggaugugcuccaacggcucccuccagugccgcaucugcaucuga

SEQ ID NO: 97628 - RNA, 1701 nt, Artificial Sequence
  derived and/or modified CDS sequence (opt2) from hemagglutinin__InfluenzaA__ABO33025
augaaggccaagcuccucguccuccucugcgcccucuccgccaccgacgccgacaccaucugcaucggcuaccacgccaacaacuccaccgacaccgucgacaccguccucgagaagaacgucaccgucacccacuccgucaaccuccucgaggacaaccacaacggcaagcucugcaagcucaagggcaucgccccccuccagcucggcaagugcuccaucgccggcuggauccucggcaaccccgagugcgagucccucuucuccaagaaguccugguccuacaucgccgagacccccaacuccgagaacggcaccugcuaccccggcuacuucgccgacuacgaggagcuccgcgagcagcucuccuccgucuccuccuucgagcgcuucgagaucuuccccaaggaguccuccuggcccaaccacaacgucaccaagggcgucaccgccuccugcucccacaagggcaaguccuccuucuaccgcaaccuccucuggcucaccgagaagaacggcuccuaccccaaccucuccaaguccuacgucaacaacaaggagaaggagguccucguccucuggggcguccaccaccccuccaacaucaaggaccagcgcaccaucuaccgcaaggagaacgccuacgucuccgucgucuccucccacuacaaccgccgcuucacccccgagaucgccaagcgccccaagguccgcgaccaggagggccgcaucaacuacuacuggacccuccucgagcccggcgacaccaucaucuucgaggccaacggcaaccucaucgcccccugguacgccuucgcccucucccgcggcuucggcuccggcaucaucaccuccaacgccuccauggacgagugcgacgccaagugccagaccccccagggcgccaucaacuccucccuccccuuccagaacguccaccccgucaccaucggcgagugccccaaguacguccgcuccaccaagcuccgcauggucaccggccuccgcaacauccccuccauccagucccgcggccucuucggcgccaucgccggcuucaucgagggcggcuggaccggcaugaucgacggcugguacggcuaccaccaccagaacgagcagggcuccggcuacgccgccgaccagaaguccacccaguccgccaucaacggcaucaccaacaaggucaacuccaucaucgagaagaugaacacccaguucaccgccgucggcaaggaguucaacaagcucgagaagcgcauggagaaccucaacaagaaggucgacgacggcuuccucgacaucuggaccuacaacgccgagcuccucguccuccucgagaacgagcgcacccucgacuuccacgacuccaacgucaagaaccucuacgagaaggucaagucccagcucaagaacaacgccaaggagaucggcaacggcugcuucgaguucuaccacaagugcaacaacgagugcauggaguccgucaagaacggcaccuacgacuaccccaaguacuccgaggaguccaagcucaaccgcgagaagaucgacggcgucaagcucgaguccaugggcgucuaccagauccucgccaucuacuccaccgucgccuccucccucguccuccucgucucccucggcgccaucuccuucuggaugugcuccaacggcucccuccagugccgcaucugcaucuga

SEQ ID NO: 97629 - RNA, 1701 nt, Artificial Sequence
  derived and/or modified CDS sequence (opt2) from hemagglutinin__InfluenzaA__ABO33036
augaagaccaucaucgcccucuccuacauccucugccucgucuucgcccagaagcuccccggcaacgacaacuccaccgccacccucugccucggccaccacgccguccccaacggcacccucgucaagaccaucaccaacgaccagaucgaggucaccaacgccaccgagcucguccaguccuccuccaccggccgcaucugcaacuccccccaccagauccucgacggcgagaacugcacccucaucgacgcccuccucggcgacccccacugcgacggcuuccagaacaaggagugggaccucuucgucgagcgccgcaaggccuacuccaacugcuaccccuacgacguccccgacuacgccucccuccgcucccucgucgccuccuccggcacccucgaguucaacaacgaguccuucaacuggaccggcgucgcccagaacggcaccuccuccgccugcaagcgccgcuccaucaaguccuucuucucccgccucaacuggcuccaccagcucaaguacaaguaccccgcccucaacgucaccaugcccaacaacgagaaguucgacaagcucuacaucuggggcguccaccaccccuccaccgacuccgaccagaucucccucuacgcccaggccuccggccgcgucaccgucuccaccaagcgcucccagcagaccgucauccccaacaucggcucccgccccuggguccgcggcgucuccucccgcaucuccaucuacuggaccaucgucaagcccggcgacauccuccucaucaacuccaccggcaaccucaucgccccccgcggcuacuucaagauccgcuccggcaaguccuccaucaugcgcuccgacgcccccaucggcaagugcaacuccgagugcaucacccccaacggcuccauccccaacgacaagcccuuccagaacgucaaccgcaucaccuacggcgccugcccccgcuacgucaagcagaacacccucaagcucgccaccggcaugcgcaacguccccgagaagcagacccgcggcaucuucggcgccaucgccggcuucaucgagaacggcugggagggcauggucgacggcugguacggcuuccgccaccagaacuccgagggcaccggccaggccgccgaccucaaguccacccaggccgccaucaaccagaucaacggcaagcucaaccgccucaucgagaagaccaacgagaaguuccaccagaucgagaaggaguucuccgaggucgagggccgcauccaggaccucgagaaguacgucgaggacaccaagaucgaccucugguccuacaacgccgagcuccucgucgcccucgagaaccagcacaccaucgaccucaccgacuccgagaugaacaagcucuucgagcgcaccaagaagcagcuccgcgagaacgccgaggacaugggcaacggcugcuucaagaucuaccacaagugcgacaacgccugcaucggcuccauccgcaacggcaccuacgaccacgacgucuaccgcgacgaggcccucaacaaccgcuuccagaucaagggcgucgagcucaaguccggcuacaaggacuggauccucuggaucuccuucgccaucuccugcuuccuccucugcgucguccuccucggcuucaucaugugggccugccagaagggcaacauccgcugcaacaucugcaucuga

SEQ ID NO: 97630 - RNA, 1701 nt, Artificial Sequence; identical to SEQ ID NO: 96108
  derived and/or modified CDS sequence (opt2) from hemagglutinin__InfluenzaA__ABO33047

SEQ ID NO: 97631 - RNA, 1701 nt, Artificial Sequence; identical to SEQ ID NO: 96686
  derived and/or modified CDS sequence (opt2) from hemagglutinin__InfluenzaA__ABO33058

SEQ ID NO: 97632 - RNA, 1701 nt, Artificial Sequence
  derived and/or modified CDS sequence (opt2) from hemagglutinin__InfluenzaA__ABO33069
augaagaccaucaucgcccucuccuacaucuucugccucgucuucgcccagaaccuccccggcaacgacaacuccaccgccacccucugccucggccaccacgccguccccaacggcacccucgucaagaccaucaccaacgaccagaucgaggucaccaacgccaccgagcucguccaguccuccuccaccggccgcaucugcgacuccccccaccgcauccucgacggcaagaacugcacccucaucgacgcccuccucggcgacccccacugcgacggcuuccagaacgagaagugggaccucuucgucgagcgcuccaaggccuucuccaacugcuaccccuacgacguccccgacuacgccucccuccgcucccucgucgccuccuccggcacccucgaguucaucaacgagggcuucaacuggaccggcgucacccagaacggcggcuccuacgccugcaagcgcggccccgacaacuccuucuucucccgccucaacuggcucuacgaguccgaguccaaguaccccguccucaacgucaccaugcccaacaacgacaacuucgacaagcucuacaucuggggcguccaccaccccuccaccgacaaggagcagaccaaccucuacguccaggccuccggccgcgucaccgucuccaccaagaagucccagcagaccaucauccccaacgucggcucccgccccuggguccgcggccucuccucccgcaucuccaucuacuggaccaucgucaagcccggcgacauccuccucaucaacuccaacggcaaccucaucgccccccgcggcuacuucaagauccgcaccggcaaguccuccaucaugcgcuccgacgcccccaucggcaccugcuccuccgagugcaucacccccaacggcuccauccccaacgacaagcccuuccagaacgucaacaagaucaccuacggcgccugccccaaguacgucaagcagaacacccucaagcucgccaccggcaugcgcaacguccccgagaagcagacccgcggcaucuucggcgccaucgccggcuucaucgagaacggcugggagggcauggucgacggcugguacggcuuccgccaccagaacuccgagggcaccggccaggccgccgaccucaaguccacccaggccgccaucgaccagaucaacggcaagcucaaccgcgucaucgagaagaccaacgagaaguuccaccagaucgagaaggaguucuccgaggucgagggccgcauccaggaccucgagaaguacaucgaggacaccaagaucgaccucugguccuacaacgccgagcuccucgucgcccucgagaaccagcacaccaucgaccucaccgacuccaagaugaacaagcucuucgagaagacccgccgccagcuccgcgagaacgccgaggacaugggcaacggcugcuucaagaucuaccacaagugcgacaacgccugcaucggcuccauccgcaacggcaccuacgaccacgacgucuaccgcgacgaggcccucaacaaccgcuuccagaucaagggcgucgagcucaaguccggcuacaaggacuggauccucuggaucuccuucgccaucuccugcuuccuccucugcgucguccuccucggcuucaucaugugggccugccagaagggcaacauccgcugcaacaucugcaucuga

SEQ ID NO: 97633 - RNA, 1701 nt, Artificial Sequence; identical to SEQ ID NO: 96957
  derived and/or modified CDS sequence (opt2) from hemagglutinin__InfluenzaA__ABO37988

SEQ ID NO: 97634 - RNA, 1701 nt, Artificial Sequence
  derived and/or modified CDS sequence (opt2) from hemagglutinin__InfluenzaA__ABO38010
augaaggccaagcuccucguccuccucugcgccuucaccgccaccuacgccgacaccaucugcaucggcuaccacgccaacaacuccaccgacaccgucgacaccguccucgagaagaacgucaccgucacccacuccgucaaccuccucgaggacucccacaacggcaagcucugccgccucaagggcaccgccccccuccagcucggcaacugcuccgucgccggcuggauccucggcaaccccgagugcgagucccucuucuccaaggaguccugguccuacaucgccgagacccccaaccccgagaacggcaccugcuaccccggcuacuucgccgacuacgaggagcuccgcgagcagcucuccuccgucuccuccuucgagcgcuucgagaucuuccccaaggaguccuccuggcccaaccacaccgucaccaagggcgucaccgccuccugcucccacaacggcaaguccuccuucuacaagaaccuccucuggcucaccgagaagaacggccucuaccccaaccucuccaaguccuacgucaacaacaaggagaaggagguccucguccucuggggcguccaccaccccuccaacaucggcgaccagcgcgccaucuaccacaccgagaacgccuacgucuccgucgucuccucccacuacucccgccgcuucacccccgagaucgccaagcgccccaagguccgcgaccaggagggccgcaucaacuacuacuggacccuccucgagcccggcgacaccaucaucuucgaggccaacggcaaccucaucgcccccugguacgccuucgcccucucccgcggcgucggcuccggcaucaucaccuccaacgccuccaugggcgacugcgacgccaagugccagaccccccagggcgccaucaacuccucccuccccuuccagaacguccaccccgucaccaucggcgagugccccaaguacguccgcuccaccaagcuccgcauggucaccggccuccgcaacauccccuccauccagucccgcggccucuucggcgccaucgccggcuucaucgagggcggcuggaccggcaugaucgacggcugguacggcuaccaccaccagaacgagcagggcuccggcuacgccgccgacaagaaguccacccagaacgccaucgacggcaucaccaacaaggucaacuccgucaucgagaagaugaacacccaguucaccgccgucggcaaggaguucaacaagcucgagcgccgcauggagaaccucaacaagaaggucgacgacggcuuccucgacaucuggaccuacaacgccgagcuccucguccuccucgagaacgagcgcacccucgacuuccacgacuccaacgucaagaaccucuacgagaaggucaagaaccagcucaagaacaacgccaaggagaucggcaacggcugcuucgaguucuaccacaagugcaacaacgagugcauggaguccgucaagaacggcaccuacgacuaccccaaguacuccgaggaguccaagcucaagcgcgagaagaucgacggcgucaagcucgaguccaugggcgucuaccagauccucgccaucuacuccaccgucgccuccucccucguccuccucgucucccucggcgccaucuccuucuggaugugcuccaacggcucccuccagugccgcaucugcaucuga

SEQ ID NO: 97635 - RNA, 1698 nt, Artificial Sequence
  derived and/or modified CDS sequence (opt2) from hemagglutinin__InfluenzaA__ABO38021
augaaggccaagcuccucguccuccucugcaccuucaccgccaccuacgccgacaccaucugcaucggcuaccacgccaacaacuccaccgacaccgucgacaccguccucgagaagaacgucaccgucacccacuccgucaaccuccucgaggacucccacaacggcaagcucugccuccucaagggcaucgccccccuccagcucggcaacugcuccgucgccggcuggauccucggcaaccccgagugcgagcuccucauccccaaggaguccugguccuacaucgucgagacccccaaccccgagaacggcaccugcuaccccggcuacuucgccgacuacgaggagcuccgcgagcagcucuccuccgucuccuccuucgagcgcuucgagaucuuccccaaggaguccuccuggcccaaccacaccgucaccggcgucuccgccuccugcucccacaacggcaaguccuccuucuaccgcaaccuccucuggcucaccggcaagaacggccucuaccccaaccucuccaaguccuacgccaacaacaaggagaaggagguccucguccucuggggcguccaccacccccccaacaucggcgaccagcgcgcccucuaccacaccgagaacgccuacgucuccgucgucuccucccacuacucccgccgcuucauccccgagauggccaagcgccccaagguccgcgaccaggagggccgcaucaacuacuacuggacccuccucgagcccggcgacaccaucaucuucgaggccaacggcaaccucaucgcccccugguacgccuucgcccucucccgcggcuucggcuccggcaucaucaccuccaacgcccccaugggcgagugcgacgccaagugccagaccccccagggcgccaucaacuccucccuccccuuccagaacguccaccccgucaccaucggcgagugccccaaguacguccgcuccgccaagcuccgcauggucaccggccuccgcaacauccccuccauccagucccgcggccucuucggcgccaucgccggcuucaucgagggcggcuggaccggcauggucgacggcugguacggcuaccaccaccagaacgagcagggcuccggcuacgccgccgaccagaaguccacccagaacgccaucaacggcaucaccaacaaggucaacuccgucaucgagaagaugaacacccaguucaccgccgucggcaaggaguucaacaagcucgagcgccgcauggagaaccucaacaagaaggucgacgacggcuuccucgacaucuggaccuacaacgccgagcuccucguccuccucgagaacgagcgcacccucgacuuccacgacuccaacgucaagaaccucuacgagaaggucaagucccagcucaagaacaacgccaaggagaucggcaacggcugcuucgaguucuaccacaagugcaacaacgagugcauggaguccgucaagaacggcaccuacgacuaccccaaguacuccgaggaguccaagcucaaccgcgagaagaucgacggcgucaagcucgaguccaugggcgucuaccagauccucgccaucuacuccaccgucgccuccucccucguccuccucgucucccucggcgccaucuccuucuggaugugcuccaacggcucccuccagugccgcaucugcaucuga

SEQ ID NO: 97636 - RNA, 1698 nt, Artificial Sequence
  derived and/or modified CDS sequence (opt2) from hemagglutinin__InfluenzaA__ABO38032
augaaggucaagcuccucguccuccucugcaccuucaccgccaccuacgccgacaccaucugcaucggcuaccacgccaacaacuccaccgacaccgucgacaccguccucgagaagaacgucaccgucacccacuccgucaaccuccucgaggacucccacaacggcaagcucugccuccucaagggcaucgccccccuccagcucggcaacugcuccgucgccggcuggauccucggcaaccccgagugcgagcuccucaucuccaaggaguccugguccuacaucgucgagacccccgaccccgagaacggcaccugcuaccccggcuacuucgccgacuacgaggagcuccgcgagcagcucuccuccgucuccuccuucgagcgcuucgagaucuuccccaaggaguccuccuggcccaaccacaccgucaccggcgucuccgccuccugcucccacaacggcaaguccuccuucuaccgcaaccuccucuggcucaccggcaagaacggccucuaccccaaccucuccaaguccuacgccaacaacaaggagaaggagguccucguccucuggggcguccaccacccccccaacaucggcgaccagcgcgcccucuaccacaccgagaacgccuacgucuccgucgucuccucccacuacucccgccgcuucacccccgagaucgccaagcgccccaagguccgcgaccaggagggccgcaucaacuacuacuggacccuccucgagcccggcgacaccaucaucuucgaggccaacggcaaccucaucgccccccgcuacgccuucgcccucucccgcggcuucggcuccggcaucaucaccuccaacgcccccauggacgagugcgacgccaagugccagacccccaagggcgccaucaacuccucccuccccuuccagaacguccaccccgucaccaucggcgagugccccaaguacguccgcuccgccaagcuccgcauggucaccggccuccgcaacauccccuccauccagucccgcggccucuucggcgccaucgccggcuucaucgagggcggcuggaccggcauggucgacggcugguacggcuaccaccaccagaacgagcagggcuccggcuacgccgccgaccagaaguccacccagaacgccaucaacggcaucaccaacaaggucaacuccgucaucgagaagaugaacacccaguucaccgccgucggcaaggaguucaacaagcucgagcgccgcauggagaaccucaacaagaaggucgacgacggcuuccucgacaucuggaccuacaacgccgagcuccucguccuccucgagaacgagcgcacccucgacuuccacgacuccaacgucaagaaccucuacgagaaggucaagucccagcucaagaacaacgccaaggagaucggcaacggcugcuucgaguucuaccacaagugcaacaacgagugcauggaguccgucaagaacggcaccuacgacuaccccaaguacuccgaggaguccaagcucaaccgcgagaagaucgacggcgucaagcucgaguccaugggcaucuaccagauccucgccaucuacuccaccgucgccuccucccucguccuccucgucucccucggcgccaucuccuucuggaugugcuccaacggcucccuccagugccgcaucugcaucuga

SEQ ID NO: 97637 - RNA, 1698 nt, Artificial Sequence; identical to SEQ ID NO: 96836
  derived and/or modified CDS sequence (opt2) from hemagglutinin__InfluenzaA__ABO38043

SEQ ID NO: 97638 - RNA, 1701 nt, Artificial Sequence
  derived and/or modified CDS sequence (opt2) from hemagglutinin__InfluenzaA__ABO38054
augaaggcccgccuccucguccuccucugcgcccucgccgccaccgacgccgacaccaucugcaucggcuaccacgccaacaacuccaccgacaccgucgacaccguccucgagaagaacgucaccgucacccacuccgucaaccuccucgaggacucccacaacggcaagcucugccgccucaagggcaucgccccccuccagcucggcaagugcaacaucgccggcuggauccucggcaaccccgagugcgagucccuccucuccgagcgcuccugguccuacaucgucgagacccccaacuccgagaacggcaccugcuaccccggcgacuucaucgacuacgaggagcuccgcgagcagcucuccuccgucuccuccuucgagcgcuucgagaucuucuccaaggaguccuccuggcccaagcacaacaccacccgcggcgucaccgccgccugcucccacgccggcaaguccuccuucuaccgcaaccuccucuggcucaccgagaaggacggcuccuaccccaaccucaacaacuccuacgucaacaagaagggcaaggagguccucguccucuggggcguccaccaccccuccaacaucaaggaccagcagacccucuaccagaaggagaacgccuacgucuccgucgucuccuccaacuacaaccgccgcuucacccccgagaucgccgagcgccccaagguccgcggccaggccggccgcaugaacuacuacuggacccuccucaagcccggcgacaccaucauguucgaggccaacggcaaccucaucgcccccugguacgccuucgcccucucccgcggcuucggcuccggcaucaucaccuccaacgccuccaugcacgagugcgacaccaagugccagaccccccagggcgccaucaacuccucccuccccuuccagaacauccaccccgucaccaucggcgagugccccaaguacguccgcuccaccaagcuccgcauggucaccggccuccgcaacauccccuccauccagucccgcggccucuucggcgccaucgccggcuucaucgagggcggcuggaccggcaugaucgacggcugguacggcuaccaccaccagaacgagcagggcuccggcuacgccgccgaccagaaguccacccagaacgccaucaacggcaucaccaacaaggucaacuccgucaucgagaagaugaacacccaguucaccgccgucggcaaggaguucaacaaccucgagaagcgcauggagaaccucaacaagaaggucgacgacggcuuccucgacaucuggaccuacaacgccgagcuccucguccuccucgagaacgagcgcacccucgacuuccacgacuccaacgucaagaaccucuacgagaaggucaagaaccagcuccgcaacaacgccaaggagaucggcaacggcugcuucgaguucuaccacaagugcaacaacgagugcauggaguccgucaagaacggcaccuacgacuaccccaaguacuccgaggaguccaagcucaaccgcgagaagaucgacggcgucaagcucgaguccaugggcgucuaccagauccucgccaucuacuccaccgucgccuccucccucguccuccucgucucccucggcgccaucuccuucuggaugugcuccaacggcucccuccagugccgcaucugcaucuga

SEQ ID NO: 97639 - RNA, 1701 nt, Artificial Sequence
  derived and/or modified CDS sequence (opt2) from hemagglutinin__InfluenzaA__ABO38065
augaaggccaagcuccucguccuccucugcgcccucuccgccaccgacgccgacaccaucugcaucggcuaccacgccaacaacuccaccgacaccgucgacaccguccucgagaagaacgucaccgucacccacuccgucaaccuccucgaggacucccacaacggcaagcucugccgccucaagggcaucgccccccuccagcucggcaagugcuccaucgccggcuggauccucggcaaccccgagugcgagucccucuucuccaagaaguccugguccuacaucgccgagacccccaacuccgagaacggcaccugcuaccccggcuacuucgccgacuacgaggagcuccgcgagcagcucuccuccgucuccuccuucgagcgcuucgagaucuuccccaaggagcgcuccuggcccaagcacaacaucacccgcggcgucaccgccuccugcucccacaagggcaaguccuccuucuaccgcaaccuccucuggcucaccgagaagaacggcuccuaccccaaccucuccaaguccuacgucaacaacaaggagaaggagguccucguccucuggggcguccaccaccccuccaacaucgaggaccagaagaccaucuaccgcaaggagaacgccuacgucuccgucgucuccuccaacuacaaccgccgcuucacccccgagaucgccaagcgccccaagguccgcggccaggagggccgcaucaacuacuacuggacccuccucgagcccggcgacaccaucaucuucgaggccaacggcaaccucaucgcccccugguacgccuucgcccucucccgcggcuucggcuccggcaucaucaccuccaacgccuccauggacgagugcgacaccaagugccagaccccccagggcgccaucaacuccucccuccccuuccagaacguccaccccgucaccaucggcgagugccccaaguacguccgcuccaccaagcuccgcauggucaccggccuccgcaacauccccuccauccagucccgcggccucuucggcgccaucgccggcuucaucgagggcggcuggaccggcaugaucgacggcugguacggcuaccaccaccagaacgagcagggcuccggcuacgccgccgaccagaaguccacccagaacgccaucaacggcaucaccaacaaggucaacuccgucaucgagaagaugaacacccaguucaccgccgucggcaaggaguucaacaagcucgagaagcgcauggagaaccucaacaagaaggucgacgacggcuuccucgacaucuggaccuacaacgccgagcuccucguccuccucgagaacgagcgcacccucgacuuccacgacuccaacgucaagaaccucuacgagaaggucaagucccagcucaagaacaacgccaaggagaucggcaacggcugcuucgaguucuaccacaagugcaacaacgagugcauggaguccgucaagaacggcaccuacgacuaccccaaguacuccgaggaguccaagcucaaccgcgagaagaucgacggcgucaagcucgaguccaugggcgucuaccagauccucgccaucuacuccaccgucgccuccucccucguccuccucgucucccucggcgccaucuccuucuggaugugcuccaacggcucccuccagugccgcaucugcaucuga

SEQ ID NO: 97640 - RNA, 1701 nt, Artificial Sequence; identical to SEQ ID NO: 96279
  derived and/or modified CDS sequence (opt2) from hemagglutinin__InfluenzaA__ABO38076

SEQ ID NO: 97641 - RNA, 1701 nt, Artificial Sequence
  derived and/or modified CDS sequence (opt2) from hemagglutinin__InfluenzaA__ABO38087
augaagaccaucaucgcccucuccuacauccucugccucgucuucgcccagaagcuccccgucaacgacaacuccaccgccacccucugccucggccaccacgccguccccaacggcacccucgucaagaccaucaccaacgaccacaucgaggucaccaacgccaccgagcucguccaguccuccuccaccggccgcaucugcgacuccccccaccagauccucgacggcgagaacugcacccucaucgacgcccuccucggcgacccccacugcgacggcuuccagaacaaggagugggaccucuucgucgagcgcuccaccgccuacuccaacugcuaccccuacgacguccccgacuacgccucccuccgcucccucgucgccuccuccggcacccucgaguucaacaacgaguccuucaacuggaccggcgucgcccagaacggcaccuccuccgccugcaagcgccgcuccaucaaguccuucuucucccgccucaacuggcuccaccagcucaaguacaaguaccccgcccucaacgucaccaugcccaacaacgagaaguucgacaagcucuacaucuggggcguccaccaccccuccaccgacuccgaccagaucucccucuacgcccaggccuccggccgcgucaccgucuccaccaagcgcucccagcagaccgucauccccaacaucggcucccgccccuggguccgcggcgucuccucccgcaucuccaucuacuggaccaucgucaagcccggcgacauccuccucaucaacuccaccggcaaccucaucgccccccgcggcuacuucaagauccgcuccggcaaguccuccaucaugcgcuccaacgcccccaucggcaagugcaacuccgagugcaucacccccaacggcuccauccccaacgacaagcccuuccagaacgucaaccgcaucaccuacggcgccugcccccgcuacgucaagcagaacacccucaagcucgccaccggcaugcgcaacguccccgagaagcagacccgcggcaucuucggcgccaucgccggcuucaucgagaacggcugggagggcauggucgacggcugguacggcuuccgccaccagaacuccgagggcaccggccaggccgccgaccucaaguccacccaggccgccaucaaccagaucaacggcaagcucaaccgccucaucgagaagaccaacgagaaguuccaccagaucgagaaggaguucuccgaggucgagggccgcauccaggaccucgagaaguacgucgaggacaccaagaucgaccucugguccuacaacgccgagcuccucgucgcccucgagaaccagcacaccaucgaccucaccgacuccgagaugaacaagcucuucgagcgcacccgcaagcagcuccgcgagaacgccgaggacgucggcaacggcugcuucaagaucuaccacaagugcgacaacgccugcaucggcuccauccgcaacggcaccuacgaccacgacgucuaccgcgacgaggcccucaacaaccgcuuccagaucaagggcgucgagcucaaguccggcuacaaggacuggauccucuggaucuccuucgccaucuccugcuuccuccucugcgucguccuccucggcuucaucaugugggccugccagaagggcaacauccgcugcaacaucugcaucuga

SEQ ID NO: 97642 - RNA, 1689 nt, Artificial Sequence
  derived and/or modified CDS sequence (opt2) from hemagglutinin__InfluenzaA__ABO38098
auggccaucaucuaccucauccuccucuucaccgccguccgcggcgaccagaucugcaucggcuaccacgccaacaacuccaccgagaaggucgacaccauccucgagcgcaacgucaccgucacccacgccaaggacauccucgagaagacccacaacggcaagcucugcaagcucaacggcauccccccccucgagcucggcgacugcuccaucgccggcuggcuccucggcaaccccgagugcgaccgccuccucuccguccccgagugguccuacaucauggagaaggagaacccccgcgacggccucugcuaccccggcuccuucaacgacuacgaggagcucaagcaccuccucuccuccgucaagcacuucgagaaggucaagauccuccccaaggaccgcuggacccagcacaccaccaccggcggcucccgcgccugcgccgucuccggcaaccccuccuucuuccgcaacauggucuggcucaccaagaagggcuccaacuaccccgucgccaagggcuccuacaacaacaccuccggcgagcagaugcucaucaucuggggcguccaccaccccaacgacgagaccgagcagcgcacccucuaccagaacgucggcaccuacgucuccgucggcaccuccacccucaacaagcgcuccacccccgacaucgccacccgccccaaggucaacggccagggcggccgcauggaguucuccuggacccuccucgacaugugggacaccaucaacuucgaguccaccggcaaccucaucgcccccgaguacggcuucaagaucuccaagcgcggcuccuccggcaucaugaagaccgagggcacccucggcaacugcgagaccaagugccagaccccccucggcgccaucaacaccacccuccccuuccacaacguccacccccucaccaucggcgagugccccaaguacgucaaguccgagaagcucguccucgccaccggccuccgcaacgucccccagaucgagucccgcggccucuucggcgccaucgccggcuucaucgagggcggcuggcagggcauggucgacggcugguacggcuaccaccacuccaacgaccagggcuccggcuacgccgccgacaaggaguccacccagaaggccuucgacggcaucaccaacaaggucaacuccgucaucgagaagaugaacacccaguucgaggccgucggcaaggaguucuccaaccucgagcgccgccucgagaaccucaacaagaagauggaggacggcuuccucgacgucuggaccuacaacgccgagcuccucguccucauggagaacgagcgcacccucgacuuccacgacuccaacgucaagaaccucuacgacaagguccgcaugcagcuccgcgacaacgucaaggagcucggcaacggcugcuucgaguucuaccacaagugcgacgacgagugcaugaacuccgucaagaacggcaccuacgacuaccccaaguacgaggaggaguccaagcucaaccgcaacgagaucaagggcgucaagcucuccuccaugggcgucuaccagauccucgccaucuacgccaccgucgccggcucccucucccucgccaucaugauggccggcaucuccuucuggaugugcuccaacggcucccuccagugccgcaucugcaucuga

SEQ ID NO: 97643 - RNA, 1701 nt, Artificial Sequence
  derived and/or modified CDS sequence (opt2) from hemagglutinin__InfluenzaA__ABO38230
augaagaccaucaucgcccucuccuacaucuucugccaggucuucgcccagaaccuccccggcaacgacaacuccaccgccacccucugccucggccaccacgccguccccaacggcacccucgucaagaccaucaccaacgaccagaucgaggucaccaacgccaccgagcucguccaguccuccuccaccggccgcaucugcgacaacccccaccgcauccucgacggcaagaacugcacccucaucgacgcccuccucggcgacccccacugcgacggcuuccagaacgagaagugggaccucuucgucgagcgcuccaaggccuucuccaacugcuaccccuacgacguccccgacuacgccucccuccgcucccucgucgccuccuccggcacccucgaguucuucaacgagggcuucaacuggaccggcgucacccagaacggcggcuccuacgccugcaagcgcggccccgacaacuccuucuucucccgccucaacuggcucuacaaguccgaguccaccuaccccguccucaacgucaccaugcccaacaacgacaacuucgacaagcucuacaucuggggcguccaccaccccuccaccgacaaggagcagaccaaccucuacguccaggccuccggccgcgucaccgucuccaccaagcgcucccagcagaccaucauccccuccgucggcucccgccccuggguccgcggccucuccucccgcaucuccaucuacuggaccaucgucaagcccggcgacguccuccucaucaacuccaacggcaaccucaucgccccccgcggcuacuucaagauccgcaccggcaaguccuccaucaugcgcuccgacgcccccaucggcaccugcuccuccgagugcaucacccccaacggcuccauccccaacgacaagcccuuccagaacgucgacaagaucaccuacggcgccugccccaaguacgucaagcagaacacccucaagcucgccaccggcaugcgcaacguccccgagaagcagacccgcggcaucuucggcgccaucgccggcuucaucgagaacggcugggagggcaugaucgacggcugguacggcuuccgccaccagaacuccgagggcaccggccaggccgccgaccucaaguccacccaggccgccaucgaccagaucaacggcaagcucaaccgcgucaucgagaagaccaacgagaaguuccaccagaucgagaaggaguucuccgaggucgagggccgcauccaggaccucgagaaguacgucgaggacaccaagaucgaccucugguccuacaacgccgagcuccucgucgcccucgagaaccagcacaccaucgaccucaccgacuccgagaugaacaagcucuucgagaagacccgccgccagcuccgcgagaacgccgaggacaugggcaacggcugcuucaagaucuaccacaagugcgacaacgccugcaucggcuccauccgcaacggcaccuacgaccacgacgucuaccgcgacgaggcccucaacaaccgcuuccagaucaagggcgucgagcucaaguccggcuacaaggacuggauccucuggaucuccuucgccaucuccugcuuccuccucugcgucguccuccucggcuucaucaugugggccugccagaagggcaacauccgcugcaacaucugcaucuga

SEQ ID NO: 97644 - RNA, 1701 nt, Artificial Sequence
  derived and/or modified CDS sequence (opt2) from hemagglutinin__InfluenzaA__ABO38241
augaagaccaucaucgcccucuccuacaucuccugccucgucuucgcccagaagcuccccggcaacgacaacuccaccgccacccucugccucggccaccacgccguccccaacggcacccucgucaagaccaucaccaacgaccagaucgaggucaccaacgccaccgagcucguccaguccuccuccaccggccgcaucugcgacuccccccaccgcauccucgacggcaagaacugcacccucaucgacgcccuccucggcgacccccacugcgacggcuuccagaacgagaagugggaccucuucgucgagcgcuccaaggccuucuccaacugcuaccccuacgacguccccgacuacgccucccuccgcucccucgucgccuccuccggcacccucgaguucaucaacgagggcuucaacuggaccggcgucacccaguccggcggcuccuacaccugcaagcgcggcuccgucaacuccuucuucucccgccucaacuggcucuacgaguccgaguccaaguaccccgcccucaacgucaccaugcccaacaacggcaaguucgacaagcucuacaucuggggcguccaccaccccuccaccgacaaggagcagaccaaccucuacguccgcgccuccggccgcgucaccgucuccaccaagcgcucccagcagaccgucauccccaacaucggcccccgccccuggguccgcggccucuccucccgcaucuccaucuacuggaccaucgucaagcccggcgacauccuccucaucaacuccaccggcaaccucaucgccccccgcggcuacuucaagauccgcaccggcaaguccuccaucaugcgcuccgacgcccccaucggcaccugcuccuccggcugcaucacccccaacggcuccauccccaacgacaagcccuuccagaacgucaacaagaucaccuacggcgccugcccccgcuacgucaagcagaacacccucaagcucgccaccggcaugcgcaacguccccgagaagcagacccgcggcaucuucggcgccaucgccggcuucaucgagaacggcugggagggcauggucgacggcugguacggcuuccgccaccagaacuccgagggcaccggccaggccgccgaccucaaguccacccaggccgccaucgaccagaucaacggcaagcucaaccgccucaucgagaagaccaacgagaaguuccaccagaucgagaaggaguucuccgaggucgagggccgcauccaggaccucgagaaguacgucgaggacaccaagaucgaccucugguccuacaacgccgagcuccucgucgcccucgagaaccagcacaccaucgacaugaccgacuccgagaugaacaagcucuucgagaagacccgcaagcagcuccgcgagaacgccgaggacaugggcaacggcugcuucaagaucuaccacaagugcgacaacgccugcaucggcuccauccgcaacggcaccuacgaccacgacgucuaccgcgacgaggcccucaacaaccgcuuccagaucaagggcgucgagcucaaguccggcuacaaggacuggauccucuggaucuccuucgccaucuccugcuuccuccucugcgucguccuccucggcuucaucaugugggccugccagaagggcaacauccgcugcaacaucugcaucuga

SEQ ID NO: 97645 - RNA, 1701 nt, Artificial Sequence; identical to SEQ ID NO: 96318
  derived and/or modified CDS sequence (opt2) from hemagglutinin__InfluenzaA__ABO38252

SEQ ID NO: 97646 - RNA, 1689 nt, Artificial Sequence
  derived and/or modified CDS sequence (opt2) from hemagglutinin__InfluenzaA__ABO38296
auggucaucaucuaccucauccuccucuucaccgccguccgcggcgaccagaucugcaucggcuaccacgccaacaacuccaccgagaaggucgacaccauccucgagcgcaacgucaccgucacccacgccaaggacauccucgagaagacccacaacggcaagcucugcaagcucaacggcauccccccccucgagcucggcgacugcuccaucgccggcuggcuccucggcaaccccgagugcgaccgccuccucuccguccccgagugguccuacaucauggagaaggagaacccccgcgacggccucugcuaccccggcuccuucaacgacuacgaggagcucaagcacuuccucuccuccgucaagcacuucgagaaggucaagauccuccccaaggaccgcuggacccagcacaccaccaccggcggcucccgcgccugcgccgucuccggcaaccccuccuucuuccgcaacauggucuggcucaccaagaagggcuccaacuaccccgucgccaagggcuccuacaacaacaccuccggcgagcagaugcucaucaucuggggcguccaccaccccaacgacgagaccgagcagcgcacccucuaccagaacgucggcaccuacgucuccgucggcaccuccacccucaacaagcgcuccacccccgacaucgccacccgccccaaggucaacggccucggcggccgcauggaguucuccuggacccuccucgacaugugggacaccaucaacuucgaguccaccggcaaccucaucgcccccgaguacggcuucaagaucuccaagcgcggcuccuccggcaucaugaagaccgagggcacccucggcaacugcgagaccaagugccagaccccccucggcgccaucaacaccacccuccccuuccacaacguccacccccucaccaucggcgagugccccaaguacgucaaguccgagaagcucguccucgccaccggccuccgcaacgucccccagaucgagucccgcggccucuucggcgccaucgccggcuucaucgagggcggcuggcagggcauggucgacggcugguacggcuaccaccacuccaacgaccagggcuccggcuacgccgccgacaaggaguccacccagaaggccuucgacggcaucaccaacaaggucaacuccgucaucgagaagaugaacacccaguucgaggccgucggcaaggaguucuccaaccucgagcgccgccucgagaaccucaacaagaagauggaggacggcuuccucgacgucuggaccuacaacgccgagcuccucguccucauggagaacgagcgcacccucgacuuccacgacuccaacgucaagaaccucuacgacaagguccgcaugcagcuccgcgacaacgccaaggagcucggcaacggcugcuucgaguucuaccacaagugcgacgacgagugcaugaacuccgucaagaacggcaccuacuacuaccccaaguacgaggaggaguccaagcucaaccgcaacgagaucaagggcgucaagcucuccuccaugggcgucuaccagauccucgccaucuacgccaccgucgccggcucccucucccucgccaucaugauggccggcaucuccuucuggaugugcuccaacggcucccuccagugccgcaucugcaucuga

SEQ ID NO: 97647 - RNA, 1698 nt, Artificial Sequence; identical to SEQ ID NO: 96906
  derived and/or modified CDS sequence (opt2) from hemagglutinin__InfluenzaA__ABO38318

SEQ ID NO: 97648 - RNA, 1698 nt, Artificial Sequence; identical to SEQ ID NO: 96836
  derived and/or modified CDS sequence (opt2) from hemagglutinin__InfluenzaA__ABO38329

SEQ ID NO: 97649 - RNA, 1701 nt, Artificial Sequence
  derived and/or modified CDS sequence (opt2) from hemagglutinin__InfluenzaA__ABO38351
augaaggcccgccuccucguccuccucugcgcccucgccgccaccgacgccgacaccaucugcaucggcuaccacgccaacaacuccaccgacaccgucgacaccguccucgagaagaacgucaccgucacccacuccgucaaccuccucgaggacucccacaacggcaagcucugccgccucaagggcaucgccccccuccagcucggcaagugcaacaucgccggcuggcuccucggcaaccccgagugcgacccccuccuccccgcccgcuccugguccuacaucgucgagacccccaacuccgagaacggcaucugcuaccccggcgccuucaucgacuacgaggagcuccgcgagcagcucuccuccgucuccuccuucgagcgcuucgagaucuuccccaaggaguccuccuggcccaaccacaacaccaacaucggcgucaccgccgccugcucccacgccggcaaguccuccuucuaccgcaaccuccucuggcucaccaagaagggcggcuccuaccccaagcucaagaacuccuacgucaacaagaagggcaaggagguccucguccucuggggcauccaccaccccuccaacuccaaggaccagcagacccucuaccagaacgagaacgccuacgucuccgucgucuccuccaacuacaaccgccgcuucacccccgagaucgccgagcgccccgagguccgcgaccaggccggccgcaugaacuacuacuggacccuccucgagcccggcgacaccaucauguucgaggccaacggcaaccucgucgcccccugguacgccuucgcccucucccgcggcuucggcuccggcaucaucaccuccaacgccuccaugcacgagugcaacaccaagugccagaccccccagggcgccaucaacuccucccuccccuuccagaacauccaccccgucaccaucggcgagugccccaaguacguccgcuccgccaagcuccgcauggucaccggccuccgcaacauccccuccauccagucccgcggccucuucggcgccaucgccggcuucaucgagggcggcuggaccggcaugaucgacggcugguacggcuaccaccaccagaacgagcagggcuccggcuacgccgccgaccagaaguccacccagaacgccaucaacggcaucaccaacaaggucaacuccgucaucgagaagaugaacacccaguucaccgccgucggcaaggaguucaacaaccucgagaagcgcauggagaaccucaacaagaaggucgacgacggcuuccucgacaucuggaccuacaacgccgagcuccucguccuccucgagaacgagcgcacccucgacuuccacgacuccaacgucaagaaccucuacgagaaggucaagucccagcucaagaacaacgccaaggagaucggcaacggcugcuucgaguucuaccacaagugcgacaacgagugcauggaguccguccgcaacggcaccuacgacuaccccaaguacuccgaggaguccaagcucaaccgcgagaagaucgacggcgucaagcucgaguccaugggcgucuaccagauccucgccaucuacuccaccgucgccuccucccucguccuccucgucucccucggcgccaucuccuucuggaugugcuccaacggcucccuccagugccgcaucugcaucuga

SEQ ID NO: 97650 - RNA, 1701 nt, Artificial Sequence
  derived and/or modified CDS sequence (opt2) from hemagglutinin__InfluenzaA__ABO38362
augaaggccaagcuccucguccuccucugcgcccucuccgccaccgacgccgacaccaucugcaucggcuaccacgccaacaacuccaccgacaccgucgacaccguccucgagaagaacgucaccgucacccacuccgucaaccuccucgaggacucccacaacggcaagcucugccgccucaagggcaucgccccccuccagcucggcaagugcuccaucgccggcuggauccucggcaaccccgagugcgagucccucgucuccaagaaguccugguccuacaucgccgagacccccaacuccgagaacggcaccugcuaccccggcuacuucgccgacuacgaggagcuccgcgagcagcucuccuccgucuccuccuucgagcgcuucgagaucuuccccaaggaguccuccuggcccaagcacaacgucacccgcggcgucaccgccuccugcucccacaagggcaaguccuccuucuaccgcaaccuccucuggcucaccgagaagaacggcuccuaccccaaccucuccaaguccuacgucaacaacaaggagaaggagguccucguccucuggggcguccaccaccccuccaacaucgagaaccagaagaccaucuaccgcaaggagaacgccuacgucuccgucgucuccucccacuacaaccgccgcuucacccccgagaucgccaagcgccccaagguccgcgaccaggagggccgcaucaacuacuacuggacccuccucgagcccggcgacaccaucaucuucgaggccaacggcaaccucaucgcccccugguacgccuucgcccucucccgcggcuucggcuccggcaucaucaccuccaacgccuccaucgacgagugcgacgccaagugccagaccccccagggcgccaucaacuccucccuccccuuccagaacguccaccccgucaccaucggcgagugccccaaguacguccgcuccaccaagcuccgcauggucaccggccuccgcaacauccccuccauccagucccgcggccucuucggcgccaucgccggcuucaucgagggcggcuggaccggcaugaucgacggcugguacggcuaccaccaccagaacgagcagggcuccggcuacgccgccgaccagaaguccacccagaacgccaucaacggcaucaccaacaaggucaacuccgucaucgagaagaugaacacccaguucaccgccgucggcaaggaguucaacaagcucgagaagcgcauggagaaccucaacaagaaggucgacgacggcuuccucgacaucuggaccuacaacgccgagcuccucguccuccucgagaacgagcgcacccucgacuuccacgacuccaacgucaagaaccucuacgagaaggucaagucccagcucaagaacaacgccaaggagaucggcaacggcugcuucgaguucuaccacaagugcaacaacgagugcauggaguccgucaagaacggcaccuacgacuaccccaaguacuccgaggaguccaagcucaaccgcgagaagaucgacggcgucaagcucgaguccaugggcgucuaccagauccucgccaucuacuccaccgucgccuccucccucguccuccucgucucccucggcgccaucuccuucuggaugugcuccaacggcucccuccagugccgcaucugcaucuga

SEQ ID NO: 97651 - RNA, 1698 nt, Artificial Sequence
  derived and/or modified CDS sequence (opt2) from hemagglutinin__InfluenzaA__ABO38373
augaaggcccgccuccucguccuccucugcgcccucgccgccaccgacgccgacaccaucugcaucggcuaccacgccaacaacuccaccgacaccgucgacaccguccucgagaagaacgucaccgucacccacuccgucaaccuccucgaggacucccacaacggcaagcucugccgccucaagggcaucgccccccuccagcucggcaagugcaacaucgccggcuggauccucggcaaccccgagugcgagucccuccucuccgagcgcuccugguccuacaucgucgagacccccaacuccgagaacggcaccugcuaccccggcgacuucaucgacuacgaggagcuccgcgagcagcucuccuccgucuccuccuucgagcgcuucgagaucuucuccaaggaguccuccuggcccaagcacaccaccggcggcgucaccgccgccugcucccacgccggcaaguccuccuucuaccgcaaccuccucuggcucaccgagaaggacggcuccuaccccaaccucaacaacuccuacgucaacaagaagggcaaggagguccucguccucuggggcguccaccaccccuccaacaucaaggaccagcagacccucuaccagaaggagaacgccuacgucuccgucgucuccuccaacuacaaccgccgcuucacccccgagaucgccgagcgccccaagguccgcggccaggccggccgcaucaacuacuacuggacccuccucaagcccggcgacaccaucauguucgaggccaacggcaaccucaucgcccccugguacgccuucgcccucucccgcggcuucggcuccggcaucaucaccuccaacgccuccaugcacgagugcgacaccaagugccagaccccccagggcgccaucaacuccucccuccccuuccagaacauccaccccgucaccaucggcgagugccccaaguacguccgcuccaccaagcuccgcauggucaccggccuccgcaacauccccuccauccagucccgcggccucuucggcgccaucgccggcuucaucgagggcggcuggaccggcaugaucgacggcugguacggcuaccaccaccagaacgagcagggcuccggcuacgccgccgaccagaaguccacccagaacgccaucaacggcaucaccaacaaggucaacuccgucaucgagaagaugaacacccaguucaccgccgucggcaaggaguucaacaaccucgagaagcgcauggagaaccucaacaagaaggucgacgacggcuuccucgacaucuggaccuacaacgccgagcuccucguccuccucgagaacgagcgcacccucgacuuccacgacuccaacgucaagaaccucuacgagaaggucaagaaccagcuccgcaacaacgccaaggagaucggcaacggcugcuucgaguucuaccacaagugcaacaacgagugcauggaguccgucaagaacggcaccuacgacuaccccaaguacuccgaggaguccaagcucaaccgcgagaagaucgacggcgucaagcucgaguccaugggcgucuaccagauccucgccaucuacuccaccgccgccuccucccucguccuccucgucucccucggcgccaucuccuucuggaugugcuccaacggcucccuccagugccgcaucugcaucuga

SEQ ID NO: 97652 - RNA, 1701 nt, Artificial Sequence
  derived and/or modified CDS sequence (opt2) from hemagglutinin__InfluenzaA__ABO38384
augaaggcccgccuccucguccuccucugcgcccucgccgccgccgacgccgacaccaucugcaucggcuaccacgccaacaacuccaccgacaccgucgacaccguccucgagaagaacgucaccgucacccacuccgucaaccuccucgaggacucccacaacggcaagcucugccgccucaagggcauccccccccuccagcucggcaagugcaacaucgccggcuggcuccucggcaaccccgagugcgacucccuccuccccgcccgcuccugguccuacaucgucgagacccccaacuccgagaacggcgccugcuaccccggcgacuucaucaacuacgaggagcuccgcgagcagcucuccuccgucuccuccuucgagcgcuucgagaucuuccccaaggaguccuccuggcccaagcacaacaccaccaagggcgucaccgccgccugcucccacgccggcaaguccuccuucuaccgcaaccuccucuggcucaccaagaaggaggacuccuaccccaagcucaagaacuccuacgucaacaagaagggcaaggagguccucguccucuggggcguccaccaccccuccuccuccaaggagcagcagacccucuaccagaacgagaacgccuacgucuccgucgucuccuccaacuacaaccgccgcuucacccccgagaucgccgagcgccccaagguccgcgaccagaccggccgcaugaacuacuacuggacccuccucgagcccggcgacaccaucaucuucgaggccaacggcaaccucaucgcccccugguacgccuucgcccucucccgcggcuucggcuccggcaucaucaccuccaacgccuccaugcacgagugcaacaccaagugccagaccccccagggcgccaucaacuccucccuccccuuccagaacauccaccccgucaccaucggcgagugccccaaguacguccgcuccgccaagcuccgcauggucaccggccuccgcaacauccccuccauccagucccgcggccucuucggcgccaucgccggcuucaucgagggcggcuggaccggcaugaucgacggcugguacggcuaccaccaccagaacgagcagggcuccggcuacgccgccgaccagaaguccacccagaacgccaucaacggcaucaccaacaaggucaacuccgucaucgagaagaugaacacccaguucaccgccgucggcaaggaguucaacaaccucgagaagcgcauggagaaccucaacaagaaggucgacgacggcuuccucgacaucuggaccuacaacgccgagcuccucguccuccucgagaacgagcgcacccucgacuuccacgacuccaacgucaagaaccucuacgagaaggucaagucccagcucaagaacaacgccaaggagaucggcaacggcugcuucgaguucuaccacaagugcgacaacgagugcauggaguccguccgcaacggcaccuacgacuaccccaaguacuccgaggaguccaagcucaaccgcgagaagaucgacggcgucaagcucgaguccaugggcgucuaccagauccucgccaucuacuccaccgucgccuccucccucguccuccucgucucccucggcgccaucuccuucuggaugugcuccaacggcucccuccagugccgcaucugcaucuga

SEQ ID NO: 97653 - RNA, 1701 nt, Artificial Sequence
  derived and/or modified CDS sequence (opt2) from hemagglutinin__InfluenzaA__ABO38395
augaaggccaagcuccucguccuccucugcgccuucaccgccaccgacgccgacaccaucugcaucggcuaccacgccaacaacuccaccgacaccgucgacaccguccucgagaagaacgucaccgucacccacuccgucaaccuccucgaggacucccacaacggcaagcucugccgccucaagggcaucgccccccuccagcucggcaacugcuccaucgccggcuggauccucggcaaccccgagugcgagucccucuucuccaagaaguccugguccuacaucgccgagacccccaacuccgagaacggcaccugcuaccccggcuacuucgccgacuacgaggagcuccgcgagcagcucuccuccgucuccuccuucgagcgcuucgagaucuuccccaaggaguccuccuggcccaaccacaccgucaccaagggcgucaccgccuccugcucccacaagggccgcuccuccuucuaccgcaaccuccucuggcucaccaagaagaacggcuccuaccccaaccucuccaaguccuacgucaacaacaaggagaaggagguccucguccucuggggcguccaccaccccuccaacaucggcgaccagcgcgccaucuaccacaccgagaacgccuacgucuccgucgucuccucccacuacaaccgccgcuucacccccgagaucgccaagcgccccaagguccgcgaccaggagggccgcaucaacuacuacuggacccuccucgagcccggcgacaccaucaucuucgaggccaacggcaaccucaucgcccccugguacgccuucgcccucucccgcggcuucggcuccggcaucaucaccuccaacgccuccauggacgagugcgacgccaagugccagaccccccagggcgccaucaacuccucccuccccuuccagaacguccaccccgucaccaucggcgagugccccaaguacguccgcuccaccaagcuccgcauggucaccggccuccgcaacauccccuccauccagucccgcggccucuucggcgccaucgccggcuucaucgagggcggcuggaccggcaugaucgacggcugguacggcuaccaccaccagaacgagcagggcuccggcuacgccgccgaccagaaguccacccagaacgccaucaacggcaucaccaacaaggucaacuccgucaucgagaagaugaacacccaguucaccgccgucggcaaggaguucaacaagcucgagcgccgcauggagaaccucaacaagaaggucgacgacggcuuccucgacaucuggaccuacaacgccgagcuccucguccuccucgagaacgagcgcacccucgacuuccacgacuccaacgucaagaaccucuacgagaaggucaagucccagcucaagaacaacgccaaggagaucggcaacggcugcuucgaguucuaccacaagugcaacaacgagugcauggaguccgucaagaacggcaccuacgacuaccccaaguacuccgaggaguccaagcucaaccgcgagaagaucgacggcgucaagcucgaguccaugggcgucuaccagauccucgccaucuacuccaccgucgccuccucccucguccuccucgucucccucggcgccaucuccuucuggaugugcuccaacggcucccuccagugccgcaucugcaucuga

SEQ ID NO: 97654 - RNA, 1701 nt, Artificial Sequence
  derived and/or modified CDS sequence (opt2) from hemagglutinin__InfluenzaA__ABO38406
augaaggccaagcuccucguccuccucugcgcccucuccgccaccgacgccgacaccaucugcaucggcuaccacgccaacaacuccaccgacaccgucgacaccguccucgagaagaacgucaccgucacccacuccgucaaccuccucgaggacaaccacaacggcaagcucugcaagcucaagggcaucgccccccuccagcucggcaagugcuccaucgccggcuggauccucggcaaccccgagugcgagucccucuucuccaagaaguccugguccuacaucgccgagacccccaacuccgagaacggcaccugcuaccccggcuacuucgccgacuacgaggagcuccgcgagcagcucuccuccgucuccuccuucgagcgcuucgagaucuuccccaaggaguccuccuggcccaaccacaacgucaccaagggcgucaccgccuccugcucccacaagggcaaguccuccuucuaccgcaaccuccucuggcucaccgagaagaagggcuccuaccccaaccucuccaaguccuacgucaacaacaaggagaaggagguccucguccucuggggcauccaccaccccuccaacaucgaggaccagaagaccaucuaccgcaaggagaacgccuacgucuccgucgucuccucccacuacaaccgccgcuucacccccgagaucgccaagcgccccaagguccgcgaccaggagggccgcaucaacuacuacuggacccuccucgagcccggcgacaccaucaucuucgaggccaacggcaaccucaucgcccccugguacgccuucgcccucucccgcggcuucggcuccggcaucaucaccuccaacgccuccauggacgagugcgacgccaagugccagaccccccgcggcgccaucaacuccucccuccccuuccagaacguccaccccgucaccaucggcgagugccccaaguacguccgcuccaccaagcuccgcauggucaccggccuccgcaacauccccuccauccagucccgcggccucuucggcgccaucgccggcuucaucgagggcggcuggaccggcaugaucgacggcugguacggcuaccaccaccagaacgagcagggcuccggcuacgccgccgaccagaaguccacccaguccgccaucaacggcaucaccaacaaggucaacuccaucaucgagaagaugaacacccaguucaccgccgucggcaaggaguucaacaagcucgagaagcgcauggagaaccucaacaagaaggucgacgacggcuuccucgacaucuggaccuacaacgccgagcuccucguccuccucgagaacgagcgcacccucgacuuccacgacuccaacgucaagaaccucuacgagaaggucaagucccagcucaagaacaacgccaaggagaucggcaacggcugcuucgaguucuaccacaagugcaacaacgagugcauggaguccgucaagaacggcaccuacgacuaccccaaguacuccgaggaguccaagcucaaccgcgagaagaucgacggcgucaagcucgaguccaugggcgucuaccagauccucgccaucuacuccaccgucgccuccucccucguccuccucgucucccucggcgccaucuccuucuggaugugcuccaacggcucccuccagugccgcaucugcaucuga

SEQ ID NO: 97655 - RNA, 1701 nt, Artificial Sequence
  derived and/or modified CDS sequence (opt2) from hemagglutinin__InfluenzaA__ABO38417
augaagaccaucaucgcccucuccuacauccucugccucgucuucgcccagaagcuccccgucaacgacaacuccaccgccacccucugccucggccaccacgccguccccaacggcacccucgucaagaccaucaccaacgaccacaucgaggucaccaacgccaccgagcucguccaguccucccccaccggccgcaucugcgacuccccccaccagauccucgacggcgagaacugcacccucaucgacgcccuccucggcgacccccacugcgacggcuuccagaacaaggagugggaccucuucgucgagcgcuccaccgccuacuccaacugcuaccccuacgacguccccgacuacgccucccuccgcucccucgucgccuccuccggcacccucgaguucaacaacgaguccuucaacuggaccggcgucgcccagaacggcaccuccuccgccugcaagcgccgcuccaucaaguccuucuucucccgccucaacuggcuccaccagcucaaguacaaguaccccgcccucaacgucaccaugcccaacaacgagaaguucgacaagcucuacaucuggggcguccaccaccccuccaccgacuccgaccagaucucccucuacgcccaggccuccggccgcgucaccgucuccaccaagcgcucccagcagaccgucauccccaacaucggcucccgccccuggguccgcggcgucuccucccgcaucuccaucuacuggaccaucgucaagcccggcgacauccuccucaucaacuccaccggcaaccucaucgccccccgcggcuacuucaagauccgcuccggcaaguccuccaucaugcgcuccaacacccccaucggcaagugcaacuccgagugcaucacccccaacggcuccauccccaacgacaagcccuuccagaacgucaaccgcaucaccuacggcgccugcccccgcuacgucaagcagaacacccucaagcucgccaccggcaugcgcaacguccccgagaagcagacccgcggcaucuucggcgccaucgccggcuucaucgagaacggcugggagggcauggucgacggcugguacggcuuccgccaccagaacuccgagggcaccggccaggccgccgaccucaaguccacccaggccgccaucaaccagaucaacggcaagcucaaccgccucaucgagaagaccaacgagaaguuccaccagaucgagaaggaguucuccgaggucgagggccgcauccaggaccucgagaaguacgucgaggacaccaagaucgaccucugguccuacaacgccgagcuccucgucgcccucgagaaccagcacaccaucgaccucaccgacuccgagaugaacaagcucuucgagcgcacccgcaagcagcuccgcgagaacgccgaggacaugggcaacggcugcuucaagaucuaccacaagugcgacaacgccugcaucggcuccauccgcaacggcaccuacgaccacgacgucuaccgcgacgaggcccucaacaaccgcuuccagaucaagggcgucgagcucaaguccggcuacaaggacuggauccucuggaucuccuucgccaucuccugcuuccuccucugcgucguccuccucggcuucaucaugugggccugccagaagggcaacauccgcugcaacaucugcaucuga

SEQ ID NO: 97656 - RNA, 1689 nt, Artificial Sequence
  derived and/or modified CDS sequence (opt2) from hemagglutinin__InfluenzaA__ABO38712
auggccaucaucuacuucauccuccucuucaccgccguccgcggcgaccagaucugcaucggcuaccacgccaacaacuccaccgagaaggucgacaccauccucgagcgcaacgucaccgucacccacgccaaggacauccucgagaagacccacaacggcaagcucugcaagcucaacggcauccccccccucgagcucggcgacugcuccaucgccggcuggcuccucggcaaccccgagugcgaccgccuccuccgcguccccgagugguccuacaucauggagaaggagaacccccgcuacucccucugcuaccccggcuccuucaacgacuacgaggagcucaagcaccuccucuccuccgucaagcacuucgagaagguccgcauccuccccaaggacggcuggacccagcacaccaccuccggcggcuccaaggccugcgccgucuccggcaaguccuccuucuuccgcaacauggucuggcucaccaagaagggccccaacuaccccgucgccaagcgcuccuacaacaacaccuccggcgagcagaugcucaucaucuggggcguccaccaccccaaggacgaggccgagcagcgcgcccucuaccagaaggucggcaccuacgucuccgccuccaccuccacccucaacaagcgcuccacccccgagaucgccgcccgccccgaggucaacggccucggcucccgcauggaguucuccuggacccuccucgacgucugggacaccaucaacuucgaguccaccggcaaccucgucgcccccgaguacggcuucaagaucuccaagcgcggcuccuccggcaucaugaagaccgagggcacccucggcaacugcgagaccaagugccagaccccccucggcgccaucaacaccacccuccccuuccacaacguccacccccucaccaucggcgagugccccaaguacgucaaguccgagaagcucguccucgccaccggccuccgcaacgucccccagaucgagucccgcggccucuucggcgccaucgccggcuucaucgagggcggcuggcagggcauggucgacggcugguacggcuaccaccacuccaacgaccagggcuccggcuacgccgccgacaaggaguccacccagaaggccuucgaccgcaucaccaacaaggucaacuccgucaucgagaagaugaacacccaguucgaggccgucggcaaggaguucuccaaccucgagaagcgccucgagaaccucaacaagaagauggaggacggcuuccucgacgucuggaccuacaacgccgagcuccucguccucauggagaacgagcgcacccucgacuuccacgacuccaacgucaagaaccucuacaacaagguccgcaugcagcuccgcgacaacgucaaggagcucggcaacggcugcuucgaguucuaccacaagugcgacgacgagugcauguccuccgucaagaacggcaccuacgacuaccccaaguacgaggaggaguccaagcucaagcgcaacgagaucaagggcgucaagcucuccuccaugggcgucuaccagauccucgccaucuacgccaccgucgccggcucccucucccucgccaucaugaucgccggcaucucccucuggaugugcuccaacggcucccuccagugccgcaucugcaucuga

SEQ ID NO: 97657 - RNA, 1689 nt, Artificial Sequence
  derived and/or modified CDS sequence (opt2) from hemagglutinin__InfluenzaA__ABO38723
auggccaucaucuacuucauccuccucuucaccgccguccgcggcgaccagaucugcaucggcuaccacgccaacaacuccaccgagaaggucgacaccauccucgagcgcaacgucaccgucacccacgccaaggacauccucgagaagacccacaacggcaagcucugcaagcucaacggcauccccccccucgagcucggcgacugcuccaucgccggcuggcuccucggcaaccccgagugcgaccgccuccuccgcguccccgagugguccuacaucauggagaaggagaacccccgcuacucccucugcuaccccggcuccuucaacgacuacgaggagcucaagcaccuccucuccuccgucaagcacuucgagaagguccgcauccuccccaaggacggcuggacccagcacaccaccuccggcggcuccaaggccugcgccgucuccggcaaguccuccuucuuccgcaacauggucuggcucaccaagaagggccccaacuaccccgucgccaagcgcuccuacaacaacaccuccggcgagcagaugcucaucaucuggggcguccaccaccccaacgacgaggccgagcagcgcgcccucuaccagaaggucggcaccuacgucuccgccuccaccuccacccucaacaagcgcuccacccccgagaucgccgcccgccccgaggucaacggccucggcucccgcauggaguucuccuggacccuccucgacgucugggacaccaucaacuucgaguccaccggcaaccucgucgcccccgaguacggcuucaagaucuccaagcgcggcuccuccggcaucaugaagaccgagggcacccucggcaacugcgagaccaagugccagaccccccucggcgccaucaacaccacccuccccuuccacaacguccacccccucaccaucggcgagugccccaaguacgucaaguccgagaagcucguccucgccaccggccuccgcaacgucccccagaucgagucccgcggccucuucggcgccaucgccggcuucaucgagggcggcuggcagggcauggucgacggcugguacggcuaccaccacuccaacgaccagggcuccggcuacgccgccgacaaggaguccacccagaaggccuucgaccgcaucaccaacaaggucaacuccgucaucgagaagaugaacacccaguucgaggccgucggcaaggaguucuccaaccucgagaagcgccucggcaaccucaacaagaagauggaggacggcuuccucgacgucuggaccuacaacgccgagcuccucguccucauggagaacgagcgcacccucgacuuccacgacuccaacgucaagaaccucuacaacaagguccgcaugcagcuccgcgacaacgucaaggagcucggcaacggcugcuucgaguucuaccacaagugcgacgacgagugcauguccuccgucaagaacggcaccuacgacuaccccaaguacgaggaggaguccaagcucaagcgcaacgagaucaagggcgucaagcucuccuccaugggcgucuaccagauccucgccaucuacgccaccgucgccggcucccucucccucgccaucaugaucgccggcaucucccucuggaugugcuccaacggcucccuccagugccgcaucugcaucuga

SEQ ID NO: 97658 - RNA, 1698 nt, Artificial Sequence
  derived and/or modified CDS sequence (opt2) from hemagglutinin__InfluenzaA__ABO44046
augaaggucaagcuccucguccuccucugcaccuucaccgccaccuacgccgacaccaucugcaucggcuaccacgccaacaacuccaccgacaccgucgacaccguccucgagaagaacgucaccgucacccacuccgucaaccuccucgaggacucccacaacggcaagcucugccuccucaagggcaucgccccccuccagcucggcaacugcuccgucgccggcuggauccucggcaaccccgagugcgagcuccucaucuccaaggaguccugguccuacaucgucgagacccccaaccccgagaacggcaccugcuaccccggcuacuucgccgacuacgaggagcuccgcgagcagcucuccuccgucuccuccuucgagcgcuucgagaucuuccccaaggaguccuccuggcccaaccacaccgucaccggcgucuccgccuccugcucccacaacggcaaguccuccuucuaccgcaaccuccucuggcucaccggcaagaacggccucuaccccaaccucuccaaguccuacgccaacaacaaggagaaggagguccucguccucuggggcguccaccacccccccaacaucggcgaccagcgcgcccucuaccacaccgagaacgccuacgucuccgucgucuccucccacuacucccgccgcuucacccccgagaucgccaagcgccccaagguccgcgaccaggagggccgcaucaacuacuacuggacccuccucgagcccggcgacaccaucaucuucgaggccaacggcaaccucaucgccccccgcuacgccuucgcccucucccgcggcuucggcuccggcaucaucaccuccaacgcccccauggacgagugcgacgccaagugccagaccccccagggcgccaucaacuccucccuccccuuccagaacguccaccccgucaccaucggcgagugccccaaguacguccgcuccgccaagcuccgcauggucaccggccuccgcaacauccccuccauccagucccgcggccucuucggcgccaucgccggcuucaucgagggcggcuggaccggcauggucgacggcugguacggcuaccaccaccagaacgagcagggcuccggcuacgccgccgaccagaaguccacccagaacgccaucaacggcaucaccaacaagaugaacuccgucaucgagaagaugaacacccaguucaccgccgucggcaaggaguucaacaagcucgagcgccgcauggagaaccucaacaagaaggucgacgacggcuuccucgacaucuggaccuacaacgccgagcuccucguccuccucgagaacgagcgcacccucgacuuccacgacuccaacgucaagaaccucuacgagaaggucaagucccagcucaagaacaacgccaaggagaucggcaacggcugcuucgaguucuaccacaagugcaacaacgagugcauggaguccgucaagaacggcaccuacgacuaccccaaguacuccgaggaguccaagcucaaccgcgagaagaucgacggcgucaagcucgaguccaugggcgucuaccagauccucgccaucuacuccaccgucgccuccucccucguccuccucgucucccucggcgccaucuccuucuggaugugcuccaacggcucccuccagugccgcaucugcaucuga

SEQ ID NO: 97659 - RNA, 1689 nt, Artificial Sequence
  derived and/or modified CDS sequence (opt2) from hemagglutinin__InfluenzaA__ABO44057
auggccaucaucuaccucauccuccucuucaccgccguccgcggcgaccagaucugcaucggcuaccacgccaacaacuccaccgagaaggucgacaccauccucgagcgcaacgucaccgucacccacgccaaggacauccucgagaagacccacaacggcaagcucugcaagcucaacggcauccccccccucgagcucggcgacugcuccaucgccggcuggcuccucggcaaccccgagugcgaccgccuccuccgcguccccgagugguccuacaucauggagaaggagaacccccgcuacucccucugcuaccccggcuccuucaacgacuacgaggagcucaagcaccuccucuccuccgucaagcacuucgagaaggucaagauccuccccaaggacggcuggacccagcacgagaccgacggcggcuccaaggccugcgccgucuccggcaaggccuccuucuuccgcaacauggucuggcucaccaagcgcggccccaacuaccaggucgccaagcgcuccuacaacaacaccuccggcgagcagaugcucaucaucuggggcguccaccaccccaaggacgaggccgagcagcgcgcccucuaccagaaggucggcaccuacgucuccgccuccaccuccacccucaacaagcgcuccacccccgagaucgccgcccgccccgaggucaacggccucgagucccgcauggaguucuccuggacccuccucgacgucugggacaccaucaacuucgaguccaccggcaaccucgucgcccccgaguacggcuucaagaucuccaagcgcggcuccuccggcaucaugaagaccgagggcacccucggcaacugcgagaccaagugccagaccccccucggcgccaucaacaccacccuccccuuccacaacguccacccccucaccaucggcgagugccccaaguacgucaaguccgagaagcucguccucgccaccggccuccgcaacgucccccagaucgagucccgcggccucuucggcgccaucgccggcuucaucgagggcggcuggcagggcauggucgacggcugguacggcuaccaccacuccaacgaccagggcuccggcuacgccgccgacaaggaguccacccagaaggccuucgaccgcaucaccaacaaggucaacuccgucaucgagaagaugaacauccaguucgaggccgucggcaaggaguucuccaaccucgagaagcgccucgagaaccucaacaagaagauggaggacggcuuccucgacgucuggaccuacaacgccgagcuccucguccucauggagaacgagcgcacccucgacuuccacgacuccaacgucaagaaccucuacgacaagguccgcaugcagcuccgcgacaacgucaaggagcucggcaacggcugcuucgaguucuaccacaagugcgacgacgagugcaugaacuccgucaagaacggcaccuacgacuaccccaaguacgaggaggaguccaagcucaagcgcaacgagaucaagggcgucaagcucuccuccaugggcgucuaccagauccucgccaucuacgccaccgucgccggcucccucucccucgccaucaugaucgccggcaucuccuucuggaugugcuccaacggcucccuccagugccgcgucugcaucuga

SEQ ID NO: 97660 - RNA, 1701 nt, Artificial Sequence; identical to SEQ ID NO: 96292
  derived and/or modified CDS sequence (opt2) from hemagglutinin__InfluenzaA__ABO44079

SEQ ID NO: 97661 - RNA, 1689 nt, Artificial Sequence
  derived and/or modified CDS sequence (opt2) from hemagglutinin__InfluenzaA__ABO44090
auggccaucaucuaccucauccuccucuucaccgccguccgcggcgaccagaucugcaucggcuaccacgccaacaacuccaccgagaaggucgacaccauccucgagcgcaacgucaccgucacccacgccaaggacauccucgagaagacccacaacggcaagcucugcaagcucaacggcauccccccccucgagcucggcgacugcuccaucgccggcuggcuccucggcaaccccgagugcgaccgccuccuccgcguccccgagugguccuacaucauggagaaggagaacccccgcgacggccucugcuaccccggcuccuucaacgacuacgaggagcucaagcaccuccucuccuccgucaagcacuucgagaaggucaagauccuccccaaggaccgcuggacccagcacaccaccaccggcggcucccgcgccugcgccgucuccggcaaccccuccuucuuccgcaacaugaucuggcucaccaagaagggcuccaacuaccccgucgccaagggcuccuacaacaacaccuccggcgagcagaugcucaucaucuggggcguccaccaccccaacgacgagaccgagcagcgcacccucuaccagaacgucggcaccuacgucuccgucgucaccuccacccucaacaagcgcuccacccccaagaucgccacccgccccaaggucaacggccucggcggccgcauggaguucuccuggacccuccucgacaugugggacaccaucaacuucgaguccaccggcaaccucaucgcccccgaguacggcuucaagaucuccaagcgcggcuccuccggcaucaugaagaccgagggcacccucgagaacugcgagaccaagugccagaccccccucggcgccaucaacaccacccuccccuuccacaacguccacccccucaccaucggcgagugccccaaguacgucaaguccgagaagcucguccucgccaccggccuccgcaacgucccccagaucgagucccgcggccucuucggcgccaucgccggcuucaucgagggcggcuggcagggcauggucgacggcugguacggcuaccaccacuccaacgaccagggcuccggcuacgccgccgacaaggaguccacccagcgcgccuucgacggcaucaccaacaaggucaacuccgucaucgagaagaugaacacccaguucgaggccgucggcaaggaguucuccaaccucgagcgccgccucgagaaccucaacaagaagauggaggacggccuccucgacgucuggaccuacaacgccgagcuccucguccucauggagaacgagcgcauccucgacuuccacgacuccaacgucaagaaccucuacgacaagguccgcaugcagcuccgcgacaacgucaaggagcucggcaacggcugcuucgaguucuaccacaagugcgacgacgagugcaugaacuccgucaagaacggcaccuacgacuaccccaaguacgaggaggaguccaagcucaaccgcaacgagaucaagggcgucaagcucuccuccaugggcgucuaccagauccucgccaucuacgccaccgucgccggcucccucucccucgccaucaugauggccggcaucuccuucuggaugugcuccaacggcucccuccagugccgcaucugcaucuga

SEQ ID NO: 97662 - RNA, 1689 nt, Artificial Sequence
  derived and/or modified CDS sequence (opt2) from hemagglutinin__InfluenzaA__ABO44101
auggccaucaucuaccucauccuccucuucaccgccguccgcggcgaccagaucugcaucggcuaccacgccaacaacuccaccgagaaggucgacaccauccucgagcgcaacgucaccgucacccacgccaaggacauccucgagaagacccacaacggcaagcucugcaagcucaacggcauccccccccucgagcucggcgacugcuccaucgccggcuggcuccucggcaaccccgagugcgaccgccuccuccgcguccccgagugguccuacaucauggagaaggagaacccccgcuacucccucugcuaccccggcuccuucaacgacuacgaggagcucaagcaccuccucuccuccgucaagcacuucgagaaggucaagauccuccccaaggacggcuggacccagcacaagaccgacggcggcuccaaggccugcgccgucuccggcaagcccuccuucuuccgcaacauggucuggcucaccaagaagggccccaacuaccccgucgccaagcgcuccuacaacaacaccuccggcgagcagaugcucaucaucuggggcguccaccaccccaacgacgaggccgagcagcgcgcccucuaccagaaggucggcaccuacgucuccgccuccaccuccacccucaacaagcgcuccacccccgagaucgccgcccgccccgaggucuccggccucggcucccgcauggaguucuccuggacccuccucgacgucugggacaccaucuccuucgaguccaccggcaaccucgucgcccccgaguacggcuucaagaucuccaagcgcggcuccuccggcaucaugaagaccgagggcacccucggcaacugcgagaccaagugccagaccccccucggcgccaucaacaccacccuccccuuccacaacguccacccccucaccaucggcgagugccccaaguacgucaaguccgagaagcucguccucgccaccggccuccgcaacgucccccagaucgagucccgcggccucuucggcgccaucgccggcuucaucgagggcggcuggcagggcauggucgacggcugguacggcuaccaccacuccaacgaccagggcuccggcuacgccgccgacaaggaguccacccagaaggccuucgaccgcaucaccaacaaggucaacuccgucaucgagaagaugaacacccaguucgaggccgucggcaaggaguucuccaaccucgagaagcgccucgagaaccucaacaagaagauggaggacggcuuccucgacgucuggaccuacaacgccgagcuccucguccucauggagaacgagcgcacccucgacuuccacgacuccaacgucaagaaccucuacgacaagguccgcaugcagcuccgcgacaacgucaaggagcucggcaacggcugcuucgaguucuaccacaagugcgacgacgagugcaugaacuccgucaagaacggcaccuacgacuaccccaaguacgaggaggaguccaagcucaagcgcaacgagaucaagggcgucaagcucuccuccaugggcgucuaccagauccucgccaucuacgccaccgucgccggcucccucucccucgccaucaugaucgccggcaucuccuucuggaugugcuccaacggcucccuccagugccgcaucugcaucuga

SEQ ID NO: 97663 - RNA, 1701 nt, Artificial Sequence
  derived and/or modified CDS sequence (opt2) from hemagglutinin__InfluenzaA__ABO44123
augaaggccaagcuccucguccuccucugcgccuucaccgccaccgacgccgacaccaucugcaucggcuaccacgccaacaacuccaccgacaccgucgacaccguccucgagaagaacgucaccgucacccacuccgucaaccuccucgaggacucccacaacggcaagcucugccgccucaagggcaucgccccccuccagcucggcaacugcuccaucgccggcuggauccucggcaaccccgagugcgagucccucuucuccaagaaguccugguccuacaucgccgagacccccaacuccgagaacggcaccugcuaccccggcuacuucgccgacuacgaggagcuccgcgagcagcucuccuccgucuccuccuucgagcgcuucgagaucuuccccaaggaguccuccuggcccaaccacaccgucaccaagggcgucaccgccuccugcucccacaagggcaaguccuccuucuaccgcaaccuccucuggcucaccaagaagaacggcuccuaccccaaccucuccaaguccuacgucaacaacaaggagaaggagguccucguccucuggggcguccaccaccccuccaacaucggcgaccagcgcgccaucuaccacaccgagaacgccuacgucuccgucgucuccucccacuacaaccgccgcuucacccccgagaucgccaagcgccccaagguccgcgaccaggagggccgcaucaacuacuacuggacccuccucgagcccggcgacaccaucaucuucgaggccaacggcaaccucaucgcccccugguacgccuucgcccucucccgcggcuucggcuccggcaucaucaccuccaacgccuccauggacgagugcgacgccaagugccagaccccccagggcgccaucaacuccucccuccccuuccagaacguccaccccgucaccaucggcgagugccccaaguacguccgcuccaccaagcuccgcauggucaccggccuccgcaacauccccuccauccagucccgcggccucuucggcgccaucgccggcuucaucgagggcggcuggaccggcaugaucgacggcugguacggcuaccaccaccagaacgagcagggcuccggcuacgccgccgaccagaaguccacccagaacgccaucaacggcaucaccaacaaggucaacuccgucaucgagaagaugaacacccaguucaccgccgucggcaaggaguucaacaagcucgagcgccgcauggagaaccucaacaagaaggucgacgacggcuuccucgacaucuggaccuacaacgccgagcuccucguccuccucgagaacgagcgcacccucgacuuccacgacuccaacgucaagaaccucuacgagaaggucaagucccagcucaagaacaacgccaaggagaucggcaacggcugcuucgaguucuaccacaagugcaacaacgagugcauggaguccgucaagaacggcaccuacgacuaccccaaguacuccgaggaguccaagcucaaccgcgagaagaucgacggcgucaagcucgaguccaugggcgucuaccagauccucgccaucuacuccaccgucgccuccucccucguccuccucgucucccucggcgccaucuccuucuggaugugcuccaacggcucccuccagugccgcaucugcaucuga

SEQ ID NO: 97664 - RNA, 1701 nt, Artificial Sequence
  derived and/or modified CDS sequence (opt2) from hemagglutinin__InfluenzaA__ABO44134
augaaggccaagcuccucguccuccucugcgcccucuccgccaccgacgccgacaccaucugcaucggcuaccacgccaacaacuccaccgacaccgucgacaccguccucgagaagaacgucaccgucacccacuccgucaaccuccucgaggacucccacaacggcaagcucugccgccucaagggcaucgccccccuccagcucggcaagugcuccaucgccggcuggauccucggcaaccccgagugcgagucccucuucuccaagaaguccugguccuacaucgccgagacccccaacuccgagaacggcaccugcuaccccggcuacuucgccgacuacgaggagcuccgcgagcagcucuccuccgucuccuccuucgagcgcuucgagaucuuccccaaggagcgcuccuggcccaagcacaacgucacccgcggcgucaccgccuccugcucccacaagggcaaguccuccuucuaccgcaaccuccucuggcucaccgagaagaacggcuccuaccccaaccucuccaaguccuacgucaacaacaaggagaaggagguccucguccucuggggcguccaccaccccuccaacaucgaggaccagaagaccaucuaccgcaaggagaacgccuacgucuccgucgucuccuccaacuacaaccgccgcuucacccccgagaucgccgagcgccccaagguccgcggccaggccggccgcaucaacuacuacuggacccuccucgagcccggcgacaccaucaucuucgaggccaacggcaaccucaucgcccccuggcacgccuucgcccucucccgcggcuucggcuccggcaucaucaccuccaacgccuccauggacgagugcgacaccaagugccagaccccccagggcgccaucaacuccucccuccccuuccagaacauccaccccgucaccaucggcgagugccccaaguacguccgcuccaccaagcuccgcauggucaccggccuccgcaacauccccuccauccagucccgcggccucuucggcgccaucgccggcuucaucgagggcggcuggaccggcaugaucgacggcugguacggcuaccaccaccagaacgagcagggcuccggcuacgccgccgaccagaaguccacccagaacgccaucaacggcaucaccaacaaggucaacuccgucaucgagaagaugaacacccaguucaccgccgucggcaaggaguucaacaagcucgagaagcgcauggagaaccucaacaagaaggucgacgacggcuuccucgacaucuggaccuacaacgccgagcuccucguccuccucgagaacgagcgcacccucgacuuccacgacuccaacgucaagaaccucuacgagaaggucaagucccagcucaagaacaacgccaaggagaucggcaacggcugcuucgaguucuaccacaagugcaacaacgagugcauggaguccgucaagaacggcaccuacgacuaccccaaguacuccgaggaguccaagcucaaccgcgagaagaucgacggcgucaagcucgaguccaugggcgucuaccagauccucgccaucuacuccaccgucgccuccucccucguccuccucgucucccucggcgccaucuccuucuggaugugcuccaacggcucccuccagugccgcaucugcaucuga

SEQ ID NO: 97665 - RNA, 1701 nt, Artificial Sequence
  derived and/or modified CDS sequence (opt2) from hemagglutinin__InfluenzaA__ABO52071
augaagaccaucaucgcccucuccuacauccucugccucgucuucgcccagaagcuccccggcaacgacaacuccaccgccacccucugccucggccaccacgccguccccaacggcaccaucgucaagaccaucaccaacgaccagaucgaggucaccaacgccaccgagcucguccagaacuccuccaccggcggcaucugcgacuccccccaccagauccucgacggcgagaacugcacccucaucgacgcccuccucggcgacccccagugcgacggcuuccagaacaagaagugggaccucuucgucgagcgcuccaaggccuacuccaacugcuaccccuacgacguccccgacuacgccucccuccgcucccucgucgccuccuccggcacccucgaguucaacaacgaguccuucaacuggaccggcgucacccagaacggcaccuccuccgccugcaagcgccgcuccaacaacuccuucuucucccgccucaacuggcucacccaccucaaguucaaguaccccgcccucaacgucaccaugcccaacaacgagaaguucgacaagcucuacaucuggggcguccaccaccccuccaccgacaacgaccagaucucccucuacgcccaggccuccggccgcaucaccgucuccaccaagcgcucccagcagaccgucauccccaacaucggcucccgcccccgcguccgcgacauccccucccgcaucuccaucuacuggaccaucgucaagcccggcgacauccuccucaucaacuccaccggcaaccucaucgccccccgcggcuacuucaagauccgcuccggcaaguccuccaucaugcgcuccgacgcccccaucggcaagugcaacuccgagugcaucacccccaacggcuccauccccaacgacaagcccuuccagaacgucaaccgcaucaccuacggcgccugcccccgcuacgucaagcagaacacccucaagcucgccaccggcaugcgcaacguccccgagaagcagacccgcggcaucuucggcgccaucgccggcuucaucgagaacggcugggagggcauggucgacggcugguacggcuuccgccaccagaacuccgagggcaucggccaggccgccgaccucaaguccacccaggccgccaucaaccagaucaacggcaagcucaaccgccucaucggcaagaccaacgagaaguuccaccagaucgagaaggaguucuccgaggucgagggccgcauccaggaccucgagaaguacgucgaggacaccaagaucgaccucugguccuacaacgccgagcuccucgucgcccucgagaaccagcacaccaucgaccucaccgacuccgagaugaacaagcucuucgagcgcaccaagaagcagcuccgcgagaacgccgaggacaugggcaacggcugcuucaagaucuaccacaagugcgacaacgccugcaucggcuccauccgcaacggcaccuacgaccacgacgucuaccgcgacgaggcccucaacaaccgcuuccagaucaagggcgucgagcucaaguccggcuacaaggacuggauccucuggaucuccuucgccaucuccugcuuccuccucugcgucgcccuccucggcuucaucaugugggccugccagaagggcaacauccgcugcaacaucugcaucuga

SEQ ID NO: 97666 - RNA, 1701 nt, Artificial Sequence
  derived and/or modified CDS sequence (opt2) from hemagglutinin__InfluenzaA__ABO52225
augaaggccaagcuccucguccuccucugcgccuucaccgccaccuacgccgacaccaucugcaucggcuaccacgccaacaacuccaccgacaccgucgacaccguccucgagaagaacgucaccgucacccacuccgucaaccuccucgaggacucccacaacggcaagcucugccgccucaagggcaccgccccccuccagcucggcaacugcuccgucgccggcuggauccucggcaaccccgagugcgagucccucuucuccaaggaguccugguccuacaucgccgagacccccaaccccgagaacggcaccugcuaccccggcuacuucgccgacuacgaggagcucaaggagcagcucuccuccgucuccuccuucgagcgcuucgagaucuuccccaaggaguccuccuggcccaaccacaccgucaccaagggcgucaccgccuccugcucccacaacggcaaguccuccuucuacaagaaccuccucuggcucaccgagaagaacggccucuaccccaaccucuccaaguccuacgucaacaacaaggagaaggagguccucguccucuggggcguccaccaccccuccaacaucggcgaccagcgcgccaucuaccacaccgagaacgccuacgucuccgucgucuccucccacuacucccgccgcuucacccccgagaucgccaagcgccccaagguccgcgaccaggagggccgcaucaacuacuacuggacccuccucgagcccggcgacaccaucaucuucgaggccaacggcaaccucaucgcccccugguacgccuucgcccucucccgcggcuucggcuccggcaucaucaccuccaacgccuccaugggcgagugcgacgccaagugccagaccccccagggcgccaucaacuccucccuccccuuccagaacguccaccccgucaccaucggcgagugccccaaguacguccgcuccaccaagcuccgcauggucaccggccuccgcaacauccccuccauccagucccgcggccucuucggcgccaucgccggcuucaucgagggcggcuggaccggcaugaucgacggcugguacggcuaccaccaccagaacgagcagggcuccggcuacgccgccgacaagaaguccacccagaacgccaucgacggcaucaccaacaaggucaacuccgucaucgagaagaugaacacccaguucaccgccgucggcaaggaguucaacaagcucgagcgccgcauggagaaccucaacaagaaggucgacgacggcuuccucgacaucuggaccuacaacgccgagcuccucguccuccucgagaacgagcgcacccucgacuuccacgacuccaacgucaagaaccucuacgagaaggucaagaaccagcucaagaacaacgccaaggagaucggcaacggcugcuucgaguucuaccacaagugcaacgacgagugcauggaguccgucaagaacggcaccuacgacuaccccaaguacuccgaggaguccaagcucaagcgcgagaagaucgacggcgucaagcucgaguccaugggcgucuaccagauccucgccaucuacuccaccgucgccuccucccucguccuccucgucucccucggcgccaucuccuucuggaugugcuccaacggcucccuccagugccgcaucugcaucuga

SEQ ID NO: 97667 - RNA, 1689 nt, Artificial Sequence
  derived and/or modified CDS sequence (opt2) from hemagglutinin__InfluenzaA__ABO52236
auggccaucaucuaccucauccuccucuucaccgccguccgcggcgaccagaucugcaucggcuaccacgccaacaacuccaccgagaaggucgacaccauccucgagcgcaacgucaccgucacccacgccaaggacauccucgagaagacccacaacggcaagcucugcaagcucaacggcauccccccccucgagcucggcgacugcuccaucgccggcuggcuccucggcaaccccgagugcgaccgccuccucuccguccccgagugguccuacaucauggagaaggagaacccccgcgacggccucugcuaccccggcuccuucaacgacuacgaggagcucaagcacuuccucuccuccgucaagcacuucgagaaggucaagauccuccccaaggaccgcuggacccagcacaccaccaccggcggcucccgcgccugcgccgucuccggcaaccccuccuucuuccgcaacauggucuggcucaccaagaagggcuccaacuaccccgucgccaagggcuccuacaacaacaccuccggcgagcagaugcucaucaucuggggcguccaccaccccaacgacgagaccgagcagcgcacccucuaccagaacgucggcaccuacgucuccgucggcaccuccacccucaacaagcgcuccacccccgacaucgccacccgccccaaggucaacggccucggcggccgcauggaguucuccuggacccuccucgacaugugggacaccaucaacuucgaguccaccggcaaccucaucgcccccgaguacggcuucaagaucuccaagcgcggcuccuccggcaucaugaagaccgagggcacccucggcaacugcgagaccaagugccagaccccccucggcgccaucaacaccacccuccccuuccacaacguccacccccucaccaucggcgagugccccaaguacgucaaguccgagaagcucguccucgccaccggccuccgcaacgucccccagaucgagucccgcggccucuucggcgccaucgccggcuucaucgagggcggcuggcagggcauggucgacggcugguacggcuaccaccacuccaacgaccagggcuccggcuacgccgccgacaaggaguccacccagaaggccuucgacggcaucaccaacaaggucaacuccgucaucgagaagaugaacacccaguucgaggccgucggcaaggaguucuccaaccucgagcgccgccucgagaaccucaacaagaagauggaggacggcuuccucgacgucuggaccuacaacgccgagcuccucguccucauggagaacgagcgcacccucgacuuccacgacuccaacgucaagaaccucuacgacaagguccgcaugcagcuccgcgacaacgccaaggagcucggcaacggcugcuucgaguucuaccacaagugcgacgacgagugcaugaacuccgucaagaacggcaccuacuacuaccccaaguacgaggaggaguccaagcucaaccgcaacgagaucaagggcgucaagcucuccuccaugggcgucuaccagauccucgccaucuacgccaccgucgccggcucccucucccucgccaucaugauggccggcaucuccuucuggaugugcuccaacggcucccuccagugccgcaucugcaucuga

SEQ ID NO: 97668 - RNA, 1689 nt, Artificial Sequence
  derived and/or modified CDS sequence (opt2) from hemagglutinin__InfluenzaA__ABO52247
auggccaucaucuaccucauccuccucuucaccgccguccgcggcgaccagaucugcaucggcuaccacgccaacaacuccaccgagaaggucgacaccauccucgagcgcaacgucaccgucacccacgccaaggacauccucgagaagacccacaacggcaagcucugcaagcucaacggcauccccccccucgagcucggcgacugcuccaucgccggcuggcuccucggcaaccccgagugcgaccgccuccuccgcguccccgagugguccuacaucauggagaaggagaacccccgcuacucccucugcuaccccggcuccuucaacgacuacgaggagcucaagcaccuccucuccuccgucaagcacuucgagaaggucaagauccuccccaaggacggcuggacccagcacaagaccgacggcggcuccaaggccugcgccgucuccggcaagcccuccuucuuccgcaacauggucuggcucaccaagaagggccccaacuaccccgucgccaagcgcuccuacaacaacaccuccggcgagcagaugcucaucaucuggggcguccaccaccccaacgacgaggccgagcagcgcgcccucuaccagaaggucggcaccuacgucuccgccuccaccuccacccucaacaagcgcuccacccccgagaucgccgcccgccccgaggucuccggccucggcucccgcauggaguucuccuggacccuccucgacgucugggacaccaucuccuucgaguccaccggcaaccucgucgcccccgaguacggcuucaagaucuccaagcgcggcuccuccggcaucaugaagaccgagggcacccucggcaacugcgagaccaagugccagaccccccucggcgccaucaacaccacccuccccuuccacaacguccacccccucaccaucggcgagugccccaaguacgucaaguccgagaagcucguccucgccaccggcccccgcaacgucccccagaucgagucccgcggccucuucggcgccaucgccggcuucaucgagggcggcuggcagggcauggucgacggcugguacggcuaccaccacuccaacgaccagggcuccggcuacgccgccgacaaggaguccacccagaaggccuucgaccgcaucaccaacaaggucaacuccgucaucgagaagaugaacacccaguucgaggccgucggcaaggaguucuccaaccucgagaagcgccucgagaaccucaacaagaagauggaggacggcuuccucgacgucuggaccuacaacgccgagcuccucguccucauggagaacgagcgcacccucgacuuccacgacuccaacgucaagaaccucuacgacaagguccgcaugcagcuccgcgacaacgucaaggagcucggcaacggcugcuucgaguucuaccacaagugcgacgacgagugcaugaacuccgucaagaacggcaccuacgacuaccccaaguacgaggaggaguccaagcucaagcgcaacgagaucaagggcgucaagcucuccuccaugggcgucuaccagauccucgccaucuacgccaccgucgccggcucccucucccucgccaucaugaucgccggcaucuccuucuggaugugcuccaacggcucccuccagugccgcaucugcaucuga

SEQ ID NO: 97669 - RNA, 1701 nt, Artificial Sequence
  derived and/or modified CDS sequence (opt2) from hemagglutinin__InfluenzaA__ABO52258
augaaggccaagcuccucguccuccucugcgcccucuccgccaccgacgccgacaccaucugcaucggcuaccacgccaacaacuccaccgacaccgucgacaccguccucgagaagaacgucaccgucacccacuccgucaaccuccucgaggacucccacaacggcaagcucugccgccucaagggcaucgccccccuccagcucggcaagugcuccaucgccggcuggauccucggcaaccccgagugcgagucccucuucuccaagaaguccugguccuacaucgccgagacccccaacuccgagaacggcaccugcuaccccggcuacuucgccgacuacgaggagcuccgcgagcagcucuccuccgucuccuccuucgagcgcuucgagaucuuccccaaggaguccuccuggcccaagcacaacgucacccgcggcgucaccgccuccugcucccacaagggcaagugcuccuucuaccgcaaccuccucuggcucaccgagaagaacggcuccuaccccaaccucuccaaguccuacgucaacaacaaggagaaggagguccucguccucuggggcguccaccaccccuccaacaucgaggaccagaagaccaucuaccgcaaggagaacgccuacgucuccgucgucuccucccacuacaaccgccgcuucacccccgagaucgccaagcgccccaagguccgcgaccaggagggccgcaucaacuacuacuggacccuccucgagcccggcgacaccaucaucuucgaggccaacggcaaccucaucgcccccugguacgccuucgcccucucccgcggcuucggcuccggcaucaucaccuccaacgccuccauggacgagugcgacgccaagugccagaccccccagggcgccaucaacuccucccuccccuuccagaacguccaccccgucaccaucggcgagugccccaaguacguccgcuccaccaagcuccgcauggucaccggccuccgcaacauccccuccauccagucccgcggccucuucggcgccaucgccggcuucaucgagggcggcuggaccggcaugaucgacggcugguacggcuaccaccaccagaacgagcagggcuccggcuacgccgccgaccagaaguccacccagaacgccaucaacggcaucaccaacaaggucaacuccgucaucgagaagaugaacacccaguucaccgccgucggcaaggaguucaacaagcucgagaagcgcauggagaaccucaacaagaaggucgacgacggcuuccucgacaucuggaccuacaacgccgagcuccucguccuccucgagaacgagcgcacccucgacuuccacgacuccaacgucaagaaccucuacgagaaggucaagucccagcucaagaacaacgccaaggagaucggcaacggcugcuucgaguucuaccacaagugcaacaacgagugcauggaguccgucaagaacggcaccuacgacuaccccaaguacuccgaggaguccaagcucaaccgcgagaagaucgacggcgucaagcucgaguccaugggcgucuaccagauccucgccaucuacuccaccgucgccuccucccucguccuccucgucucccucggcgccaucuccuucuggaugugcuccaacggcucccuccagugccgcaucugcaucuga

SEQ ID NO: 97670 - RNA, 1701 nt, Artificial Sequence
  derived and/or modified CDS sequence (opt2) from hemagglutinin__InfluenzaA__ABO52280
augaaggcccgccuccucauccuccucugcgcccucuccgccaccgacgccgacaccaucugcaucggcuaccacgccaacaacuccaccgacaccgucgacaccguccucgagaagaacgucaccgucacccacuccgucaaccuccucgaggacucccacaacggcaagcucugccgccucaagggcaucgccccccuccagcucggcaagugcaacaucgccggcuggauccucggcaaccccgagugcgagucccuccucuccaaccgcuccugguccuacaucgccgagacccccaacuccgagaacggcaucugcuaccccggcgacuucgccgacuacgaggagcuccgcgagcagcucuccuccgucuccuccuucgagcgcuucgagaucuuccccaaggaguccuccuggcccaagcacaacaucacccgcggcgucaccgucgccugcucccacgccaagaaguccuccuucuacaagaaccuccucuggcucaccgaggccaacggccucuaccccucccucuccaaguccuacgucaacgaccgcgagaaggagguccucguccucuggggcguccaccaccccuccaacaucgaggaccagcgcacccucuaccgcaaggagaacgccuacgucuccgucgucuccuccaacuacaaccgccgcuucacccccgagaucgccgagcgccccaagguccgcggccagcccggccgcaugaacuacuacuggacccuccucgagcccggcgacaagaucaucuucgaggccaacggcaaccucaucgcccccugguacgccuucgcccucucccgcggccccggcuccggcaucaucaccuccaacgccuccauggacgagugcgacaccaagugccagaccccccagggcgccaucaacuccucccuccccuuccagaacauccaccccgucaccaucggcgagugccccaaguacguccgcuccaccaagcuccgcauggucaccggccuccgcaacauccccuccauccagucccgcggccucuucggcgccaucgccggcuucaucgagggcggcuggaccggcauggucgacggcugguacggcuaccaccaccagaacgagcagggcuccggcuacgccgccgaccagaaguccacccagaacgccaucaacggcaucaccaacaaggucaacuccgucaucgagaagaugaacacccaguucaccgccgucggcaaggaguucaacaagcucgagaagcgcauggagaaccucaacaagaaggucgacgacggcuuccucgacaucuggaccuacaacgccgagcuccucguccuccucgagaacgagcgcacccucgacuuccacgacuccaacgucaagaaccucuacgagaaggucaagaaccagcuccgcaacaacgccaaggagaucggcaacggcugcuucgaguucuaccacaagugcgacaacgagugcauggaguccgucaagaacggcaccuacgacuaccccaaguacuccgaggaguccaagcucaaccgcgccaagaucgacggcgucaagcucgaguccaugggcgucuaccagauccucgccaucuacuccaccgucgccuccucccucguccuccucgucucccucggcgccaucuccuucuggaugugcuccaacggcucccuccagugccgcaucugcaucuga

SEQ ID NO: 97671 - RNA, 1689 nt, Artificial Sequence
  derived and/or modified CDS sequence (opt2) from hemagglutinin__InfluenzaA__ABO52302
auggccaucaucuaccucauccuccucuucaccgccguccgcggcgaccagaucugcaucggcuaccacgccaacaacuccaccgagaaggucgacaccauccucgagcgcaacgucaccgucacccacgccaaggacauccucgagaagacccacaacggcaagcucugcaagcucaacggcauccccccccucgagcucggcaacugcuccaucgccggcuggcuccucggcaaccccgagugcgaccgccuccucuccguccccgagugguccuacaucauggagaaggagaacccccgcgacggccucugcuaccccggcuccuucaacgacuacgaggagcucaagcaccuccucuccuccgucaagcacuucgagaaggucaagauccuccccaaggaccgcuggacccagcacaccaccaccggcggcucccgcgccugcgccgucuccggcaaccccuccuucuuccgcaacauggucuggcucaccaagaagggcuccaacuaccccgucgccaagggcuccuacaacaacaccuccggcgagcagaugcucaucaucuggggcguccaccaccccaacgacgagaccgagcagcgcacccucuaccagaacgucggcaccuacgucuccgucggcaccuccacccucaacaagcgcuccacccccgacaucgccacccgccccaaggucaacggccucggcggccgcauggaguucuccuggacccuccucgacaugugggacaccaucaacuucgaguccaccggcaaccucaucgcccccgaguacggcuucaagaucuccaagcgcggcuccuccggcaucaugaagaccgagggcacccucggcaacugcgagaccaagugccagaccccccucggcgccaucaacaccacccuccccuuccacaacguccacccccucaccaucggcgagugccccaaguacgucaaguccgagaagcucguccucgccaccggccuccgcaacgucccccagaucgagucccgcggccucuucggcgccaucgccggcuucaucgagggcggcuggcagggcauggucgacggcugguacggcuaccaccacuccaacgaccagggcuccggcuacgccgccgacaaggaguccacccagaaggccuucgacggcaucaccaacaaggucaacuccgucaucgagaagaugaacacccaguucgaggccgucggcaaggaguucuccaaccucgagcgccgccucgagaaccucaacaagaagauggaggacggcuuccucgacgucuggaccuacaacgccgagcuccucguccucauggagaacgagcgcacccucgacuuccacgacuccaacgucaagaaccucuacgacaagguccgcaugcagcuccgcgacaacgucaaggagcucggcaacggcugcuucgaguucuaccacaagugcgacgacgagugcaugaacuccgucaagaacggcaccuacgacuaccccaaguacgaggaggaguccaagcucaaccgcaacgagaucaagggcgucaagcucuccuccaugggcaucuaccagauccucgccaucuacgccaccgucgccggcucccucucccucgccaucaugauggccggcaucuccuucuggaugugcuccaacggcucccuccagugccgcaucugcaucuga

SEQ ID NO: 97672 - RNA, 1701 nt, Artificial Sequence
  derived and/or modified CDS sequence (opt2) from hemagglutinin__InfluenzaA__ABO52313
augaagaccaucaucgcccucuccuacaucuucugccucgucuucgcccagaaccuccccggcaacgacaacuccaccgccacccucugccucggccaccacgccguccccaacggcacccucgucaagaccaucaccaacgaccagaucgaggucaccaacgccaccgagcucguccaguccuccuccaccggcaagaucugcaacaacccccaccgcauccucgacggcaucaacugcacccucaucgacgcccuccucggcgacccccacugcgacggcuuccagaacgagaagugggaccucuucgucgagcgcuccaaggccuucuccaacugcuaccccuacgacguccccgacuacgccucccuccgcucccucgucgccuccuccggcacccucgaguucaucaacgagggcuucaacuggaccggcgucacccagaacggcggcuccaacgccugcaagcgcggccccgacuccggcuucuucucccgccucaacuggcucuacaaguccggcuccaccuaccccguccucaacgucaccaugcccaacaacgacaacuucgacaagcucuacaucuggggcguccaccaccccuccaccgaccaggagcagaccaaccucuacguccaggccuccggccgcgucaccgucuccaccaagcgcucccagcagaccaucauccccaacgucggcucccgccccuggguccgcggccucuccucccgcaucuccaucuacuggaccaucgucaagcccggcgacauccucgucaucaacuccaacggcaaccucaucgccccccgcggccacuucaagaugcgcaccggcaaguccuccaucaugcgcuccgacgcccccaucggcaccugcuccuccgagugcaucacccccaacggcuccauccccaacgacaagcccuuccagaacgucaacaagaucaccuacggcgccugccccaaguacgucaagcagaacacccucaagcucgccaccggcaugcgcaacguccccgagaagcagacccgcggcaucuucggcgccaucgccggcuucaucgagaacggcugggagggcaugaucgacggcugguacggcuuccgccaccgcaacuccgagggcaccggccaggccgccgaccucaaguccacccaggccgccaucgaccagaucaacggcaagcucaaccgcgucaucgagaagaccaacgagaaguuccaccagaucgagaaggaguucuccgaggucgagggccgcauccaggaccucgagaaguacgucgaggacaccaagaucgaccucugguccuacaacgccgagcuccucgucgcccucgagaaccagcacaccaucgaccucaccgacuccgagaugaacaagcucuucgagaagacccgccgccagcuccgcgagaacgccgaggacaugggcaacggcugcuucaagaucuaccacaagugcgacaacgccugcaucggcuccauccgcaacggcaccuacgaccacgacgucuaccgcgacgaggcccucaacaaccgcuuccagaucaagggcgucgagcucaaguccggcuacaaggacuggauccucuggaucuccuucgccaucuccugcuuccuccucugcgucguccuccucggcuucaucaugugggccugccagaagggcaacauccgcugcaacaucugcaucuga

SEQ ID NO: 97673 - RNA, 1701 nt, Artificial Sequence
  derived and/or modified CDS sequence (opt2) from hemagglutinin__InfluenzaA__ABO52335
augaagaccaucaucgcccucuccuacaucuucugccucguccucggccaggacuucccccgcaacgacaacuccaccgccacccucugccucggccaccacgccguccccaacggcacccucgucaagaccaucaccaacgaccagaucgaggucaccaacgccaccgagcucguccaguccuccuccaccggcaagaucugcaacaacccccaccgcauccucgacggcaucgacugcacccucaucgacgcccuccucggcgacccccacugcgacggcuuccagaacgagaccugggaccucuucgucgagcgcuccaaggccuucuccaacugcuaccccuacgacguccccgacuacgccucccuccgcucccucgucgccuccuccggcacccucgaguucaucaacgagggcuucaccuggaccggcgucacccagaacggcggcuccaacgccugcaagcgcggccccgacuccggcuucuucucccgccucaacuggcucuacaaguccggcaacaccuaccccguccucaacgucaccaugcccaacaacgacaacuucgacaagcucuacaucuggggcguccaccaccccuccaccgaccaggaccagaccucccucuacguccaggccuccggccgcgucaccgucuccaccaagcgcucccagcagaccgucauccccaacaucggcccccgccccuggguccgcggccucuccucccgcaucuccaucuacuggaccaucgucaagcccggcgacauccuccucaucaacuccaacggcaaccucaucgccccccgcggcuacuucaagaugcgcaccggcaaguccuccaucaugcgcuccgacgcccccaucggcaccugcaucuccgagugcaucacccccaacggcuccauccccaacgacaagcccuuccagaacgucaacaagaucaccuacggcgccugccccaaguacgucaagcagaacacccucaagcucgccaccggcaugcgcaacguccccgagaagcagacccgcggcaucuucggcgccaucgccggcuucaucgagaacggcugggagggcaugaucgacggcugguacggcuuccgccaccagaacuccgagggcaccggccaggccgccgaccucaaguccacccaggccgccaucgaccagaucaacggcaagcucaaccgcgucaucgagaagaccaacgagaaguuccaccagaucgagaaggaguucuccgaggucgagggccgcauccaggaccucgagaaguacgucgaggacaccaagaucgaccucugguccuacaacgccgagcuccucgucgcccucgagaaccagcacaccaucgaccucaccgacuccgagaugaacaagcucuucgagaagacccgccgccagcuccgcgagaacgccgaggacaugggcaacggcugcuucaagaucuaccaccgcugcgacaacgccugcaucggcuccauccgcaacggcaccuacgaccacgacgucuaccgcgacgaggcccucaacaaccgcuuccagaucaagggcgucgagcucaaguccggcuacaaggacuggauccucuggaucuccuucgccaucuccugcuuccuccucugcgucguccuccucggcuucaucaugugggccugccagaagggcaacauccgcugcaacaucugcaucuga

SEQ ID NO: 97674 - RNA, 1701 nt, Artificial Sequence
  derived and/or modified CDS sequence (opt2) from hemagglutinin__InfluenzaA__ABO52346
augaagaccaucaucgcccucuccuacaucuucugccucgucuucgcccaggaccuccccggcaacgacaacuccaccgccacccucugccucggccaccacgccguccccaacggcacccucgucaagaccaucaccaacgaccagaucgaggucaccaacgccaccgagcucguccaguccuccuccaccggcaagaucugcgacaacccccaccgcauccucgacggcaucaacugcacccucaucgacgcccuccucggcgacccccacugcgacggcuuccagaacgagaagugggaccucuucgucgagcgcuccaaggccuucuccgacugcuaccccuacgacguccccgacuacgccucccuccgcucccucgucgccuccuccggcacccucgaguucaucaacgagggcuucaacuggaccggcgucacccagaacggcggcuccuccgccugcaagcgcggccccgacaacggcuucuucucccgccucaacuggcucuacaaguccggcuccaccuaccccguccagaacgucaccaugcccaacaacgacaacuccgacaagcucuacaucuggggcguccaccaccccuccaccgacaaggagcagaccgaccucuacguccaggccuccggcaaggucaccgucuccaccaagcgcucccagcagaccgucauccccaacgucggcucccgccccuggguccgcggccucuccucccgcgucuccaucuacuggaccaucgucaagcccggcgacauccucgucaucaacuccaacggcaaccucaucgccccccgcggcuacuucaagaugcgcaccggcaaguccuccaucaugcgcuccgacgcccccaucggcaccugcuccuccgagugcaucacccccaacggcuccauccccaacgacaagcccuuccagaacgucaacaagaucaccuacggcgccugccccaaguacgucaagcagaacacccucaagcucgccaccggcaugcgcaacguccccgagaagcagacccgcggcaucuucggcgccaucgccggcuucaucgagaacggcugggagggcaugaucgacggcugguacggcuuccgccaccagaacuccgagggcaccggccaggccgccgaccucaaguccacccaggccgccaucgaccagaucaacggcaagcucaaccgcgucaucgagaagaccaacgagaaguuccaccagaucgagaaggaguucuccgaggucgagggccgcauccaggaccucgagaaguacgucgaggacaccaagaucgaccucugguccuacaacgccgagcuccucgucgcccucgagaaccagcacaccaucgaccucaccgacuccgagaugaacaagcucuucgagaagacccgccgccagcuccgcgagaacgccgaggacaugggcaacggcugcuucaagaucuaccacaagugcgacaacgccugcaucggcuccauccgcaacggcaccuacgaccacgacgucuaccgcgacgaggcccucaacaaccgcuuccagaucaagggcgucgagcucaaguccggcuacaaggacuggauccucuggaucuccuucgccaucuccugcuuccuccucugcgucguccuccucggcuucaucaugugggccugccagaagggcaacauccgcugcaacaucugcaucuga

SEQ ID NO: 97675 - RNA, 1701 nt, Artificial Sequence
  derived and/or modified CDS sequence (opt2) from hemagglutinin__InfluenzaA__ABO52357
augaagaccaucaucgcccucuccuacaucuucugccucgcccucggccaggaccuccccggcaacgacaacuccaccgccacccucugccucggccaccacgccguccccaacggcacccucgucaagaccaucaccgacgaccagaucgaggucaccaacgccaccgagcucguccaguccuccuccaccggcaagaucugcaacaacccccaccgcauccucgacggcaucgacugcacccucaucgacgcccuccucggcgacccccacugcgacgucuuccagaacgagaccugggaccucuucgucgagcgcuccaaggccuucuccaacugcuaccccuacgacguccccgacuacgccucccuccgcucccucgucgccuccuccggcacccucgaguucaucaccgagggcuucaccuggaccggcgucacccagaacggcggcuccaacgccugcaagcgcggccccggcuccggcuucuucucccgccucaacuggcucaccaaguccggcuccaccuaccccguccucaacgucaccaugcccaacaacgacaacuucgacaagcucuacaucuggggcguccaccaccccuccaccaaccaggagcagaccucccucuacguccaggccuccggccgcgucaccgucuccacccgccgcucccagcagaccaucauccccaacaucggcucccgccccuggguccgcggccucuccucccgcaucuccaucuacuggaccaucgucaagcccggcgacguccucgucaucaacuccaacggcaaccucaucgccccccgcggcuacuucaagaugcgcaccggcaaguccuccaucaugcgcuccgacgcccccaucgacaccugcaucuucgagugcaucacccccaacggcuccauccccaacgacaagcccuuccagaacgucaacaagaucaccuacggcgccugccccaaguacgucaagcagaacacccucaagcucgccaccggcaugcgcaacguccccgagaagcagacccgcggcaucuucggcgccaucgccggcuucaucgagaacggcugggagggcaugaucgacggcugguacggcuuccgccaccagaacuccgagggcaccggccaggccgccgaccucaaguccacccaggccgccaucgaccagaucaacggcaagcucaaccgcgucaucgagaagaccaacgagaaguuccaccagaucgagaaggaguucuccgaggucgagggccgcauccaggaccucgagaaguacgucgaggacaccaagaucgaccucugguccuacaacgccgagcuccucgucgcccucgagaaccagcacaccaucgaccucaccgacuccgagaugaacaagcucuucgagaagacccgccgccagcuccgcgagaacgccgaggacaugggcaacggcugcuucaagaucuaccacaagugcgacaacgccugcaucgaguccauccgcaacggcaccuacgaccacgacgucuaccgcgacgaggcccucaacaaccgcuuccagaucaagggcgucgagcucaaguccggcuacaaggacuggauccucuggaucuccuucgccaucuccugcuuccuccucugcgucguccuccucggcuucaucaugugggccugccagcgcggcaacauccgcugcaacaucugcaucuga

SEQ ID NO: 97676 - RNA, 1701 nt, Artificial Sequence
  derived and/or modified CDS sequence (opt2) from hemagglutinin__InfluenzaA__ABO52368
augaagaccaucaucgcccucuccuacaucuucugccucgcccucggccaggaccuccccggcaacgacaacuccaccgccacccucugccucggccaccacgccguccccaacggcacccucgucaagaccaucaccaacgaccagaucgaggucaccaacgccaccgagcucguccaguccuccuccaccggcaagaucugcaacaacccccaccgcauccucgacggcaucaacugcacccucaucgacgcccuccucggcgacccccacugcgacgucuuccaggacgagaccugggaccucuucgucgagcgcuccaaggccuucuccaacugcuaccccuacgacguccccgacuacgccucccuccgcucccucgucgccuccuccggcacccucgaguucaucaccgagggcuucaccuggaccggcgucacccagaacggcggcuccaacgccugcaagcgcggccccggcuccggcuucuucucccgccucaacuggcucaccaaguccggcuccaccuaccccguccucaacgucaccaugcccaacaacgacaacuucgacaagcucuacaucuggggcguccaccaccccuccaccaaccaggagcagaccucccucuacguccaggccuccggccgcgucaccgucuccacccgccgcucccagcagaccaucauccccaacaucggcucccgccccuggguccgcggccucuccucccgcaucuccaucuacuggaccaucgucaagcccggcgacguccucgucaucaacuccaacggcaaccucaucgccccccgcggcuacuucaagaugcgcaccggcaaguccuccaucaugcgcuccgacgcccccaucgacaccugcaucuccgagugcaucacccccaacggcuccauccccaacgacaagcccuuccagaacgucaacaagaucaccuacggcgccugccccaaguacgucaagcagaacacccucaagcucgccaccggcaugcgcaacguccccgagaagcagacccgcggccucuucggcgccaucgccggcuucaucgagaacggcugggagggcaugaucgacggcugguacggcuuccgccaccagaacuccgagggcaccggccaggccgccgaccucaaguccacccaggccgccaucgaccagaucaacggcaagcucaaccgcgucaucgagaagaccaacgagaaguuccaccagaucgagaaggaguucuccgaggucgagggccgcauccaggaccucgagaaguacgucgaggacaccaagaucgaccucugguccuacaacgccgagcuccucgucgcccucgagaaccagcacaccaucgaccucaccgacuccgagaugaacaagcucuucgagaagacccgccgccagcuccgcgagaacgccgaggacaugggcaacggcugcuucaagaucuaccacaagugcgacaacgccugcaucgaguccauccgcaacggcaccuacgaccacgacgucuaccgcgacgaggcccucaacaaccgcuuccagaucaagggcgucgagcucaaguccggcuacaaggacuggauccucuggaucuccuucgccaucuccugcuuccuccucugcgucguccuccucggcuucaucaugugggccugccagcgcggcaacauccgcugcaacaucugcaucuga

SEQ ID NO: 97677 - RNA, 1701 nt, Artificial Sequence
  derived and/or modified CDS sequence (opt2) from hemagglutinin__InfluenzaA__ABO52797
augaaggccaagcuccucguccuccucugcgcccucuccgccaccgacgccgacaccaucugcaucggcuaccacgccaacaacuccaccgacaccgucgacaccguccucgagaagaacgucaccgucacccacuccgucaaccuccucgaggacaaccacaacggcaagcucugcaagcucaagggcaucgccccccuccagcucggcaagugcuccaucgccggcuggauccucggcaaccccgagugcgagucccucuucuccaagaaguccugguccuacaucgccgagacccccaacuccgagaacggcaccugcuaccccggcuacuucgccgacuacgaggagcuccgcgagcagcucuccuccgucuccuccuucgagcgcuucgagaucuuccccaaggaguccuccuggcccaaccacaacgucaccaagggcgucaccgccuccugcucccacaagggcaaguccuccuucuaccgcaaccuccucuggcucaccgagaagaacggcuccuaccccucccucuccaaguccuacgucaacaacaaggagaaggagguccucguccucuggggcguccaccaccccuccaacaucaaggaccagaagaccaucuaccgcaaggagaacgccuacgucuccgucgucuccucccacuacaaccgccgcuucacccccgagaucgccaagcgccccaagguccgcgaccaggagggccgcaucaacuacuacuggacccuccucgagcccggcgacaccaucaucuucgaggccaacggcaaccucaucgcccccugguacgccuucgcccucucccgcggcuucggcuccggcaucaucaccuccaacgccuccauggacgagugcgacgccaagugccagaccccccagggcgccaucaacuccucccuccccuuccagaacguccaccccgucaccaucggcgagugccccaaguacguccgcuccaccaagcuccgcauggucaccggccuccgcaacauccccuccauccagucccgcggccucuucggcgccaucgccggcuucaucgagggcggcuggaccggcaugaucgacggcugguacggcuaccaccaccagaacgagcagggcuccggcuacgccgccgaccagaaguccacccaguccgccaucaacggcaucaccaacaaggucaacuccaucaucgagaagaugaacacccaguucaccgccgucggcaaggaguucaacaagcucgagaagcgcauggagaaccucaacaagaaggucgacgacggcuuccucgacaucuggaccuacaacgccgagcuccucguccuccucgagaacgagcgcacccucgacuuccacgacuccaacgucaagaaccucuacgagaaggucaagucccagcucaagaacaacgccaaggagaucggcaacggcugcuucgaguucuaccacaagugcaacaacgagugcauggaguccgucaagaacggcaccuacgacuaccccaaguacuccgaggaguccaagcucaaccgcgagaagaucgacggcgucaagcucgaguccaugggcgucuaccagauccucgccaucuacuccaccgucgccuccucccucguccuccucgucucccucggcgccaucuccuucuggaugugcuccaacggcucccuccagugccgcaucugcaucuga

SEQ ID NO: 97678 - RNA, 1698 nt, Artificial Sequence; identical to SEQ ID NO: 96778
  derived and/or modified CDS sequence (opt2) from hemagglutinin__InfluenzaA__ABP49217

SEQ ID NO: 97679 - RNA, 1698 nt, Artificial Sequence
  derived and/or modified CDS sequence (opt2) from hemagglutinin__InfluenzaA__ABP49305
augaaggccaagcucaugguccuccucugcaccuucaccgccaccuacgccgacaccaucugcaucggcuaccacgccaacaacuccaccgacaccgucgacaccguccucgagaagaacgucaccgucacccacuccgucaaccuccucgaggacucccacaacggcaagcucugccuccucaagggcaucgccccccuccagcucggcaacugcuccgucgccggcuggauccucggcaaccccgagugcgagcuccucaucuccaaggaguccugguccuacaucgucgagacccccaaccccgagaacggcaccugcuaccccggcuacuucgccgacuacgaggagcuccgcgagcagcucuccuccgucuccuccuucgagcgcuucgagaucuuccccaaggaguccuccuggcccaaccacaccgucaccggcgucuccgccuccugcucccacaacggcaaguccuccuucuaccgcaaccuccucuggcucaccggcaagaacggccucuaccccaaccucuccaaguccuacgccaacaacaaggagaaggagguccucguccucuggggcguccaccacccccccaacaucggcgaccagcgcgcccucuaccacaccgagaacgccuacgucuccgucgucuccucccacuacucccgccgcuucacccccgagaucgccaagcgccccaagguccgcgaccaggagggccgcaucaacuacuacuggacccuccucgagcccggcgacaccaucaucuucgaggccaacggcaaccucaucgcccccugguacgccuucgcccucucccgcggcuucggcuccggcaucaucaccuccaacgcccccaugggcgagugcgacgccaagugccagaccccccagggcgccaucaacuccucccuccccuuccagaacguccaccccgucaccaucggcgagugccccaaguacguccgcuccgccaagcuccgcauggucaccggccuccgcaacauccccuccauccagucccgcggccucuucggcgccaucgccggcuucaucgagggcggcuggaccggcauggucgacggcugguacggcuaccaccaccagaacgagcagggcuccggcuacgccgccgaccagaaguccacccagaacgccaucaacggcaucaccaacaaggucaacuccgucaucgagaagaugaacacccaguucaccgccgucggcaaggaguucaacaagcucgagcgccgcauggagaaccucaacaagaaggucgacgacggcuuccucgacaucuggaccuacaacgccgagcuccucguccuccucgagaacgagcgcacccucgacuuccacgacuccaacgucaagaaccucuacgagaaggucaagucccagcucaagaacaacgccaaggagaucggcaacggcugcuucgaguucuaccacaagugcaacaacgagugcauggaguccgucaagaacggcaccuacgacuaccccaaguacuccgaggaguccaagcucaaccgcgagaagaucgacggcgucaagcucgaguccaugggcgucuaccagauccucgccaucuacuccaccgucgccuccucccucguccuccucgucucccucggcgccaucuccuucuggaugugcuccaacggcucccuccagugccgcaucugcaucuga

SEQ ID NO: 97680 - RNA, 1701 nt, Artificial Sequence
  derived and/or modified CDS sequence (opt2) from hemagglutinin__InfluenzaA__ABP49316
augaaggccaagcuccucguccuccucugcgcccucuccgccaccgacgccgacaccaucugcaucggcuaccacgccaacaacuccaccgacaccgucgacaccguccucgagaagaacgucaccgucacccacuccgucaaccuccucgaggacucccacaacggcaagcucugccgccucaagggcaucgccccccuccagcucggcaagugcaacaucgccggcuggauccucggcaaccccgagugcgagucccucuucuccaagaaguccugguccuacaucgccgagacccccaacuccgagaacggcaccugcuaccccggcuacuucgccgacuacgaggagcuccgcgagcagcucuccuccgucuccuccuucgagcgcuucgagaucuuccccaaggagcgcuccuggcccaagcacaacaucacccgcggcgucaccgccgccugcucccacaagggcaaguccuccuucuaccgcaaccuccucuggcucaccgagaagaacggcuccuaccccaaccucaagaaguccuacgucaacaacaaggagaaggagguccucguccucuggggcguccaccaccccuccaacaucgaggaccagaagacccucuaccgcaaggagaacgccuacgucuccgucgucuccuccaacuacaacaagcgcuucacccccgagaucgccgagcgccccaagguccgcggccaggccggccgcaucaacuacuacuggacccuccucgagcccggcgacaccaucaucuucgaggccaacggcaaccucaucgcccccuggcacgccuucgcccucucccgcggcuucggcuccggcaucaucaccuccaacgccuccauggacgagugcgacaccaagugccagaccccccagggcgccaucaacuccucccuccccuuccagaacauccaccccgucaccaucggcgagugccccaaguacguccgcuccaccaagcuccgcauggucaccggccuccgcaacauccccuccauccagucccgcggccucuucggcgccaucgccggcuucaucgagggcggcuggaccggcaugaucgacggcugguacggcuaccaccaccagaacgagcagggcuccggcuacgccgccgaccagaaguccacccagaacgccaucaacggcaucaccaacaaggucaacuccgucaucgagaagaugaacacccaguucaccgccgucggcaaggaguucaacaagcucgagaagcgcauggagaaccucaacaagaaggucgacgacggcuuccucgacaucuggaccuacaacgccgagcuccucguccuccucgagaacgagcgcacccucgacuuccacgacuccaacgucaagaaccucuacgagaaggucaagucccagcucaagaacaacgccaaggagaucggcaacggcugcuucgaguucuaccacaagugcaacaacgagugcauggaguccgucaagaacggcaccuacgacuaccccaaguacuccgaggaguccaagcucaaccgcgagaagaucgacggcgucaagcucgaguccaugggcgucuaccagauccucgccaucuacuccaccgucgccuccucccucguccuccucgucucccucggcgccaucuccuucuggaugugcuccaacggcucccuccagugccgcaucugcaucuga

SEQ ID NO: 97681 - RNA, 1701 nt, Artificial Sequence
  derived and/or modified CDS sequence (opt2) from hemagglutinin__InfluenzaA__ABP49327
augaaggcccgccuccucguccuccucugcgcccucgccgccaccgacgccgacaccaucugcaucggcuaccacgccaacaacuccaccgacaccgucgacaccguccucgagaagaacgucaccgucacccacuccgucaaccuccucgaggacucccacaacggcaagcucugccgccucaagggcaucgccccccuccagcuccgcaagugcaacaucgccggcuggauccucggcaaccccgagugcgagucccuccucuccgagcgcuccugguccuacaucgucgagacccccaacuccgagaacggcaccugcuaccccggcgacuucaccaacuacgaggagcuccgcgagcagcucuccuccgucuccuccuucgagcgcuucgagaucuuccccaaggaguccuccuggcccaagcacaacaccacccgcggcgucaccgccgccugcucccacgccggcaaguccuccuucuaccgcaaccuccucuggcucaccgagaaggacggcuccuaccccaaccucaacaacuccuacgucaacaagaagggcaaggagguccucguccucuggggcguccaccaccccuccaacaucaaggaccagcagacccucuaccagaaggagaacgccuacgucuccgucgucuccuccaacuacaaccgccgcuucacccccgagaucgccgagcgccccaagguccgcggccaggccggccgcaugaacuacuacuggacccuccucaagcccggcgacaccaucauguucgaggccaacggcaaccucaucgcccccugguacgccuucgcccucucccgcggcuucggcuccggcaucaucaccuccaacgccuccaugcacgagugcgacaccaagugccagaccccccagggcgccaucaacuccucccuccccuuccagaacauccaccccgucaccaucggcgagugccccaaguacguccgcuccaccaagcuccgcauggucaccggccuccgcaacauccccuccauccagucccgcggccucuucggcgccaucgccggcuucaucgagggcggcuggaccggcaugaucgacggcugguacggcuaccaccaccagaacgagcagggcuccggcuacgccgccgaccagaaguccacccagaacgccaucaacggcaucaccaacaaggucaacuccgucaucgagaagaugaacacccaguucaccgccgucggcaaggaguucaacaaccucgagaagcgcauggagaaccucaacaagaaggucgacgacggcuuccucgacaucuggaccuacaacgccgagcuccucauccuccucgagaacgagcgcacccucgacuuccacgacuccaacgucaagaaccucuacgagaaggucaagucccagcuccgcaacaacgccaaggagaucggcaacggcugcuucgaguucuaccacaagugcaacaacgagugcauggaguccgucaagaacggcaccuacgacuaccccaaguacuccgaggaguccaagcucaaccgcgagaagaucgacggcgucaagcucgaguccaugggcgucuaccagauccucgccaucuacuccaccgucgccuccucccucguccuccucgucucccucggcgccaucuccuucuggaugugcuccaacggcucccuccagugccgcaucugcaucuga

SEQ ID NO: 97682 - RNA, 1701 nt, Artificial Sequence
  derived and/or modified CDS sequence (opt2) from hemagglutinin__InfluenzaA__ABP49338
augaaggccaagcuccucguccuccucugcgcccucuccgccaccgacgccgacaccaucugcaucggcuaccacgccaacaacuccaccgacaccgucgacaccguccucgagaagaacgucaccgucacccacuccgucaaccuccucgaggacucccacaacggcaagcucugccgccucaagggcaucgccccccuccagcucggcaagugcuccaucgccggcuggauccucggcaaccccgagugcgagucccucuucuccaagaaguccugguccuacaucgccgagacccccaacuccgagaacggcaccugcuaccccggcuacuucgccgacuacgaggagcuccgcgagcagcucuccuccgucuccuccuucgagcgcuucgagaucuuccccaaggagcgcuccuggcccaagcacaacgucacccgcggcgucaccgccuccugcucccacaagggcaaguccuccuucuaccgcaaccuccucuggcucaccgagaagaacggcuccuaccccaaccucuccaaguccuacgucaacaacaaggagaaggagguccucguccucuggggcguccaccaccccuccaacaucgaggaccagaagaccaucuaccgcaaggagaacgccuacgucuccgucgucuccuccaacuacaaccgccgcuucacccccgagaucgccaagcgccccaagguccgcggccaggagggccgcaucaacuacuacuggacccuccucgagcccggcgacaccaucaucuucgaggccaacggcaaccucaucgcccccugguacgccuucgcccucucccgcggcuucggcuccggcaucaucaccuccaacgccuccauggacgagugcgacaccaagugccagaccccccagggcgccaucaacuccucccuccccuuccagaacguccaccccgucaccaucggcgagugccccaaguacguccgcuccaccaagcuccgcauggucaccggccuccgcaacauccccuccauccagucccgcggccucuucggcgccaucgccggcuucaucgagggcggcuggaccggcaugaucgacggcugguacggcuaccaccaccagaacgagcagggcuccggcuacgccgccgaccagaaguccacccagaacgccaucaacggcaucaccaacaaggucaacuccgucaucgagaagaugaacacccaguucaccgccgucggcaaggaguucaacaagcucgagaagcgcauggagaaccucaacaagaaggucgacgacggcuuccucgacaucuggaccuacaacgccgagcuccucguccuccucgagaacgagcgcacccucgacuuccacgacuccaacgucaagaaccucuacgagaaggucaagucccagcucaagaacaacgccaaggagaucggcaacggcugcuucgaguucuaccacaagugcaacaacgagugcauggaguccgucaagaacggcaccuacgacuaccccaaguacuccgaggaguccaagcucaaccgcgagaagaucgacggcgucaagcucgaguccaugggcgucuaccagauccucgccaucuacuccaccgucgccuccucccucguccuccucgucucccucggcgccaucuccuucuggaugugcuccaacggcucccuccagugccgcaucugcaucuga

SEQ ID NO: 97683 - RNA, 1701 nt, Artificial Sequence
  derived and/or modified CDS sequence (opt2) from hemagglutinin__InfluenzaA__ABP49349
augaaggccaagcuccucguccuccucugcgcccucuccgccaccgacgccgacaccaucugcaucggcuaccacgccaacaacuccaccgacaccgucgacaccguccucgagaagaacgucaccgucacccacuccgucaaccuccucgaggacaaccacaacggcaagcucugcaagcucaagggcaucgccccccuccagcucggcaagugcuccaucgccggcuggauccucggcaaccccgagugcgagucccucuucuccaagaaguccugguccuacaucgccgagacccccaacuccgagaacggcaccugcuaccccggcuacuucgccgacuacgaggagcuccgcgagcagcucuccuccgucuccuccuucgagcgcuucgagaucuuccccaaggaguccuccuggcccaaccacaacgucaccaagggcgucaccgccuccugcucccacaagggcaaguccuccuucuaccgcaaccuccucuggcucaccgagaagaacggcuccuaccccaaccucuccaaguccuacgucaacaacaaggagaaggagguccucguccucuggggcauccaccaccccuccaacaucgaggaccagaagaccaucuaccgcaaggagaacgccuacgucuccgucgucuccucccacuacaaccgccgcuucacccccgagaucgccaagcgccccaagguccgcgaccaggagggccgcaucaacuacuacuggacccuccucgagcccggcgacaccaucaucuucgaggccaacggcaaccucaucgcccccugguacgccuucgcccucucccgcggcuucggcuccggcaucaucaccuccaacgccuccauggacgagugcgacgccaagugccagaccccccucggcgccaucaacuccucccuccccuuccagaacguccaccccgucaccaucggcgagugccccaaguacguccgcuccaccaagcuccgcauggucaccggccuccgcaacauccccuccauccagucccgcggccucuucggcgccaucgccggcuucaucgagggcggcuggaccggcaugaucgacggcugguacggcuaccaccaccagaacgagcagggcuccggcuacgccgccgaccagaaguccacccaguccgccaucaacggcaucaccaacaaggucaacuccaucaucgagaagaugaacacccaguucaccgccgucggcaaggaguucaacaagcucgagaagcgcauggagaaccucaacaagaaggucgacgacggcuuccucgacaucuggaccuacaacgccgagcuccucguccuccucgagaacgagcgcacccucgacuuccacgacuccaacgucaagaaccucuacgagaaggucaagucccagcucaagaacaacgccaaggagaucggcaacggcugcuucgaguucuaccacaagugcaacaacgagugcauggaguccgucaagaacggcaccuacgacuaccccaaguacuccgaggaguccaagcucaaccgcgagaagaucgacggcgucaagcucgaguccaugggcgucuaccagauccucgccaucuacuccaccgucgccuccucccucguccuccucgucucccucggcgccaucuccuucuggaugugcuccaacggcucccuccagugccgcaucugcaucuga

SEQ ID NO: 97684 - RNA, 1701 nt, Artificial Sequence
  derived and/or modified CDS sequence (opt2) from hemagglutinin__InfluenzaA__ABP49360
augaaggccaagcuccucauccuccucugcgccuucaccgccaccgacgccgacaccaucugcaucggcuaccacgccaacaacuccaccgacaccgucgacaccguccucgagaagaacgucaccgucacccacuccgucaaccuccucgaggacucccacaacggcaagcucugccgccucaagggcaucgccccccuccagcucggcaacugcuccaucgccggcuggauccucggcaaccccgagugcgagucccucuucuccaagaaguccugguccuacaucgccgagacccccaacuccgagaacggcaccugcuaccccggcuacuucgccgacuacgaggagcuccgcgagcagcucuccuccgucuccuccuucgagcgcuucgagaucuuccccaaggaguccuccuggcccaaccacaccgucaccaagggcgucaccgccuccugcucccacaacggcaaguccuccuucuaccgcaaccuccucuggcucaccaagaagaacggcuccuaccccaaccucuccaaguccuacgucaacaacaaggagaaggagguccucguccucuggggcguccaccaccccuccaacaucggcgaccagcgcgccaucuaccacaccgagaacgccuacgucuccgucgucuccucccacuacaaccgccgcuucacccccgagaucgccaagcgccccaagguccgcgaccaggagggccgcaucaacuacuacuggacccuccucgagcccggcgacaccaucaucuucgaggccaacggcaaccucaucgcccccugguacgccuucgcccucucccgcggcuucggcuccggcaucaucaccuccaacgccuccauggacgagugcgacgccaagugccagaccccccagggcgccaucaacuccucccuccccuuccagaacguccaccccgucaccaucggcgagugccccaaguacguccgcuccaccaagcuccgcauggucaccggccuccgcaacauccccuccauccagucccgcggccucuucggcgccaucgccggcuucaucgagggcggcuggaccggcaugaucgacggcugguacggcuaccaccaccagaacgagcagggcuccggcuacgccgccgaccagaaguccacccagaacgccaucaacggcaucaccaacaaggucaacuccgucaucgagaagaugaacacccaguucaccgccgucggcaaggaguucaacaagcucgagcgccgcauggagaaccucaacaagaaggucgacgacggcuuccucgacaucuggaccuacaacgccgagcuccucguccuccucgagaacgagcgcacccucgacuuccacgacuccaacgucaagaaccucuacgagaaggucaagucccagcucaagaacaacgccaaggagaucggcaacggcugcuucgaguucuaccacaagugcaacaacgagugcauggaguccgucaagaacggcaccuacgacuaccccaaguacuccgaggaguccaagcucaaccgcgagaagaucgacggcgucaagcucgaguccaugggcgucuaccagauccucgccaucuacuccaccgucgccuccucccucguccuccucgucucccucggcgccaucuccuucuggaugugcuccaacggcucccuccagugccgcaucugcaucuga

SEQ ID NO: 97685 - RNA, 1701 nt, Artificial Sequence; identical to SEQ ID NO: 96686
  derived and/or modified CDS sequence (opt2) from hemagglutinin__InfluenzaA__ABP49371

SEQ ID NO: 97686 - RNA, 1701 nt, Artificial Sequence; identical to SEQ ID NO: 97423
  derived and/or modified CDS sequence (opt2) from hemagglutinin__InfluenzaA__ABP49382

SEQ ID NO: 97687 - RNA, 1698 nt, Artificial Sequence
  derived and/or modified CDS sequence (opt2) from hemagglutinin__InfluenzaA__ABP49393
augaaggucaagcuccucguccuccucugcaccuucaccgccaccuacgccgacaccaucugcaucggcuaccacgccaacaacuccaccgacaccgucgacaccguccucgagaagaacgucaccgucacccacuccgucaaccuccucgaggacucccacaacggcaagcucugccuccucaagggcaucgccccccuccagcucggcaacugcuccgucgccggcuggauccucggcaaccccgagugcgagcuccucaucuccaaggaguccugguccuacaucgucgagacccccaaccccgagaacggcaccugcuaccccggcuacuucgccgacuacgaggagcuccgcgagcagcucuccuccgucuccuccuucgagcgcuucgagaucuuccccaaggaguccuccuggcccaaccacaccgucaccggcgucuccgccuccugcucccacaacggcaaguccuccuucuaccgcaaccuccucuggcucaccggcaagaacggccucuaccccaaccucuccaaguccuacgccaacaacaaggagaaggagguccucguccucuggggcauccaccacccccccaacaucggcgaccagcgcgcccucuaccacaccgagaacgccuacgucuccgucgucuccucccacuacucccgccgcuucacccccgagaucgccaagcgccccaagguccgcgaccaggagggccgcaucaacuacuacuggacccuccucgagcccggcgacaccaucaucuucgaggccaacggcaaccucaucgccccccgcuucgccuucgcccucucccgcggcuucggcuccggcaucaucaccuccaacgcccccauggacgagugcgacgccaagugccagaccccccagggcgccaucaacuccucccuccccuuccagaacguccaccccgucaccaucggcgagugccccaaguacguccgcuccgccaagcuccgcauggucaccggccuccgcaacauccccuccauccagucccgcggccucuucggcgccaucgccggcuucaucgagggcggcuggaccggcauggucgacggcugguacggcuaccaccaccagaacgagcagggcuccggcuacgccgccgaccagaaguccacccagaacgccaucaacggcaucaccaacaaggucaacuccgucaucgagaagaugaacacccaguucaccgccgucggcaaggaguucaacaagcucgagcgccgcauggagaaccucaacaagaaggucgacgacggcuuccucgacaucuggaccuacaacgccgagcuccucguccuccucgagaacgagcgcacccucgacuuccacgacuccaacgucaagaaccucuacgagaaggucaagucccagcucaagaacaacgccaaggagaucggcaacggcugcuucgaguucuaccacaagugcaacgacgagugcauggaguccgucaagaacggcaccuacgacuaccccaaguacuccgaggaguccaagcucaaccgcgagcgcaucgacggcgucaagcucgaguccaugggcgucuaccagauccucgccaucuacuccaccgucgccuccucccucguccuccucgucucccucggcgccaucuccuucuggaugugcuccaacggcucccuccagugccgcaucugcaucuga

SEQ ID NO: 97688 - RNA, 1701 nt, Artificial Sequence
  derived and/or modified CDS sequence (opt2) from hemagglutinin__InfluenzaA__ABP49404
augaagaccaucaucgcccucuccuacacccucugccucgucuucgcccagaagcuccccggcaacgacaacuccaccgccacccucugccucggccaccacgccguccccaacggcaccaucgucaagaccaucaccaacgaccagaucgaggucaccaacgccaccgagcucguccaguccuccuccaccggcggcaucugcgacuccccccaccagauccucgacggcgagaacugcacccucaucggcgcccuccucggcgacccccagugcgacggcuuccagaacaagaagugggaccucuucgucgagcgcuccaaggccuacuccaacugcuaccccuacgacguccccgacuacgccucccuccgcucccucgucgccuccuccggcacccucgaguucaacaacgaguccuucaacuggaccggcgucacccagaacggcaccuccuccgccugcaagcgccgcuccaacaacuccuucuucucccgccucaacuggcucacccaccucaaguucaaguaccccgcccucaacgucaccaugcccaacaacgagaaguucgacaagcucuacaucuggggcguccaccaccccggcaccuacaacgaccagaucucccucuacgcccaggccuccggccgcaucaccgucuccaccaagcgcucccagcagaccgucauccccaacaucggcucccgcccccgcguccgcgacauccccucccgcaucuccaucuacuggaccaucgucaagcccggcgacauccuccucaucaacuccaccggcaaccucaucgccccccgcggcuacuucaagauccgcuccggcaaguccuccaucaugcgcuccgacgcccccaucggcaagugcaacuccgagugcaucacccccaacggcuccauccccaacgacaagcccuuccagaacgucaaccgcaucaccuacggcgccugcccccgcuacgucaagcagaacacccucaagcucgccaccggcaugcgcaacguccccgagaagcagacccgcggcaucuucggcgccaucgccggcuucaucgagaacggcugggagggcauggucgacggcugguacggcuuccgccaccagaacuccgagggcaucggccaggccgccgaccucaaguccacccaggccgccaucaaccagaucaacggcaagcucaaccgccucaucggcaagaccaacgagaaguuccaccagaucgagaaggaguucuccgaggucgagggccgcauccaggaccucgagaaguacgucgaggacaccaagaucgaccucugguccuacaacgccgagcuccucgucgcccucgagaaccagcacaccaucgaccucaccgacuccgagaugaacaagcucuucgagcgcaccaagaagcagcuccgcgagaacgccgaggacaugggcaacggcugcuucaagaucuaccacaagugcgacaacgccugcaucggcuccauccgcaacggcaccuacgaccacgacgucuaccgcgacgaggcccucaacaaccgcuuccagaucaagggcgucgagcucaaguccggcuacaaggacuggauccucuggaucuccuucgccaucuccugcuuccuccucugcgucgcccuccucggcuucaucaugugggccugccagaagggcaacauccgcugcaacaucugcaucuga

SEQ ID NO: 97689 - RNA, 1701 nt, Artificial Sequence; identical to SEQ ID NO: 96686
  derived and/or modified CDS sequence (opt2) from hemagglutinin__InfluenzaA__ABP49415

SEQ ID NO: 97690 - RNA, 1701 nt, Artificial Sequence; identical to SEQ ID NO: 96686
  derived and/or modified CDS sequence (opt2) from hemagglutinin__InfluenzaA__ABP49426

SEQ ID NO: 97691 - RNA, 1689 nt, Artificial Sequence
  derived and/or modified CDS sequence (opt2) from hemagglutinin__InfluenzaA__ABP49437
auggccaucaucuaccucauccuccucuucaccgccguccgcggcgaccagaucugcaucggcuaccacgccaacaacuccaccgagaaggucgacaccauccucgagcgcaacgucaccgucacccacgccaaggacauccucgagaagacccacaacggcaagcucugcaagcucaacggcauccccccccucgagcucggcgacugcuccaucgccggcuggcuccucggcaaccccgagugcgaccgccuccucuccguccccgagugguccuacaucauggagaaggagaacccccgcgacggccucugcuaccccggcuccuucaacgacuacgaggagcucaagcaccuccucuccuccgucaagcacuucgagaaggucaagauccuccccaaggaccgcuggacccagcacaccaccaccggcggcucccgcgccugcgccgucuccggcaaccccuccuucuuccgcaacauggucuggcucaccaagaagggcuccaacuaccccgucgccaagggcuccuacaacaacaccuccggcgagcagaugcucaucaucuggggcguccaccaccccaacgacgagaccgagcagcgcacccucuaccagaacgucggcaccuacgucuccgucggcaccuccacccucaacaagcgcuccacccccgagaucgccacccgccccaaggucaacggccucggcggccgcauggaguucuccuggacccuccucgacaugugggacaccaucaacuucgaguccaccggcaaccucaucgcccccgaguacggcuucaagaucuccaagcgcggcuccuccggcaucaugaagaccgagggcacccucgagaacugcgagaccaagugccagaccccccucggcgccaucaacaccacccuccccuuccacaacguccacccccucaccaucggcgagugccccaaguacgucaaguccgagaagcucguccucgccaccggccuccgcaacgucccccagaucgagucccgcggccucuucggcgccaucgccggcuucaucgagggcggcuggcagggcauggucgacggcugguacggcuaccaccacuccaacgaccagggcuccggcuacgccgccgacaaggaguccacccagaaggccuucgacggcaucaccaacaaggucaacuccgucaucgagaagaugaacacccaguucgaggccgucggcaaggaguucuccaaccucgagcgccgccucgagaaccucaacaagaagauggaggacggcuuccucgacgucuggaccuacaacgccgagcuccucguccucauggagaacgagcgcacccucgacuuccacgacuccaacgucaagaaccucuacgacaagguccgcaugcagcuccgcgacaacgucaaggagcucggcaacggcugcuucgaguucuaccacaagugcgacgacgagugcaugaacuccgucaagaacggcaccuacgacuaccccaaguacgaggaggaguccaagcucaaccgcaacgagaucaagggcgucaagcucuccuccaugggcgucuaccagauccucgccaucuacgccaccgucgccggcucccucucccucgccaucaugauggccggcaucuccuucuggaugugcuccaacggcucccuccagugccgcaucugcaucuga

SEQ ID NO: 97692 - RNA, 1701 nt, Artificial Sequence
  derived and/or modified CDS sequence (opt2) from hemagglutinin__InfluenzaA__ABP49448
augaaggccaagcuccucguccuccucugcgcccucuccgccaccgacgccgacaccaucugcaucggcuaccacgccaacaacuccaccgacaccgucgacaccguccucgagaagaacgucaccgucacccacuccgucaaccuccucgaggacucccacaacggcaagcucugccgccucaagggcaucgccccccuccagcucggcaagugcuccaucgccggcuggauccucggcaaccccgagugcgagucccucuucuccaagaaguccugguccuacaucgccgagacccccaacuccgagaacggcaccugcuaccccggcuacuucgccgacuacgaggagcuccgcgagcagcucuccuccgucuccuccuucgagcgcuucgagaucuuccccaaggagcgcuccuggcccaagcacaacgucacccgcggcgucaccgccuccugcucccacaagggcaaguccuccuucuaccgcaaccuccucuggcucaccgagaagaacggcuccuaccccaaccucuccaaguccuacgucaacaacaaggagaaggagguccucguccucuggggcguccaccaccccuccaacaucgaggaccagaagaccaucuaccgcaaggagaacgccuacgucuccgucgucuccuccaacuacaaccgccgcuucacccccgagaucuccgagcgccccaagguccgcggccaggagggccgcaucaacuacuacuggacccuccucgagcccggcgacaccaucaucuucgaggccaacggcaaccucaucgcccccugguacgccuucgcccucucccgcggcuucggcuccggcaucaucaccuccaacgccuccauggacgagugcgacaccaagugccagaccccccagggcgccaucaacuccucccuccccuuccagaacguccaccccgucaccaucggcgagugccccaaguacguccgcuccaccaagcuccgcauggucaccggccuccgcaacauccccuccauccagucccgcggccucuucggcgccaucgccggcuucaucgagggcggcuggaccggcaugaucgacggcugguacggcuaccaccaccagaacgagcagggcuccggcuacgccgccgaccagaaguccacccagaacgccaucaacggcaucaccaacaaggucaacuccgucaucgagaagaugaacacccaguucaccgccgucggcaaggaguucaacaagcucgagaagcgcauggagaaccucaacaagaaggucgacgacggcuuccucgacaucuggaccuacaacgccgagcuccucguccuccucgagaacgagcgcacccucgacuuccacgacuccaacgucaagaaccucuacgagaaggucaagucccagcucaagaacaacgccaaggagaucggcaacggcugcuucgaguucuaccacaagugcaacaacgagugcauggaguccgucaagaacggcaccuacgacuaccccaaguacuccgaggaguccaagcucaaccgcgagaagaucgacggcgucaagcucgaguccaugggcgucuaccagauccucgccaucuacuccaccgucgccuccucccucguccuccucgucucccucggcgccaucuccuucuggaugugcuccaacggcucccuccagugccgcaucugcaucuga

SEQ ID NO: 97693 - RNA, 1689 nt, Artificial Sequence
  derived and/or modified CDS sequence (opt2) from hemagglutinin__InfluenzaA__ABP49459
auggccaucaucuaccucauccuccucuucaccgccguccgcggcgaccagaucugcaucggcuaccacgccaacaacuccaccgagaaggucgacaccauccucgagcgcaacgucaccgucacccacgccaaggacauccucgagaagacccacaacggcaagcucugcaagcucaacggcauccccccccucgagcucggcgacugcuccaucgccggcuggcuccucggcaaccccgagugcgaccgccuccucuccguccccgagugguccuacaucauggagaaggagaacccccgcgacggccucugcuaccccggcuccuucaacgacuacgaggagcucaagcaccuccucuccuccgucaagcacuucgagaaggucaagauccuccccaaggaccgcuggacccagcacaccaccaccggcggcucccgcgccugcgccgucuccggcaaccccuccuucuuccgcaacauggucuggcucaccaagaagggcuccaacuaccccgucgccaagggcuccuacaacaacaccuccggcgagcagaugcucaucaucuggggcguccaccaccccaacgacgagaccgagcagcgcacccucuaccagaacgucggcaccuacgucuccgucggcacccccacccucaacaagcgcuccacccccgacaucgccacccgccccaaggucaacggccagggcggccgcauggaguucuccuggacccuccucgacaugugggacaccaucaacuucgaguccaccggcaaccucaucgcccccgaguacggcuucaagaucuccaagcgcggcuccuccggcaucaugaagaccgagggcacccucggcaacugcgagaccaagugccagaccccccucggcgccaucaacaccacccuccccuuccacaacguccacccccucaccaucggcgagugccccaaguacgucaaguccgagaagcucguccucgccaccggccuccgcaacgucccccagaucgagucccgcggccucuucggcgccaucgccggcuucaucgagggcggcuggcagggcauggucgacggcugguacggcuaccaccacuccaacgaccagggcuccggcuacgccgccgacaaggaguccacccagaaggccuucgacggcaucaccaacaaggucaacuccgucaucgagaagaugaacacccaguucgaggccgucggcaaggaguucuccaaccucgagcgccgccucgagaaccucaacaagaagauggaggacggcuuccucgacgucuggaccuacaacgccgagcuccucguccucauggagaacgagcgcacccucgacuuccacgacuccaacgucaagaaccucuacgacaagguccgcaugcagcuccgcgacaacgucaaggagcucggcaacggcugcuucgaguucuaccacaagugcgacgacgagugcaugaacuccgucaagaacggcaccuacgacuaccccaaguacgaggaggaguccaagcucaaccgcaacgagaucaagggcgucaagcucuccuccaugggcgucuaccagauccucgccaucuacgccaccgucgccggcucccucucccucgccaucaugauggccggcaucuccuucuggaugugcuccaacggcucccuccagugccgcaucugcaucuga

SEQ ID NO: 97694 - RNA, 1689 nt, Artificial Sequence
  derived and/or modified CDS sequence (opt2) from hemagglutinin__InfluenzaA__ABP49470
auggccaucaucuaccucauccuccucuucaccgccguccgcggcgaccagaucugcaucggcuaccacgccaacaacuccaccgagaaggucgacaccauccucgagcgcaacgucaccgucacccacgccaaggacauccucgagaagacccacaacggcaagcucugcaagcucaacggcauccccccccucgagcucggcgacugcuccaucgccggcuggcuccucggcaaccccgagugcgaccgccuccucuccguccccgagugguccuacaucauggagaaggagaacccccgcgacggccucugcuaccccggcuccuucaacgacuacgaggagcucaagcaccuccucuccuccgucaagcacuucgagaaggucaagauccuccccaaggaccgcuggacccagcacaccaccaccggcggcucccgcgccugcgccgucuccggcaaccccuccuucuuccgcaacauggucuggcucaccaagaagggcuccaacuaccccgucgccaagggcuccuacaacaacaccuccggcgagcagaugcucaucaucuggggcguccaccaccccaacgacgagaccgagcagcgcacccucuaccagaacgucggcaccuacgucuccgucuccaccuccacccucaacaagcgcuccacccccgacaucgccacccgccccaaggucaacggccucggcggccgcauggaguucuccuggacccuccucgacaugugggacaccaucaacuucgaguccaccggcaaccucaucgcccccgaguacggcuucaagaucuccaagcgcggcuccuccggcaucaugaagaccgagggcacccucggcaacugcgagaccaagugccagaccccccucggcgccaucaacaccacccuccccuuccacaacguccacccccucaccaucggcgagugccccaaguacgucaaguccgagaagcucguccucgccaccggccuccgcaacgucccccagaucgagucccgcggccucuucggcgccaucgccggcuucaucgagggcggcuggcagggcauggucgacggcugguacggcuaccaccacuccaacgaccagggcuccggcuacgccgccgacaaggaguccacccagaaggccuucgacggcaucaccaacaaggucaacuccgucaucgagaagaugaacacccaguucgaggccgucggcaaggaguucuccaaccucgagcgccgccucgagaaccucaacaagaagauggaggacggcuuccucgacgucuggaccuacaacgccgagcuccucguccucauggagaacgagcgcacccucgacuuccacgacuccaacgucaagaaccucuacgacaagguccgcaugcagcuccgcgacaacgucaaggagcucggcaacggcugcuucgaguucuaccacaagugcgacgacgagugcaugaacuccgucaagaacggcaccuacgacuaccccaaguacgaggaggaguccaagcucaaccgcaacgagaucaagggcgucaagcucuccuccaugggcgucuaccagauccucgccaucuacgccaccgucgccggcucccucucccucgccaucaugauggccggcaucuccuucuggaugugcuccaacggcucccuccagugccgcaucugcaucuga

SEQ ID NO: 97695 - RNA, 1701 nt, Artificial Sequence
  derived and/or modified CDS sequence (opt2) from hemagglutinin__InfluenzaA__ABP49492
augaagaccaucaucgcccucuccuacaucuucugccucgucuucgcccagggccuccccggcaacgacaacuccaccgccacccucugccucggccaccacgccguccccaacggcacccucgucaagaccaucaccaacgaccagaucgaggucaccaacgccaccgagcucguccaguccuccuccaccggcaagaucugcgacaacccccaccgcauccucgacggcaucaacugcacccucaucgacgcccuccucggcgacccccacugcgacggcuuccagaacgagaagugggaccucuucgucgagcgcuccaaggccuucuccaacugcuaccccuacgacguccccgacuacgccucccuccgcucccucgucgccuccuccggcacccucgaguucaucaacgagggcuucaacuggaccggcgucacccagaacggcggcuccuccuccugcaagcgcggccccgacaacggcuucuucucccgccucaacuggcucuacaaguccggcuccaccuaccccguccagaacgucaccaugcccaacaacgacaacuccgacaagcucuacaucuggggcguccaccaccccuccaccgacaaggagcagaccgaccucuacguccaggccuccggcaaggucaccgucuccaccaagcgcucccagcagaccgucauccccaacgucggcucccgccccuggguccgcggccucuccucccgcgucuccaucuacuggaccaucgucaagcccggcgacauccucgucaucaacuccaacggcaaccucaucgccccccgcggcuacuucaagaugcgcaccggcaaguccuccaucaugcgcuccgacgcccccaucggcaccugcuccuccgagugcaucacccccaacggcuccauccccaacgacaagcccuuccagaacgucaacaagaucaccuacggcgccugccccaaguacgucaagcagaacacccucaagcucgccaccggcaugcgcaacguccccgagaagcagacccgcggcaucuucggcgccaucgccggcuucaucgagaacggcugggagggcaugaucgacggcugguacggcuuccgccaccagaacuccgagggcaccggccaggccgccgaccucaaguccacccaggccgccaucgaccagaucaacggcaagcucaaccgcgucaucgagaagaccaacgagaaguuccaccagaucgagaaggaguucuccgaggucgagggccgcauccaggaccucgagaaguacgucgaggacaccaagaucgaccucugguccuacaacgccgagcuccucgucgcccucgagaaccagcacaccaucgaccucaccgacuccgagaugaacaagcucuucgagaagacccgccgccagcuccgcgagaacgccgaggacaugggcaacggcugcuucaagaucuaccacaagugcgacaacgccugcaucggcuccauccgcaacggcaccuacgaccacgacgucuaccgcgacgaggcccucaacaaccgcuuccagaucaagggcgucgagcucaaguccggcuacaaggacuggauccucuggaucuccuucgccaucuccugcuuccuccucugcgucguccuccucggcuucaucaugugggccugccagaagggcaacauccgcugcaacaucugcaucuga

SEQ ID NO: 97696 - RNA, 1701 nt, Artificial Sequence; identical to SEQ ID NO: 97592
  derived and/or modified CDS sequence (opt2) from hemagglutinin__InfluenzaA__ABP49503

SEQ ID NO: 97697 - RNA, 1701 nt, Artificial Sequence
  derived and/or modified CDS sequence (opt2) from hemagglutinin__InfluenzaA__ABP49514
augaagaccaucaucgcccucuccuacaucuucuaccucgcccucggccaggaccuccccggcaacgacaacuccaccgccacccucugccucggccaccacgccguccccaacggcacccucgucaagaccaucaccaacgaccagaucgaggucaccaacgccaccgagcucguccaguccuccuccaccggcaagaucugcaacaacccccaccgcauccucgacggcaucgacugcacccucaucgacgcccuccucggcgacccccacugcgacgucuuccagaacgagaccugggaccucuucgucgagcgcuccaaggccuucuccaacugcuaccccuacgacguccccgacuacgccucccuccgcucccucgucgccuccuccggcacccucgaguucaucaccgagggcuucaccuggaccggcgucacccagaacggcggcuccaacgccugcaagcgcggccccggcuccggcuucuucucccgccucaacuggcucaccaaguccggcuccaccuaccccguccucaacgucaccaugcccaacaacgacaacuucgacaagcucuacaucuggggcguccaccaccccuccaccaaccaggagcagaccucccucuacguccaggccuccggccgcgucaccgucuccacccgccgcucccagcagaccaucauccccaacaucggcucccgccccuggguccgcggccucuccucccgcaucuccaucuacuggaccaucgucaagcccggcgacguccucgucaucaacuccaacggcaaccucaucgccccccgcggcuacuucaagaugcgcaccggcaaguccuccaucaugcgcuccgacgcccccaucgacaccugcaucuccgagugcaucacccccaacggcuccauccccaacgacaagcccuuccagaacgucaacaagaucaccuacggcgccugccccaaguacgucaagcagaacacccucaagcucgccaccggcaugcgcaacguccccgagaagcagacccgcggccucuucggcgccaucgccggcuucaucgagaacggcugggagggcaugaucgacggcugguacggcuuccgccaccagaacuccgagggcaccggccaggccgccgaccucaaguccacccaggccgccaucgaccagaucaacggcaagcucaaccgcgucaucgagaagaccaacgagaaguuccaccagaucgagaaggaguucuccgaggucgagggccgcauccaggaccucgagaaguacgucgaggacaccaagaucgaccucugguccuacaacgccgagcuccucgucgcccucgagaaccagcacaccaucgaccucaccgacuccgagaugaacaagcucuucgagaagacccgccgccagcuccgcgagaacgccgaggacaugggcaacggcugcuucaagaucuaccacaagugcgacaacgccugcaucgaguccauccgcaacggcaccuacgaccacgacgucuaccgcgacgaggcccucaacaaccgcuuccagaucaagggcgucgagcucaaguccggcuacaaggacuggauccucuggaucuccuucgccaucuccugcuuccuccucugcgucguccuccucggcuucaucaugugggccugccagcgcggcaacauccgcugcaacaucugcaucuga

SEQ ID NO: 97698 - RNA, 1701 nt, Artificial Sequence
  derived and/or modified CDS sequence (opt2) from hemagglutinin__InfluenzaA__ABQ01311
augaaggcccgccuccucauccuccucugcgcccucuccgccaccgacgccgacaccaucugcaucggcuaccacgccaacaacuccaccgacaccgucgacaccguccucgagaagaacgucaccgucacccacuccgucaaccuccucgaggacucccacaacggcaagcucugccgccucaagggcaucgccccccuccagcucggcaagugcaacaucgccggcuggauccucggcaaccccgagugcgagucccuccucuccaaccgcuccugguccuacaucgccgagacccccaacuccgagaacggcaccugcuaccccggcgacuucgccgacuacgaggagcuccgcgagcagcucuccuccgucuccuccuucgagcgcuucgagaucuuccccaaggagcgcuccuggcccaagcacaacaucacccgcggcgucaccgccgccugcucccacgccaagaaguccuccuucuacaagaaccuccucuggcucaccgaggccaacggcuccuaccccaaccucuccaaguccuacgucaacaacaaggagaaggagguccucguccucuggggcguccaccaccccuccaagaucgaggaccagcgcacccucuaccgcaaggagaacgccuacgucuccgucgucuccuccaacuacaaccgccgcuucacccccgagaucgccgagcgccccaagguccgcggccaggccggccgcaugaacuacuacuggacccuccucgagcccggcgacaagaucaucuucgaggccaacggcaaccucaucgcccccugguacgccuucgcccucucccgcggccucggcuccggcaucaucaccuccaacgccuccauggacgagugcgacaccaagugccagaccccccagggcgccaucaacuccucccuccccuuccagaacauccaccccgucaccaucggcgagugccccaaguacguccgcuccaccaagcuccgcauggucaccggccuccgcaacauccccuccauccagucccgcggccucuucggcgccaucgccggcuucaucgagggcggcuggaccggcauggucgacggcugguacggcuaccaccaccagaacgagcagggcuccggcuacgccgccgaccagaaguccacccagaacgccaucaacggcaucaccaacaaggucaacuccgucaucgagaagaugaacacccaguucaccgccgucggcaaggaguucaacaagcucgagaagcgcauggagaaccucaacaagaaggucgacgacggcuuccucgacaucuggaccuacaacgccgagcuccucguccuccucgagaacgagcgcacccucgacuuccacgacuccaacgucaagaaccucuacgagaaggucaagaaccagcuccgcaacaacgccaaggagaucggcaacggcugcuucgaguucuaccacaagugcgacaacgagugcauggaguccgucaagaacggcaccuacgacuaccccaaguacuccgaggaguccaagcucaaccgcgagaagaucgacggcgucaagcucgaguccaugggcgucuaccagauccucgccaucuacuccaccgucgccuccucccucguccuccucgucucccucggcgccaucuccuucuggaugugcuccaacggcucccuccagugccgcaucugcaucuga

SEQ ID NO: 97699 - RNA, 1701 nt, Artificial Sequence
  derived and/or modified CDS sequence (opt2) from hemagglutinin__InfluenzaA__ABQ01322
augaaggccaagcuccucguccuccucugcgcccucuccgccaccgacgccgacaccaucugcaucggcuaccacgccaacaacuccaccgacaccgucgacaccguccucgagaagaacgucaccgucacccacuccgucaaccuccucgaggacucccacaacggcaagcucugccgccucaagggcaucgccccccuccaccucggcaagugcuccaucgccggcuggauccucggcaaccccgagugcgagucccucuucuccaagaaguccugguccuacaucgccgagacccccaacuccgagaacggcaccugcuaccccggcuacuucgccgacuacgaggagcuccgcgagcagcucuccuccgucuccuccuucgagcgcuucgagaucuuccccaaggagcgcuccuggcccaagcacaacgucacccgcggcgucaccgccgccugcucccacaagggcaaguccuccuucuaccgcaaccuccucuggcucaccgagaagaacggcuccuaccccaaccucuccaaguccuacgucaacaacaaggagaaggagguccucguccucuggggcguccaccaccccuccaacaucgaggaccagaagaccaucuaccgcaaggagaacgccuacgucuccgucgucuccuccaacuacaaccgccgcuucacccccgagaucgccaagcgccccaagguccgcggccaggagggccgcaucaacuacuacuggacccuccucgagcccggcgacaccaucaucuucgaggccaacggcaaccucaucgcccccugguacgccuucgcccucucccgcggcuucggcuccggcaucaucaccuccaacgccuccauggacgagugcgacgccaagugccagaccccccagggcgccaucaacuccucccuccccuuccagaacguccaccccgucaccaucggcgagugccccaaguacguccgcuccaccaagcuccgcauggucaccggccuccgcaacauccccuccauccagucccgcggccucuucggcgccaucgccggcuucaucgagggcggcuggaccggcaugaucgacggcugguacggcuaccaccaccagaacgagcagggcuccggcuacgccgccgaccagaaguccacccagaacgccaucaacggcaucaccaacaaggucaacuccgucaucgagaagaugaacacccaguucaccgccgucggcaaggaguucaacaagcucgagaagcgcauggagaaccucaacaagaaggucgacgacggcuuccucgacaucuggaccuacaacgccgagcuccucguccuccucgagaacgagcgcacccucgacuuccacgacuccaacgucaagaaccucuacgagaaggucaagucccagcucaagaacaacgccaaggagaucggcaacggcugcuucgaguucuaccacaagugcaacaacgagugcauggaguccgucaagaacggcaccuacgacuaccccaaguacuccgaggaguccaagcucaaccgcgagaagaucgacggcgucaagcucgaguccaugggcgucuaccagauccucgccaucuacuccaccgucgccuccucccucguccuccucgucucccucggcgccaucuccuucuggaugugcuccaacggcucccuccagugccgcaucugcaucuga

SEQ ID NO: 97700 - RNA, 1701 nt, Artificial Sequence; identical to SEQ ID NO: 96686
  derived and/or modified CDS sequence (opt2) from hemagglutinin__InfluenzaA__ABQ01333

SEQ ID NO: 97701 - RNA, 1701 nt, Artificial Sequence
  derived and/or modified CDS sequence (opt2) from hemagglutinin__InfluenzaA__ABQ01344
augaagaccaucaucgcccucuccuacauccucugccucgucuucgcccagaagcuccccggcaacgacaacuccaccgccacccucugccucggccaccacgccguccccaacggcacccucgucaagaccaucaccaacgaccagaucgaggucaccaacgccaccgagcucguccaguccuccuccaccggcggcaucugcgacuccccccaccagauccucgacggcgagaacugcacccucaucgacgcccuccucggcgacccccacugcgacggcuuccagaacaaggagugggaccucuucgucgagcgcuccaaggccuacuccaacugcuaccccuacgacguccccgacuacgccucccuccgcucccucgucgccuccuccggcacccucgaguucaacaacgaguccuucaacuggaccggcgucgcccagaacggcaccuccuccgccugcaagcgccgcuccaacaaguccuucuucucccgccucaacuggcuccaccagcucaaguacaaguaccccgcccucaacgucaccaugcccaacaacgagaaguucgacaagcucuacaucuggggcguccaccaccccuccaccgacuccgaccagaucucccucuacgcccaggcccccggccgcgucaccgucuccaccaagcgcucccagcagaccgucauccccaacaucggcucccgccccuggguccgcggcgucuccucccgcaucuccaucuacuggaccaucgucaagcccggcgacauccuccucaucaacugcaccggcaaccucaucgccccccgcggcuacuucaagauccgcuccggcaaguccuccaucaugcgcuccgacgccuccaucggcaagugcaacuccgagugcaucacccccaacggcuccauccccaacgacaagcccuuccagaacgucaaccgcaucaccuacggcgccugcccccgcuacgucaagcagaacacccucaagcucgccaccggcaugcgcaacguccccgagaagcagacccgcggcaucuucggcgccaucgccggcuucaucgagaacggcugggagggcauggucgacggcugguacggcuuccgccaccagaacuccgagggcaccggccaggccgccgaccucaaguccacccaggccgccaucaaccagaucaacggcaagcucaaccgccucaucggcaagaccaacgagaaguuccaccagaucgagaaggaguucuccgaggucgagggccgcauccaggaccucgagaaguacgucgaggacaccaagaucgaccucugguccuacaacgccgagcuccucgucgcccucgagaaccagcacaccaucgaccucaccgacuccgagaugaacaagcucuucgagcgcaccaagaagcagcuccgcgagaacgccgaggacaugggcaacggcugcuucaagaucuaccacaagugcgacaacgccugcaucggcuccauccgcaacggcaccuacgaccacgacgucuaccgcgacgaggcccucaacaaccgcuuccagaucaagggcgucgagcucaaguccggcuacaaggacuggauccucuggaucuccuucgccaucuccugcuuccuccucugcgucguccuccucggcuucaucaugugggccugccagaagggcaacauccgcugcaacaucugcaucuga

SEQ ID NO: 97702 - RNA, 1689 nt, Artificial Sequence
  derived and/or modified CDS sequence (opt2) from hemagglutinin__InfluenzaA__ABQ01355
auggccaucaucuaccucauccuccucuucaccgccguccgcggcgaccagaucugcaucggcuaccacgccaacaacuccaccgagaaggucgacaccauccucgagcgcaacgucaccgucacccacgccaaggacauccucgagaagacccacaacggcaagcucugcaagcucaacggcauccccccccucgagcucggcgacugcuccaucgccggcuggcuccucggcaaccccgagugcgaccgccuccuccgcguccccgagugguccuacaucauggagaaggagaacccccgcgacggccucugcuaccccggcuccuucaacgacuacgaggagcucaagcaccuccucuccuccgucaagcacuucgagaagguccgcauccuccccaaggaccgcuggacccagcacaccaccaccggcggcucccgcgccugcgccgucuccggcaaccccuccuucuuccgcaacaugaucuggcucaccaagaagggcuccaacuaccccgucgccaagggcuccuacaacaacaccuccggcgagcagaugcucaucaucuggggcguccaccaccccaucgacgagaccgagcagcgcacccucuaccagaacgucgagaccuacgucuccgucgucaccuccacccucaacaagcgcuccacccccaagaucgccacccgccccaaggucaacggccucggcggccgcauggaguucuccuggacccuccucgacaugugggacaccaucaacuucgaguccaccggcaaccucaucgcccccgaguacggcuucaagaucuccaagcgcggcuccuccggcaucaugaagaccgagggcacccucgagaacugcgagaccaagugccagaccccccucggcgccaucaacaccacccuccccuuccacaacguccacccccucaccaucggcgagugccccaaguacgucaaguccgagaagcucguccucgccaccggccuccgcaacgucccccagaucgagucccgcggccucuucggcgccaucgccggcuucaucgagggcggcuggcagggcauggucgacggcugguacggcuaccaccacuccaacgaccagggcuccggcuacgccgccgacaaggaguccacccagcgcgccuucgacggcaucaccaacaaggucaacuccgucaucgagaagaugaacacccaguucgaggccgucggcaaggaguucuccaaccucgagcgccgccucgagaaccucaacaagaagauggaggacggcuuccucgacgucuggaccuacaacgccgagcuccucguccucauggagaacgagcgcacccucgacuuccacgacuccaacgucaagaaccucuacgacaagguccgcaugcagcuccgcgacaacgucaaggagcucggcaacggcugcuucgaguucuaccacaagugcgacgacgagugcaugaacuccgucaagaacggcaccuacgacuaccccaaguacgaggaggaguccaagcucaaccgcaacgagaucaagggcgucaagcucuccuccaugggcgucuaccagauccucgccaucuacgccaccgucgccggcucccucucccucgccaucaugauggccggcaucuccuucuggaugugcuccaacggcucccuccagugccgcaucugcaucuga

SEQ ID NO: 97703 - RNA, 1701 nt, Artificial Sequence
  derived and/or modified CDS sequence (opt2) from hemagglutinin__InfluenzaA__ABQ01366
augaagaccaucaucgcccucuccuacaucuucugccucgucuucgcccaggaccuccccggcaacgacaacuccaccgccacccucugccucggccaccacgccguccccaacggcacccucgucaagaccaucaccaacgaccagaucgaggucaccaacgccaccgagcucguccaguccuccuccaccggcaagaucugcgacaacccccaccgcauccucgacggcaucaacugcacccucaucgacgcccuccucggcgacccccacugcgacggcuuccagaacgagaagugggaccucuucgucgagcgcuccaaggccuucuccaacugcuaccccuacgacguccccgacuacgccucccuccgcucccucgucgccuccuccggcacccucgaguucaucaacgagggcuucaacuggaccggcgucacccagaacggcggcuccuccgccugcaagcgcggccccgacaacggcuucuucucccgccucaacuggcucuacaaguccggcuccaccuaccccguccagaacgucaccaugaccaacaacgacaacuccgacaagcucuacaucuggggcguccaccaccccuccaccgacaaggagcagaccgaccucuacguccaggccuccggcaaggucaccgucuccaccaagcgcucccagcagaccaucauccccaacgucggcucccgccccuggguccgcggccucuccucccgcgucuccaucuacuggaccaucgucaagcccggcgacauccucgucaucaacuccaacggcaaccucaucgccccccgcggcuacuucaagaugcgcaccggcaaguccuccaucaugcgcuccgacgcccccaucggcaccugcuccuccgagugcaucacccccaacggcuccauccccaacgacaagcccuuccagaacgucaacaagaucaccuacggcgccugccccaaguacgucaagcagaacacccucaagcucgccaccggcaugcgcaacguccccgagaagcagacccgcggcaucuucggcgccaucgccggcuucaucgagaacggcugggagggcaugaucgacggcugguacggcuuccgccaccagaacuccgagggcaccggccaggccgccgaccucaaguccacccaggccgccaucgaccagaucaacggcaagcucaaccgcgucaucgagaagaccaacgagaaguuccaccagaucgagaaggaguucuccgaggucgagggccgcauccaggaccucgagaaguacgucgaggacaccaagaucgaccucugguccuacaacgccgagcuccucgucgcccucgagaaccagcacaccaucgaccucaccgacuccgagaugaacaagcucuucgagaagacccgccgccagcuccgcgagaacgccgaggacaugggcaacggcugcuucaagaucuaccacaagugcgacaacgccugcaucggcuccauccgcaacggcaccuacgaccacgacgucuaccgcgacgaggcccucaacaaccgcuuccagaucaagggcgucgagcucaaguccggcuacaaggacuggauccucuggaucuccuucgccaucuccugcuuccuccucugcgucguccuccucggcuucaucaugugggccugccagaagggcaacauccgcugcaacaucugcaucuga

SEQ ID NO: 97704 - RNA, 1701 nt, Artificial Sequence; identical to SEQ ID NO: 97469
  derived and/or modified CDS sequence (opt2) from hemagglutinin__InfluenzaA__ABQ44383

SEQ ID NO: 97705 - RNA, 1701 nt, Artificial Sequence; identical to SEQ ID NO: 96669
  derived and/or modified CDS sequence (opt2) from hemagglutinin__InfluenzaA__ABQ44405

SEQ ID NO: 97706 - RNA, 1701 nt, Artificial Sequence
  derived and/or modified CDS sequence (opt2) from hemagglutinin__InfluenzaA__ABQ44416
augaaggccaagcuccucguccuccucugcgccuucaccgccaccgacgccgacaccaucugcaucggcuaccacgccaacaacuccaccgacaccgucgacaccguccucgagaagaacgucaccgucacccacuccgucaaccuccucgaggacucccacaacggcaagcucugccgccucaagggcaucgccccccuccagcucggcaacugcuccaucgccggcuggauccucggcaaccccgagugcgagucccucuucuccaagaaguccugguccuacaucgccgagacccccaacuccgagaacggcaccugcuaccccggcuacuucgccgacuacgaggagcuccgcgagcagcucuccuccgucuccuccuucgagcgcuucgagaucuuccccaaggaguccuccuggcccaaccacaccgucaccaagggcgucaccgccuccugcucccacaagggcaaguccuccuucuaccgcaaccuccucuggcucaccgagaagaacggcuccuaccccaaccucuccaaguccuacgucaacaacaaggagaaggagguccucguccucuggggcguccaccaccccuccaacaucggcgaccagcgcgccaucuaccacaccgagaacgccuacgucuccgucgucuccucccacuacaaccgccgcuucacccccgagaucgccaagcgccccaagguccgcgaccaggagggccgcaucaacuacuacuggacccuccucgagcccgaggacaccaucaucuucgaggccaacggcaaccucaucgcccccugguacgccuucgcccucucccgcggcuucggcuccggcaucaucaccuccaacgccuccauggacgagugcgacgccaagugccagaccccccagggcgccaucaacuccucccuccccuuccagaacguccaccccgucaccaucggcgagugccccaaguacguccgcuccaccaagcuccgcauggucaccggccuccgcaacauccccuccauccagucccgcggccucuucggcgccaucgccggcuucaucgagggcggcuggaccggcaugaucgacggcugguacggcuaccaccaccagaacgagcagggcuccggcuacgccgccgaccagaaguccacccagaacgccaucaacggcaucaccaacaaggucaacuccgucaucgagaagaugaacacccaguucaccgccgucggcaaggaguucaacaagcucgagcgccgcauggagaaccucaacaagaaggucgacgacggcuuccucgacaucuggaccuacaacgccgagcuccucguccuccucgagaacgagcgcacccucgacuuccacgacuccaacgucaagaaccucuacgagaaggucaagucccagcucaagaacaacgccaaggagaucggcaacggcugcuucgaguucuaccacaagugcaacaacgagugcauggaguccgucaagaacggcaccuacgacuaccccaaguacuccgaggaguccaagcucaaccgcgagaagaucgacggcgucaagcucgaguccaugggcgucuaccagauccucgccaucuacuccaccgucgccuccucccucguccuccucgucucccucggcgccaucuccuucuggaugugcuccaacggcucccuccagugccgcaucugcaucuga

SEQ ID NO: 97707 - RNA, 1701 nt, Artificial Sequence; identical to SEQ ID NO: 96292
  derived and/or modified CDS sequence (opt2) from hemagglutinin__InfluenzaA__ABQ44427

SEQ ID NO: 97708 - RNA, 1689 nt, Artificial Sequence
  derived and/or modified CDS sequence (opt2) from hemagglutinin__InfluenzaA__ABQ44438
auggccaucaucuacuucauccuccucuucaccgccguccgcggcgaccagaucugcaucggcuaccacgccaacaacuccaccgagaaggucgacaccauccucgagcgcaacgucaccgucacccacgccaaggacauccucgagaagacccacaacggcaagcucugcaagcucaacggcauccccccccucgagcucggcgacugcuccaucaccggcuggcuccucggcaaccccgagugcgaccgccuccuccgcguccccgagugguccuacaucauggagaaggagaacccccgcuacucccucugcuaccccggcuccuucaacgacuacgaggagcucaagcaccuccucuccuccgucaagcacuucgagaagguccgcauccuccccaaggacggcuggacccagcacaccaccuccggcggcuccaaggccugcgccgucuccggcaaguccuccuucuuccgcaacauggucuggcucaccaagaagggccccaacuaccccgucgccaagcgcuccuacaacaacaccuccggcgagcagaugcucaucaucuggggcguccaccaccccaacgacgaggccgagcaguccgcccucuaccagaaggucggcaccuacgucuccgccuccaccuccacccucaacaagcgcuccacccccgagaucgccgcccgccccgaggucaacggccucggcucccgcauggaguucuccuggacccuccucgacgucugggacaccaucaacuucgaguccaccggcaaccucgucgcccccgaguacggcuucaagaucuccaagcgcggcuccuccggcaucaugaagaccgagggcacccucggcaacugcgagaccaagugccagaccccccucggcgccaucaacaccacccuccccuuccacaacguccacccccucaccaucggcgagugccccaaguacgucaaguccgagaagcucguccucgccaccggccuccgcaacgucccccagaucgagucccgcggccucuucggcgccaucgccggcuucaucgagggcggcuggcagggcauggucgacggcugguacggcuaccaccacuccaacgaccagggcuccggcuacgccgccgacaaggaguccacccagaaggccuucgaccgcaucaccaacaaggucaacuccgucaucgagaagaugaacacccaguucgaggccgucggcaaggaguucuccaaccucgagaagcgccucgagaaccucaacaagaagauggaggacggcuuccucgacgucuggaccuacaacgccgagcuccucguccucauggagaacgagcgcacccucgacuuccacgacuccaacgucaagaaccucuacaacaagguccgcaugcagcuccgcgacaacgucaaggagcucggcaacggcugcuucgaguucuaccacaagugcgacgacgagugcauguccuccgucaagaacggcaccuacgacuaccccaaguacgaggaggaguccaagcucaagcgcaacgagaucaagggcgucaagcucuccuccaugggcgucuaccagauccucgccaucuacgccaccgucgccggcucccucucccucgccaucaugaucgccggcaucucccucuggaugugcuccaacggcucccuccagugccgcaucugcaucuga

SEQ ID NO: 97709 - RNA, 1689 nt, Artificial Sequence
  derived and/or modified CDS sequence (opt2) from hemagglutinin__InfluenzaA__ABQ44460
auggccaucaucuaccucauccuccucuucaccgccguccgcggcgaccagaucugcaucggcuaccacgccaacaacuccaccgagaaggucgacaccauccucgagcgcaacgucaccgucacccacgccaaggacauccucgagaagacccacaacggcaagcucugcaagcucaacggcauccccccccucgagcucggcgacugcuccaucgccggcuggcuccucggcaaccccgagugcgaccgccuccucuccguccccgagugguccuacaucauggagaaggagaacccccgcgacggccucugcuaccccggcuccuucaacgacuacgaggagcucaagcaccuccucuccuccgucaagcacuucgagaaggucaagauccuccccaaggaccgcuggacccagcacaccaccaccggcggcucccgcgccugcgccgucuccggcaaccccuccuucuuccgcaacaugaucuggcucaccaagaagggcuccaacuaccccgucgccaagggcuccuacaacaacaccuccggcgagcagaugcucaucaucuggggcguccaccaccccaacgacgagaccgagcagcgcacccucuaccagaacgucggcaccuacgucuccgucggcaccuccacccucaacaagcgcuccacccccgacaucgccacccgccccaaggucaacggccucggcucccgcauggaguucuccuggacccuccucgacaugugggacaccaucaacuucgaguccaccggcaaccucaucgcccccgaguacggcuucaagaucuccaagcgcggcuccuccggcaucaugaagaccgagggcacccucggcaacugcgagaccaagugccagaccccccucggcgccaucaacaccacccuccccuuccacaacguccacccccucaccaucggcgagugccccaaguacgucaaguccgagaagcucguccucgccaccggccuccgcaacgucccccagaucgagucccgcggccucuucggcgccaucgccggcuucaucgagggcggcuggcagggcauggucgacggcugguacggcuaccaccacuccaacgaccagggcuccggcuacgccgccgacaaggaguccacccagaaggccuucgacggcaucaccaacaaggucaacuccgucaucgagaagaugaacacccaguucgaggccgucggcaaggaguucuccaaccucgagcgccgccucgagaaccucaacaagaagauggaggacggcuuccucgacgucuggaccuacaacgccgagcuccucguccucauggagaacgagcgcacccucgacuuccacgacuccaacgucaagaaccucuacgacaagguccgcaugcagcuccgcgacaacgucaaggagcucggcaacggcugcuucgaguucuaccacaagugcgacgacgagugcaugaacuccgucaagaacggcaccuacgacuaccccaaguacgaggaggaguccaagcucaaccgcaacgagaucaagggcgucaagcucuccuccaugggcgucuaccagauccucgccaucuacgccaccgucgccggcucccucucccucgccaucaugauggccggcaucuccuucuggaugugcuccaacggcucccuccagugccgcaucugcaucuga

SEQ ID NO: 97710 - RNA, 1701 nt, Artificial Sequence
  derived and/or modified CDS sequence (opt2) from hemagglutinin__InfluenzaA__ABQ44471
augaaggcccgccuccucauccuccucugcgcccucuccgccaccgacgccgacaccaucugcaucggcuaccacgccaacaacuccaccgacaccgucgacaccguccucgagaagaacgucaccgucacccacuccgucaaccuccucgaggacucccacaacggcaagcucugccgccucaagggcaucgccccccuccagcucggcaagugcaacaucgccggcuggauccucggcaaccccgagugcgagucccuccucuccaaccgcuccugguccuacaucgccgagacccccaacuccgagaacggcaccugcuaccccggcgacuucgccgacuacgaggagcuccgcgagcagcucuccuccgucuccuccuucgagcgcuucgagaucuuccccaaggagcgcuccuggcccaagcacaacaucacccgcggcgucaccgccgccugcucccacgccaagaaguccuccuucuacaagaaccuccucuggcucaccgaggccaacggcuccuaccccaaccucuccaaguccuacgucaacaacaaggagaaggagguccucguccucuggggcguccaccaccccuccaacaucgaggaccagcgcacccucuaccgcaaggagaacgccuacgucuccgucgucuccuccaacuacaaccgccgcuucacccccgagaucgccgagcgccccaagguccgcggccaggccggccgcaugaacuacuacuggacccuccucgagcccggcgacaagaucaucuucgaggccaacggcaaccucaucgcccccugguacgccuucgcccucucccgcggccucggcuccggcaucaucaccuccaacgccuccauggacgagugcgacaccaagugccagaccccccagggcgccaucaacaacucccuccccuuccagaacauccaccccgucaccaucggcgagugccccaaguacguccgcuccaccaagcuccgcauggucaccggccuccgcaacauccccuccauccagucccgcggccucuucggcgccaucgccggcuucaucgagggcggcuggaccggcauggucgacggcugguacggcuaccaccaccagaacgagcagggcuccggcuacgccgccgaccagaaguccacccagaacgccaucaacggcaucaccaacaaggucaacuccgucaucgagaagaugaacacccaguucaccgccgucggcaaggaguucaacaagcucgagaagcgcauggagaaccucaacaagaaggucgacgacggcuuccucgacaucuggaccuacaacgccgagcuccucguccuccucgagaacgagcgcacccucgacuuccacgacuccaacgucaagaaccucuacgagaaggucaagaaccagcuccgcaacaacgccaaggagaucggcaacggcugcuucgaguucuaccacaagugcgacaacgagugcauggaguccgucaagaacggcaccuacgacuaccccaaguacuccgaggaguccaagcucaaccgcgagaagaucgacggcgucaagcucgaguccaugggcgucuaccagauccucgccaucuacuccaccgucgccuccucccucguccuccucgucucccucggcgccaucuccuucuggaugugcuccaacggcucccuccagugccgcaucugcaucuga

SEQ ID NO: 97711 - RNA, 1701 nt, Artificial Sequence
  derived and/or modified CDS sequence (opt2) from hemagglutinin__InfluenzaA__ABR15797
augaagaccaucaucgcccucuccuacaucuucugccucgcccucggccaggaccuccccggcaacgacaacuccaccgccacccucugccucggccaccacgccguccccaacggcacccucgucaagaccaucaccaacgaccagaucgaggucaccaacgccaccgagcucguccaguccuccuccaccggcaagaucugcaacaacccccaccgcauccucgacggcaucgacugcacccucaucgacgcccuccucggcgacccccacugcgacgucuuccagaacgagaccugggaccucuucgucgagcgcuccaaggccuucuccaacugcuaccccuacgacguccccgacuacgccucccuccgcucccucgucgccuccuccggcacccucgaguucaucaccgagggcuucaccuggaccggcgucacccagaacggcggcuccaacgccugcaagcgcggccccggcuccggcuucuucucccgccucaacuggcucaccaaguccggcuccaccuaccccguccucaacgucaccaugcccaacaacgacaacuucgacaagcucuacaucuggggcguccaccaccccuccaccaaccaggagcagaccucccucuacguccaggccuccggccgcgucaccgucuccacccgccgcucccagcagaccaucauccccaacaucggcucccgccccuggguccgcggccucuccucccgcaucuccaucuacuggaccaucgucaagcccggcgacguccucgucaucaacuccaacggcaaccucaucgccccccgcggcuacuucaagaugcgcaccggcaaguccuccaucaugcgcuccgacgcccccaucgacaccugcaucuccgagugcaucacccccaacggcuccauccccaacgacaagcccuuccagaacgucaacaagaucaccuacggcgccugccccaaguacgucaagcagaacacccucaagcucgccaccggcaugcgcaacguccccgagaagcagacccgcggccucuucggcgccaucgccggcuucaucgagaacggcugggagggcaugaucgacggcugguacggcuuccgccaccagaacuccgagggcaccggccaggccgccgaccucaaguccacccaggccgccaucgaccagaucaacggcaagcucaaccgcgucaucgagaagaccaacgagaaguuccaccagaucgagaaggaguucuccgaggucgagggccgcauccaggaccucgagaaguacgucgaggacaccaagaucgaccucugguccuacaacgccgagcuccucgucgcccucgagaaccagcacaccaucgaccucaccgacuccgagaugaacaagcucuucgagaagacccgccgccagcuccgcgagaacgccgaggacaugggcaacggcugcuucaagaucuaccacaagugcgacaacgccugcaucgaguccauccgcaacggcaccuacgaccacgacgucuaccgcgacgaggcccucaacaaccgcuuccagaucaagggcgucgagcucaaguccggcuacaaggacuggauccucuggaucuccuucgccaucuccugcuuccuccucugcgucguccuccucggcuucaucaugugggccugccagcgcggcaacauccgcugcaacaucugcaucuga

SEQ ID NO: 97712 - RNA, 1701 nt, Artificial Sequence
  derived and/or modified CDS sequence (opt2) from hemagglutinin__InfluenzaA__ABR15808
augaaggcccgccuccucauccuccucugcgcccucuccgccaccgacgccgacaccaucugcaucggcuaccacgccaacaacuccaccgacaccgucgacaccguccucgagaagaacgucaccgucacccacuccgucaaccuccucgaggacucccacaacggcaagcucugccgccucaagggcaucgccccccuccagcucggcaagugcaacaucgccggcuggauccucggcaaccccgagugcgagucccuccucuccaaccgcuccugguccuacaucgccgagacccccaacuccgagaacggcaccugcuaccccggcgacuucgccgacuacgaggagcuccgcgagcagcucuccuccgucuccuccuucgagcgcuucgagaucuuccccaaggagcgcuccuggcccaagcacaacaucacccgcggcgucaccgccgccugcucccacgccaagaaguccuccuucuacaagaaccuccucuggcucaccgaggccaacggcuccuaccccaaccucuccaaguccuacgucaacaacaaggagaaggagguccucguccucuggggcguccaccaccccuccaacaucgaggaccagcgcacccucuaccgcaaggagaacgccuacgucuccgucgucuccuccaacuacaaccgccgcuucacccccgagaucgccgagcgccccaagguccgcggccaggccggccgcaugaacuacuacuggacccuccucgagcccggcgacaagaucaucuucgaggccaacggcaaccucaucgcccccugguacgccuucgcccucucccgcggccucggcuccggcaucaucaccuccaacgccuccauggacgagugcgacaccaagugccagaccccccagggcgccaucaacuccucccuccccuuccagaacauccaccccgucaccaucggcgagugccccaaguacguccgcuccaccaagcuccgcauggucaccggccuccgcaacauccccuccauccagucccgcggccucuucggcgccaucgccggcuucaucgagggcggcuggaccggcauggucgacggcugguacggcuaccaccaccagaacgagcagggcuccggcuacgccgccgaccagaaguccacccagaacgccaucaacggcaucaccaacaaggucaacuccgucaucgagaagaugaacacccaguucaccgccgucggcaaggaguucaacaagcucgagaagcgcauggagaaccucaacaagaaggucgacgacggcuuccucgacaucuggaccuacaacgccgagcuccucguccuccucgagaacgagcgcacccucgacuuccacgacuccaacgucaagaaccucuacgagaaggucaagaaccagcuccgcaacaacgccaaggagaucggcaacggcugcuucgaguucuaccacaagugcgacaacgagugcauggaguccgucaagaacggcaccuacgacuaccccaaguacuccgaggaguccaagcucaaccgcgagaagaucgacggcgucaagcucgaguccaugggcgucuaccagauccucgccaucuacuccaccgucgccuccucccucguccuccucgucucccucggcgccaucuccuucuggaugugcuccaacggcucccuccagugccgcaucugcaucuga

SEQ ID NO: 97713 - RNA, 1698 nt, Artificial Sequence; identical to SEQ ID NO: 96778
  derived and/or modified CDS sequence (opt2) from hemagglutinin__InfluenzaA__ABR15885

SEQ ID NO: 97714 - RNA, 1698 nt, Artificial Sequence
  derived and/or modified CDS sequence (opt2) from hemagglutinin__InfluenzaA__ABR15896
augaaggccaagcuccucguccuccucugcaccuucaccgccaccuacgccgacaccaucugcaucggcuaccacgccaacaacuccaccgacaccgucgacaccguccucgagaagaacgucaccgucacccacuccgucaaccuccucgaggacucccacaacggcaagcucugccuccucaagggcaucgccccccuccagcucggcaacugcuccgucgccggcuggauccucggcaaccccgagugcgagcuccucaucuccaaggaguccugguccuacaucgucgaggcccccaaccccgagaacggcaccugcuaccccggcuacuucgccgacuacgaggagcuccgcgagcagcucuccuccgucuccuccuucgagcgcuucgagaucuuccccaaggaguccuccuggcccaaccacaccgucaccggcgucuccgccuccugcucccacaacggcaaguccuccuucuaccgcaaccuccucuggcucaccggcaagaacggccucuaccccaaccucuccauguccuacgucaacaacaaggagaaggagguccucguccucuggggcguccaccacccccccaacaucggcgaccagcgcgcccucuaccacaccgagaacgccuacgucuccgucgucuccucccacuacucccgccgcuucacccccgagaucgccaagcgccccaagguccgcgaccaggagggccgcaucaacuacuacuggacccuccucgagcccggcgacaccaucaucuucgaggccaacggcaaccucaucgcccccugguacgccuucgcccucucccgcggcuucggcuccggcaucaucaccuccaacgcccccauggacgagugcgacgccaagugccagaccccccagggcgccaucaacuccucccuccccuuccagaacguccaccccgucaccaucggcgagugccccaaguacguccgcuccgccaagcuccgcauggucaccggccuccgcaacauccccuccauccagucccgcggccucuucggcgccaucgccggcuucaucgagggcggcuggaccggcauggucgacggcugguacggcuaccaccaccagaacgagcagggcuccggcuacgccgccgaccagaaguccacccagaacgccaucaacggcaucaccaacaaggucaacuccgucaucgagaagaugaacacccaguucaccgccgucggcaaggaguucaacaagcucgagcgccgcauggagaaccucaacaagaaggucgacgacggcuuccucgacaucuggaccuacaacgccgagcuccucguccuccucgagaacgagcgcacccucgacuuccacgacuccaacgucaagaaccucuacgagaaggucaagucccagcucaagaacaacgccaaggagaucggcaacggcugcuucgaguucuaccacaagugcaacaacgagugcauggaguccgucaagaacggcaccuacgacuaccccaaguacuccgaggaguccaagcucaaccgcgagaagaucgacggcgucaagcucgaguccaugggcgucuaccagauccucgccaucuacuccaccgucgccuccucccucguccuccucgucucccucggcgccaucuccuucuggaugugcuccaacggcucccuccagugccgcaucugcaucuga

SEQ ID NO: 97715 - RNA, 1698 nt, Artificial Sequence; identical to SEQ ID NO: 96777
  derived and/or modified CDS sequence (opt2) from hemagglutinin__InfluenzaA__ABR15907

SEQ ID NO: 97716 - RNA, 1698 nt, Artificial Sequence; identical to SEQ ID NO: 96778
  derived and/or modified CDS sequence (opt2) from hemagglutinin__InfluenzaA__ABR15918

SEQ ID NO: 97717 - RNA, 1701 nt, Artificial Sequence
  derived and/or modified CDS sequence (opt2) from hemagglutinin__InfluenzaA__ABR15929
augaagaccaucaucgcccucuccuacauccucugccucgucuucgcccagaagcuccccggcaacgacaacuccaccgccacccucugccucggccaccacgccguccccaacggcacccucgucaagaccaucaccaacgaccagaucgaggucaccaacgccaccgagcucguccaguccuccuccaccggccgcaucugcgacuccccccaccagauccucgacggcgagaacugcacccucaucgacgcccuccucggcgacccccacugcgacggcuuccagaacaaggagugggaccucuucgucgagcgcuccaaggccuacuccaacugcuaccccuacgacguccccgacuacgucucccuccgcucccucgucgccuccuccggcacccucgaguucaacaacgaguccuucaacuggaccggcgucgcccagaacggcaccuccuccgccugcaagcgccgcuccgacaaguccuucuucucccgccucaacuggcuccaccagcucaaguacaaguaccccgcccucaacgucaccaugcccaacaacgagaaguucgacaagcucuacaucuggggcguccaccaccccggcaccgacuccgaccagaucucccucuacgcccaggccuccggccgcgucaccgucuccaccaagcgcucccagcagaccgucauccccaacaucggcucccgccccuggguccgcggcaucuccucccgcaucuccaucuacuggaccaucgucaagcccggcgacauccuccucaucaacuccaccggcaaccucaucgccccccgcggcuacuucaagauccgcuccggcaaguccuccaucaugcgcuccgacgcccccaucggcaagugcaacuccgagugcaucacccccaacggcuccauccccaacgacaagcccuuccagaacgucaaccgcaucaccuacggccccugcccccgcuacgucaagcagaacacccucaagcucgccaccggcaugcgcaacguccccgagaagcagacccgcggcaucuucggcgccaucgccggcuucaucgagaacggcugggagggcaugauggacggcugguacggcuuccgccaccagaacuccgagggcaccggccaggccgccgaccucaaguccacccaggccgccaucaaccagaucaacggcaagcucaaccgccucaucgagaagaccaacgagaaguuccaccagaucgagaaggaguucuccgaggucgagggccgcauccaggaccucgagaaguacgucgaggacaccaagaucgaccucugguccuacaacgccgagcuccucgucgcccucgagaaccagcacaccaucgaccucaccgacuccgagaugaacaagcucuucgagcgcaccaagaagcagcuccgcgagaacgccgaggacaugggcaacggcugcuucaagaucuaccacaagugcaacaacgccugcaucggcuccauccgcaacggcaccuacgaccacgacgucuaccgcgacgaggcccucaacaaccgcuuccagaucaagggcgucgagcucaaguccggcuacaaggacuggauccucuggaucuccuucgccaucuccugcuuccuccucugcaucguccuccucggcuucaucaugugggccugccagaagggcaacauccgcugcaacaucugcaucuga

SEQ ID NO: 97718 - RNA, 1701 nt, Artificial Sequence
  derived and/or modified CDS sequence (opt2) from hemagglutinin__InfluenzaA__ABR15940
augaagaccaucaucgcccucuccuacauccucugccucgucuucgcccagaagcuccccggcaacgacaacuccaccgccacccucugccucggccaccacgccguccccaacggcacccucgucaagaccaucaccaacgaccagaucgaggucaccaacgccaccgagcucguccaguccuccuccaccggccgcaucugcgacuccccccaccagauccucgacggcgagaacugcacccucaucgacgcccuccucggcgacccccacugcgacggcuuccagaacaaggagugggaccucuucgucgagcgcuccaaggccuacuccaacugcuaccccuacgacguccccgacuacgucucccuccgcucccucgucgccuccuccggcacccucgaguucaacaacgaguccuucaacuggaccggcgucgcccagaacggcaccuccuccgccugcaagcgccgcuccgacaaguccuucuucucccgccucaacuggcuccaccagcucaaguacaaguaccccgcccucaacgucaccaugcccaacaacgagaaguucgacaagcucuacaucuggggcguccaccaccccggcaccgacuccgaccagaucucccucuacgcccaggccuccggccgcgucaccgucuccaccaagcgcucccagcagaccgucauccccaacaucggcucccgccccuggguccgcggcgucuccucccgcaucuccaucuacuggaccaucgucaagcccggcgacauccuccucaucaacuccaccggcaaccucaucgccccccgcggcuacuucaagauccgcuccggcaaguccuccaucaugcgcuccgacgcccccaucggcaagugcaacuccgagugcaucacccccaacggcuccaucuccaacgacaagcccuuccagaacgucaaccgcaucaccuacggcgccugcccccgcuacgucaagcagaacacccucaagcucgccaccggcaugcgcaacguccccgagaagcagacccgcggcaucuucggcgccaucgccggcuucaucgagaacggcugggagggcaugauggacggcugguacggcuuccgccaccagaacuccgagggcaccggccaggccgccgaccucaaguccacccaggccgccaucaaccagaucaacggcaagcucaaccgccucaucgagaagaccaacgagaaguuccaccagaucgagaaggaguucuccgaggucgagggccgcauccaggaccucgagaaguacgucgaggacaccaagaucgaccucugguccuacaacgccgagcuccucgucgcccucgagaaccagcacaccaucgaccucaccgacuccgagaugaacaagcucuucgagcgcaccaagaagcagcuccgcgagaacgccgaggacaugggcaacggcugcuucaagaucuaccacaagugcgacaacgccugcaucggcuccauccgcaacggcaccuacgaccacgacgucuaccgcgacgaggcccucaacaaccgcuuccagaucaagggcgucgagcucaaguccggcuacaaggacuggguccucuggaucuccuucgccaucuccugcuuccuccucugcaucguccuccucggcuucaucaugugggccugccagaagggcaacauccgcugcaacaucugcaucuga

SEQ ID NO: 97719 - RNA, 1701 nt, Artificial Sequence; identical to SEQ ID NO: 96598
  derived and/or modified CDS sequence (opt2) from hemagglutinin__InfluenzaA__ABR15951

SEQ ID NO: 97720 - RNA, 1701 nt, Artificial Sequence
  derived and/or modified CDS sequence (opt2) from hemagglutinin__InfluenzaA__ABR15962
augaagaccaucaucgcccucuccuacauccucugccucgucuucgcccagaagcuccccggcaacgacaacuccaccgccacccucugccucggccaccacgccguccccaacggcacccucgucaagaccaucaccaacgaccagaucgaggucaccaacgccaccgagcucguccaguccuccuccaccggccgcaucugcgacuccccccaccagauccucgacggcgagaacugcacccucaucgacgcccuccucggcgacccccacugcgacggcuuccagaacaaggagugggaccucuucgucgagcgcucccgcgccuacuccaacugcuaccccuacgacguccccgacuacgucucccuccgcucccucgucgccuccuccggcacccucgaguucaacaacgaguccuucaacuggaccggcgucgcccagaacggcaccuccuccgccugcaagcgccgcuccgacaaguccuucuucucccgccucaacuggcuccaccagcucaaguacaaguaccccgcccucaacgucaccaugcccaacaacgagaaguucgacaagcucuacaucuggggcguccaccaccccggcaccgacuccgaccagaucucccucuacgcccaggccuccggccgcgucaccgucuccaccaagcgcucccagcagaccgucauccccaacaucggcucccgccccuggguccgcggcgucuccuccaucaucuccaucuacuggaccaucgucaagcccggcgacauccuccucaucaacuccaccggcaaccucaucgccccccgcggcuacuucaagauccgcuccggcaaguccuccaucaugcgcuccgacgcccccaucggcaagugcaacuccgagugcaucacccccaacggcuccauccccaacgacaagcccuuccagaacgucaaccgcaucaccuacggccccugcccccgcuacgucaagcagaacacccucaagcucgccaccggcaugcgcaacguccccgagaagcagacccgcggcaucuucggcgccaucgccggcuucaucgagaacggcugggagggcaugauggacggcugguacggcuuccgccaccagaacuccgagggcaccggccaggccgccgaccucaaguccacccaggccgccaucaaccagaucaacggcaagcucaaccgccucaucgagaagaccaacgagaaguuccaccagaucgagaaggaguucuccgaggucgagggccgcauccaggaccucgagaaguacgucgaggacaccaagaucgaccucugguccuacaacgccgagcuccucgucgcccucgagaaccagcacaccaucgaccucaccgacuccgagaugaacaagcucuucgagcgcaccaagaagcagcuccgcgagaacgccgaggacaugggcaacggcugcuucaagaucuaccacaagugcgacaacgccugcaucggcuccauccgcaacggcaccuacgaccacgacgucuaccgcgacgaggcccucaacaaccgcuuccagaucaagggcgucgagcucaaguccggcuacaaggacuggauccucuggaucuccuucgccaucuccugcuuccuccucugcaucguccuccucggcuucaucaugugggccugccagaagggcaacauccgcugcaacaucugcaucuga

SEQ ID NO: 97721 - RNA, 1701 nt, Artificial Sequence
  derived and/or modified CDS sequence (opt2) from hemagglutinin__InfluenzaA__ABR22241
augaagaccaucaucgcccucuccuacauccucugccucgccuucgcccagaagcuccccggcaacgacaacuccaccgccacccucugccucggccaccacgccguccccaacggcacccucgucaagaccaucaccaacgaccagaucgaggucaccaacgccaccgagcucguccaguccuccuccaccggccgcaucugcgacuccccccaccagauccucgacggcgagaacugcacccucaucgacgcccuccucggcgacccccacugcgacggcuuccagaacaaggagugggaccucuucgucgagcgcuccaaggccuacuccaacugcuaccccuacgacguccccgacuacgccucccuccgcucccucgucgccuccuccggcacccucgaguucaacaacgaguccuucaacuggaccggcgucgcccagaacggcaccuccuccgccugcaagcgccgcuccaucaaguccuucuucucccgccucaacuggcuccaccagcucgaguaccgcuaccccgcccucaacgucaccaugcccaacaacgacaaguucgacaagcucuacaucuggggcguccaccaccccuccaccgacuccgaccagaucuccgucuacgcccaggccuccggccgcgucaccgucuccaccaagcgcucccagcagaccgucauccccaacaucggcucccgccccuggguccgcggcaucuccucccgcaucuccaucuacuggaccaucgucaagcccggcgacauccuccucaucaacuccaccggcaaccucaucgccccccgcggcuacuucaagauccgcuccggcaaguccuccaucaugcgcuccgacgcccccaucggcaagugcaacuccgagugcaucacccccaacggcuccauccccaacgacaagcccuuccagaacgucaaccgcaucaccuacggcgccugcccccgcuacgucaagcagaacacccucaagcucgccaccggcaugcgcaacguccccgagaagcagacccgcggcaucuucggcgccaucgccggcuucaucgagaacggcugggagggcaugauggacggcugguacggcuuccgccaccagaacuccgagggcaccggccaggccgccgaccucaaguccacccaggccgccaucaaccagaucaacggcaagcucaacaagcucaucgagaagaccaacgagaaguuccaccagaucgagaaggaguucuccgaggucgagggccgcauccaggaccucgagaaguacgucgaggacaccaagaucgaccucugguccuacaacgccgagcuccucgucgcccucgagaaccagaacaccaucgaccucaccgacuccgagaugaacaagcucuucgagcgcacccgcaagcagcuccgcgagaacgccgaggacaugggcaacggcugcuucaagaucuaccacaagugcgacaacgccugcaucggcuccauccgcaacggcaccuacgaccacgacgucuaccgcgacgaggcccucaacaaccgcuuccagaucaagggcgucgagcucaaguccggcuacaaggacuggauccucuggaucuccuucgccaucuccugcuuccuccucugcgucguccuccucggcuucaucaugugggccugccagaagggcaacauccgcugcaacaucugcaucuga

SEQ ID NO: 97722 - RNA, 1701 nt, Artificial Sequence; identical to SEQ ID NO: 96686
  derived and/or modified CDS sequence (opt2) from hemagglutinin__InfluenzaA__ABR28515

SEQ ID NO: 97723 - RNA, 1701 nt, Artificial Sequence
  derived and/or modified CDS sequence (opt2) from hemagglutinin__InfluenzaA__ABR28592
augaagaccaucaucgcccucuccuacgucuucugccucgucuucgcccaggaccuccccggcaacgacaacuccaccgccacccucugccucggccaccacgccguccccaacggcacccucgucaagaccaucaccaacgaccagaucgaggucaccaacgccaccgagcucguccaguccuccuccaccggcaagaucugcgacaacccccaccgcauccucgacggcaucaacugcacccucaucgacgcccuccucggcgacccccacugcgacggcuuccagaacgagaagugggaccucuucgucgagcgcuccaaggccuucuccaacugcuaccccuacgacguccccgacuacgccucccuccgcucccucgucgccuccuccggcacccucgaguucaucaacgagggcuucaacuggaccggcgucacccagaacggcggcuccuccgccugcaagcgcggccccgacaacggcuucuucucccgccucaacuggcucuacaaguccggcuccaccuaccccguccagaacgucaccaugcccaacaacgacaacuccgacaagcucuacaucuggggcguccaccaccccuccaccgacaaggagcagaccgaccucuacguccaggccuccggcaaggucaccgucuccaccaagcgcucccagcagaccgucauccccaacgucggcucccgccccuggguccgcggccucuccucccgcgucuccaucuacuggaccaucgucaagcccggcgacauccucgucaucaacuccaacggcaaccucaucgccccccgcggcuacuucaagaugcgcaccggcaaguccuccaucaugcgcuccgacgcccccaucggcaccugcuccuccgagugcaucacccccaacggcuccauccccaacgacaagcccuuccagaacgucaacaagaucaccuacggcgccugccccaaguacgucaagcagaacacccucaagcucgccaccggcaugcgcaacguccccgagaagcagacccgcggcaucuucggcgccaucgccggcuucaucgagaacggcugggagggcaugaucgacggcugguacggcuuccgccaccagaacuccgagggcaccggccaggccgccgaccucaaguccacccaggccgccaucgaccagaucaacggcaagcucaaccgcgucaucgagaagaccaacgagaaguuccaccagaucgagaaggaguucuccgaggucgagggccgcauccaggaccucgagaaguacgucgaggacaccaagaucgaccucugguccuacaacgccgagcuccucgucgcccucgagaaccagcacaccaucgaccucaccgacuccgagaugaacaagcucuucgagaagacccgccgccagcuccgcgagaacgccgaggacaugggcaacggcugcuucaagaucuaccacaagugcgacaacgccugcaucggcuccauccgcaacggcaccuacgaccacgacgucuaccgcgacgaggcccucaacaaccgcuuccagaucaagggcgucgagcucaaguccggcuacaaggacuggauccucuggaucuccuucgccaucuccugcuuccuccucugcgucguccuccucggcuucaucaugugggccugccagaagggcaacauccgcugcaacaucugcaucuga

SEQ ID NO: 97724 - RNA, 1698 nt, Artificial Sequence; identical to SEQ ID NO: 96778
  derived and/or modified CDS sequence (opt2) from hemagglutinin__InfluenzaA__ABR28768

SEQ ID NO: 97725 - RNA, 1698 nt, Artificial Sequence; identical to SEQ ID NO: 96778
  derived and/or modified CDS sequence (opt2) from hemagglutinin__InfluenzaA__ABR28779

SEQ ID NO: 97726 - RNA, 1701 nt, Artificial Sequence; identical to SEQ ID NO: 97469
  derived and/or modified CDS sequence (opt2) from hemagglutinin__InfluenzaA__ABR28790

SEQ ID NO: 97727 - RNA, 1698 nt, Artificial Sequence; identical to SEQ ID NO: 96778
  derived and/or modified CDS sequence (opt2) from hemagglutinin__InfluenzaA__ABR28801

SEQ ID NO: 97728 - RNA, 1701 nt, Artificial Sequence; identical to SEQ ID NO: 96686
  derived and/or modified CDS sequence (opt2) from hemagglutinin__InfluenzaA__ABR28812

SEQ ID NO: 97729 - RNA, 1701 nt, Artificial Sequence
  derived and/or modified CDS sequence (opt2) from hemagglutinin__InfluenzaA__ABR28823
augaagaccaucaucgcccucuccuacauccucugccucgucuucgcccagaagcuccccggcaacgacaacuccaccgccacccucugccucggccaccacgccguccccaacggcacccucgucaagaccaucaccaacgaccagaucgaggucaccaacgccaccgagcucguccaguccuccuccaccggccgcaucugcgacuccccccaccagauccucgacggcgagaacugcacccucaucgacgcccuccucggcgacccccacugcgacggcuuccagaacaaggagugggaccucuucgucgagcgcuccaaggccuacuccaacugcuaccccuacgacguccccgacuacgucucccuccgcucccucgucgccuccuccggcacccucgaguucaacaacgaguccuucaacuggaccggcgucgcccagaacggcaccuccuccgccugcaagcgccgcuccgacaaguccuucuucucccgccucaacuggcuccaccagcucaaguacaaguaccccgcccucaacgucaccaugcccaacaacgagaaguucgacaagcucuacaucuggggcguccaccaccccggcaccgacuccgaccagaucucccucuacgcccaggccuccggccgcgucaccgucuccaccaagcgcucccagcagaccgucauccccaacaucggcucccgccccuggguccgcggcaucuccucccgcaucuccaucuacuggaccaucgucaagcccggcgacauccuccucaucaacuccaccggcaaccucaucgccccccgcggcuacuucaagauccgcuccggcaaguccuccaucaugcgcuccgacgcccccaucggcaagugcaacuccgagugcaucacccccaacggcuccauccccaacgacaagcccuuccagaacgucaaccgcaucaccuacggccccugcccccgcuacgucaagcagaacacccucaagcucgccaccggcaugcgcaacguccccgagaagcagacccgcggcaucuucggcgccaucgccggcuucaucgagaacggcugggagggcaugauggacggcugguacggcuuccgccaccagaacuccgagggcaccggccaggccgccgaccucaaguccacccaggccgccaucaaccagaucaacggcaagcucaaccgccucaucgagaagaccaacgagaaguuccaccagaucgagaaggaguucuccgaggucgagggccgcauccaggaccucgagaaguacgucgaggacaccaagaucgaccucugguccuacaacgccgagcuccucgucgcccucgagaaccagcacaccaucgaccucaccgacuccgagaugaacaagcucuucgagcgcaccaagaagcagcuccgcgagaacgccgaggacaugggcaacggcugcuucaagaucuaccacaagugcgacaacgccugcaucggcuccauccgcaacggcaccuacgaccacgacgucuaccgcgacgaggcccucaacaaccgcuuccagaucaagggcgucgagcucaaguccggcuacaaggacuggauccucuggaucuccuucgccaucuccugcuuccuccucugcaucguccuccucggcuucaucaugugggccugccagaagggcaacauccgcugcaacaucugcaucuga

SEQ ID NO: 97730 - RNA, 1698 nt, Artificial Sequence; identical to SEQ ID NO: 96906
  derived and/or modified CDS sequence (opt2) from hemagglutinin__InfluenzaA__ABR28834

SEQ ID NO: 97731 - RNA, 1698 nt, Artificial Sequence; identical to SEQ ID NO: 96877
  derived and/or modified CDS sequence (opt2) from hemagglutinin__InfluenzaA__ABR28845

SEQ ID NO: 97732 - RNA, 1701 nt, Artificial Sequence
  derived and/or modified CDS sequence (opt2) from hemagglutinin__InfluenzaA__ABR28856
augaagaccaucaucgcccucuccuacauccucugccucgucuucgcccagaagcuccccggcaacgacaacuccaccgccacccucugccucggccaccacgccguccccaacggcacccucgucaagaccaucaccaacgaccagaucgaggucaccaacgccaccgagcucguccaguccuccuccaccggccgcaucugcgacuccccccaccagauccucgacggcgagaacugcacccucaucgacgcccuccucggcgacccccacugcgacggcuuccagaacaaggagugggaccucuucgucgagcgcuccaaggccuacuccaacugcuaccccuacgacguccccgacuacgucucccuccgcucccucgucgccuccuccggcacccucgaguucaacaacgaguccuucaacuggaccggcgucgcccagaacggcaccuccuccgccugcaagcgccgcuccgacaaguccuucuucucccgccucaacuggcuccaccagcucaaguacaaguaccccgcccucaacgucaucaugcccaacaacgagaaguucgacaagcucuacaucuggggcguccaccaccccggcaccgacuccgaccagaucucccucuacgcccaggccuccggccgcgucaccgucuccaccaagcgcucccagcagaccgucauccccaacaucggcucccgccccuggguccgcggcgucuccucccgcaucuccaucuacuggaccaucgucaagcccggcgacauccuccucaucaacuccaccggcaaccucaucgccccccgcggcuacuucaagauccgcuccggcaaguccuccaucaugcgcuccgacgcccccaucggcaagugcaacuccgagugcaucacccccaacggcuccauccccaacgacaagcccuuccagaacgucaaccgcaucaccuacggcgccugcccccgcuacgucaagcagaagacccucaagcucgccaccggcaugcgcaacguccccgagaagcagacccgcggcaucuucggcgccaucgccggcuucaucgagaacggcugggagggcaugauggacggcugguacggcuuccgccaccagaacuccgagggcaccggccaggccgccgaccucaaguccacccaggccgccaucaaccagaucaacggcaagcucaaccgccucaucgagaagaccaacgagaaguuccaccagaucgagaaggaguucuccgaggucgagggccgcauccaggaccucgagaaguacgucgaggacaccaagaucgaccucugguccuacaacgccgagcuccucgucgcccucgagaaccagcacaccaucgaccucaccgacuccgagaugaacaagcucuucgagcgcaccaagaagcagcuccgcgagaacgccgaggacaugggcaacggcugcuucaagaucuaccacaagugcgacaacgccugcaucggcuccauccgcaacggcaccuacgaccacgacgucuaccgcgacgaggcccucaacaaccgcuuccagaucaagggcgucgagcucaaguccggcuacaaggacuggauccucuggaucuccuucgccaucuccugcuuccuccucugcaucguccuccucggcuucaucaugugggccugccagaagggcaacauccgcugcaacaucugcaucuga

SEQ ID NO: 97733 - RNA, 1701 nt, Artificial Sequence; identical to SEQ ID NO: 96643
  derived and/or modified CDS sequence (opt2) from hemagglutinin__InfluenzaA__ABR28867

SEQ ID NO: 97734 - RNA, 1701 nt, Artificial Sequence; identical to SEQ ID NO: 96598
  derived and/or modified CDS sequence (opt2) from hemagglutinin__InfluenzaA__ABR28878

SEQ ID NO: 97735 - RNA, 1698 nt, Artificial Sequence; identical to SEQ ID NO: 97240
  derived and/or modified CDS sequence (opt2) from hemagglutinin__InfluenzaA__ABR28900

SEQ ID NO: 97736 - RNA, 1701 nt, Artificial Sequence
  derived and/or modified CDS sequence (opt2) from hemagglutinin__InfluenzaA__ABR28922
augaagaccaucaucgcccucuccuacauccucugccucgucuucgcccagaagcuccccggcaacgacaacuccaccgccacccucugccucggccaccacgccguccccaacggcaccaucgucaagaccaucaccaacgaccagaucgaggucaccaacgccaccgagcucguccaguccuccuccaccggcggcaucugcgacuccccccaccagauccucgacggcgagaacugcacccucaucgacgcccuccucggcgacccccagugcgacggcuuccagaacaagaagugggaccucuucgucgagcgcuccaaggccuacuccaacugcuaccccuacgacguccccgacuacgccucccuccgcucccucgucgccuccuccggcacccucgaguucaacaacgaguccuucaacuggaccggcgucacccagaacggcaccuccuccgccugcaagcgccgcuccaacaacuccuucuucucccgccucaacuggcucacccaccucaaguucaaguaccccgcccucaacgucaccaugcccaacaacgagaaguucgacaagcucuacaucuggggcguccaccaccccggcaccgacaacgaccagaucucccucuacgcccaggccuccggccgcaucaccgucuccaccaagcgcucccagcagaccgucauccccaacaucggcucccgcccccgcguccgcgacauccccucccgcgucuccaucuacuggaccaucgucaagcccggcgacauccuccucaucaacuccaccggcaaccucaucgccccccgcggcuacuucaagauccgcuccggcaaguccuccaucaugcgcuccgacgcccccaucggcaagugcaacuccgagugcaucacccccaacggcuccauccccaacgacaagcccuuccagaacgucaaccgcaucaccuacggcgccugcccccgcuacgucaagcagaacacccucaagcucgccaccggcaugcgcaacguccccgagaagcagacccgcggcaucuucggcgccaucgccggcuucaucgagaacggcugggagggcauggucgacggcugguacggcuuccgccaccagaacuccgagggcaucggccaggccgccgaccucaaguccacccaggccgccaucaaccagaucaacggcaagcucaaccgccucaucggcaagaccaacgagaaguuccaccagaucgagaaggaguucuccgaggucgagggccgcauccaggaccucgagaaguacgucgaggacaccaagaucgaccucugguccuacaacgccgagcuccucgucgcccucgagaaccagcacaccaucgaccucaccgacuccgagaugaacaagcucuucgagcgcaccaagaagcagcuccgcgagaacgccgaggacaugggcaacggcugcuucaagaucuaccacaagugcgacaacgccugcaucggcuccauccgcaacggcaccuacgaccacgacgucuaccgcgacgaggcccucaacaaccgcuuccagaucaagggcgucgagcucaaguccggcuacaaggacuggauccucuggaucuccuucgccaucuccugcuuccuccucugcgucgcccuccucggcuucaucaugugggccugccagaagggcaacauccgcugcaacaucugcaucuga

SEQ ID NO: 97737 - RNA, 1701 nt, Artificial Sequence; identical to SEQ ID NO: 97617
  derived and/or modified CDS sequence (opt2) from hemagglutinin__InfluenzaA__ABR88080

SEQ ID NO: 97738 - RNA, 1701 nt, Artificial Sequence
  derived and/or modified CDS sequence (opt2) from hemagglutinin__InfluenzaA__ABS00315
augaaggccaagcuccucguccuccucugcgccuucaccgccaccgacgccgacaccaucugcaucggcuaccacgccaacaacuccaccgacaccgucgacaccguccucgagaagaacgucaccgucacccacuccgucaaccuccucgaggacucccacaacggcaagcucugccgccucaagggcaucgccccccuccagcucggcaacugcuccgucgccggcuggauccucggcaaccccgagugcgagucccucuucuccaagaaguccugguccuacaucgccgagacccccaacuccgagaacggcaccugcuaccccggcuacuucgccgacuacgaggagcuccgcgagcagcucuccuccgucuccuccuucgagcgcuucgagaucuuccccaaggaguccuccuggcccaaccacaccgucaccaagggcgucuccgccuccugcucccacaagggccgcuccuccuucuaccgcaaccuccucuggcucaccgagaagaacggcuccuaccccaaccucuccaaguccuacgucaacaacaaggagcgcgagguccucguccucuggggcguccaccaccccuccaacaucggcgagcagcgcgccaucuaccacaccgagaacgccuacgucuccgucgucuccucccacuacaaccgccgcuucacccccgagaucgccaagcgccccaagguccgcggccaggagggccgcaucaacuacuacuggacccuccucgagcccggcgacaccaucaucuucgaggccaacggcaaccucaucgcccccugguacgccuucgcccucucccgcggcuucggcuccggcaucaucaccuccaacgccuccauggacgagugcgacgccaagugccagaccccccagggcgccaucaacuccucccuccccuuccagaacguccaccccgucaccaucggcgagugccccaaguacguccgcuccaccaagcuccgcauggucaccggccuccgcaacauccccuccauccagucccgcggccucuucggcgccaucgccggcuucaucgagggcggcuggaccggcaugaucgacggcugguacggcuaccaccaccagaacgagcagggcuccggcuacgccgccgaccagaaguccacccagaacgccaucaacggcaucaccaacaaggucaacuccgucaucgagaagaugaacacccaguucaccgccgucggcaaggaguucaacaagcucgagcgccgcauggagaaccucaacaagaaggucgacgacggcuuccucgacaucuggaccuacaacgccgagcuccucguccuccucgagaacgagcgcacccucgacuuccacgacuccaacgucaagaaccucuacgagaaggucaagucccagcucaagaacaacgccaaggagaucggcaacggcugcuucgaguucuaccacaagugcaacaacgagugcauggaguccgucaagaacggcaccuacgacuaccccaaguacuccgaggaguccaagcucaaccgcgagaagaucgacggcgucaagcucgaguccaugggcgucuaccagauccucgccaucuacuccaccgucgccuccucccucguccuccucgucucccucggcgccaucuccuucuggaugugcuccaacggcucccuccagugccgcaucugcaucuga

SEQ ID NO: 97739 - RNA, 1701 nt, Artificial Sequence
  derived and/or modified CDS sequence (opt2) from hemagglutinin__InfluenzaA__ABS00326
augaaggccaagcuccucguccuccucugcgccuucaccgccaccgacgccgacaccaucugcaucggcuaccacgccaacaacuccaccgacaccgucgacaccguccucgagaagaacgucaccgucacccacuccgucaaccuccucgaggacucccacaacggcaagcucugccgccucaagggcaucgccccccuccagcucggcaacugcuccgucgccggcuggauccucggcaaccccgagugcgagucccucuucuccaagaaguccugguccuacaucgccgagacccccaacuccgagaacggcaccugcuaccccggcuacuucgccgacuacgaggagcuccgcgagcagcucuccuccgucuccuccuucgagcgcuucgagaucuuccccaaggaguccuccuggcccaaccacaccgucaccaagggcgucuccgccuccugcucccacaagggccgcuccuccuucuaccgcaaccuccucuggcucaccgagaagaacggcuccuaccccaaccucuccaaguccuacgucaacaacaaggagaaggagguccucguccucuggggcguccaccaccccuccaacaucggcgagcagcgcgccaucuaccacaccgagaacgccuacgucuccgucgucuccucccacuacaaccgccgcuucacccccgagaucgccaagcgccccaagguccgcggccaggagggccgcaucaacuacuacuggacccuccucgagcccggcgacaccaucaucuucgaggccaacggcaaccucaucgcccccugguacgccuucgcccucucccgcggcuucggcuccggcaucaucaccuccaacgccuccauggacgagugcgacgccaagugccagaccccccagggcgccaucaacuccucccuccccuuccagaacguccaccccgucaccaucggcgagugccccaaguacguccgcuccaccaagcuccgcauggucaccggccuccgcaacauccccuccauccagucccgcggccucuucggcgccaucgccggcuucaucgagggcggcuggaccggcaugaucgacggcugguacggcuaccaccaccagaacgagcagggcuccggcuacgccgccgaccagaaguccacccagaacgccaucaacggcaucaccaacaaggucaacuccgucaucgagaagaugaacacccaguucaccgccgucggcaaggaguucaacaagcucgagcgccgcauggagaaccucaacaagaaggucgacgacggcuuccucgacaucuggaccuacaacgccgagcuccucguccuccucgagaacgagcgcacccucgacuuccacgacuccaacgucaagaaccucuacgagaaggucaagucccagcucaagaacaacgccaaggagaucggcaacggcugcuucgaguucuaccacaagugcaacaacgagugcauggaguccgucaagaacggcaccuacgacuaccccaaguacuccgaggaguccaagcucaaccgcgagaagaucgacggcgucaagcucgaguccaugggcgucuaccagauccucgccaucuacuccaccgucgccuccucccucguccuccucgucucccucggcgccaucuccuucuggaugugcuccaacggcucccuccagugccgcaucugcaucuga

SEQ ID NO: 97740 - RNA, 1701 nt, Artificial Sequence; identical to SEQ ID NO: 97676
  derived and/or modified CDS sequence (opt2) from hemagglutinin__InfluenzaA__ABS49899

SEQ ID NO: 97741 - RNA, 1701 nt, Artificial Sequence
  derived and/or modified CDS sequence (opt2) from hemagglutinin__InfluenzaA__ABS49910
augaagaccaucaucgcccucuccuacaucuucugccucgcccucggccaggaccuccccggcaacgacaacuccaccgccacccucugccucggccaccacgccguccccaacggcacccucgucaagaccaucaccaacgaccagaucgaggucaccaacgccaccgagcucguccaguccuccuccaccggcaagaucugcaacaacccccaccgcauccucgacggcaucaacugcacccucaucgacgcccuccucggcgacccccacugcgacgucuuccaggacgagaccugggaccucuucgucgagcgcuccaaggccuucuccaacugcuaccccuacgacguccccgacuacgccucccuccgcucccucgucgccuccuccggcacccucgaguucaucaccgagggcuucaccuggaccggcgucacccagaacggcggcuccaacgccugcaagcgcggccccggcuccggcuucuucucccgccucaacuggcucaccaaguccggcuccaccuaccccguccucaacgucaccaugcccaacaacgacaacuucgacaagcucuacaucuggggcguccaccaccccuccaccaaccaggagcagaccucccucuacguccaggccuccggccgcgucaccgucuccacccgccgcucccagcagaccaucauccccaacaucggcucccgccccuggguccgcggccucuccucccgcaucuccaucuacuggaccaucgucaagcccggcgacguccucgucaucaacuccaacggcaaccucaucgccccccgcggcuacuucaagaugcgcaccggcaaguccuccaucaugcgcuccgacgcccccaucgacaccugcaucuccgagugcaucacccccaacggcuccauccccaacgacaagcccuuccagaacgucaacaagaucaccuacggcgccugccccaaguacgucaagcagaacacccucaagcucgccaccggcaugcgcaacguccccgagaagcagacccgcggccucuucggcgccaucgccggcuucaucgagaacggcugggagggcaugaucgacggcugguacggcuuccgccaccagaacuccgagggcaccggccaggccgccgaccucaaguccacccaggccgccaucgaccagaucaacggcaagcucaaccgcgucaucgagaagaccaacgagaaguuccaccagaucgagaaggaguucuccgaggucgagggccgcauccaggaccucgagaaguacgucgaggacaccaagaucgaccucugguccuacaacgccgagcuccucgucgcccucgagaaccagcacaccaucgaccucaccgacuccgagaugaacaagcucuucgagaagacccgccgccagaugcgcgagaacgccgaggacaugggcaacggcugcuucaagaucuaccacaagugcgacaacgccugcaucgaguccauccgcaacggcaccuacgaccacgacgucuaccgcgacgaggcccucaacaaccgcuuccagaucaagggcgucgagcucaaguccggcuacaaggacuggauccucuggaucuccuucgccaucuccugcuuccuccucugcgucguccuccucggcuucaucaugugggccugccagcgcggcaacauccgcugcaacaucugcaucuga

SEQ ID NO: 97742 - RNA, 1701 nt, Artificial Sequence; identical to SEQ ID NO: 96686
  derived and/or modified CDS sequence (opt2) from hemagglutinin__InfluenzaA__ABS49965

SEQ ID NO: 97743 - RNA, 1698 nt, Artificial Sequence
  derived and/or modified CDS sequence (opt2) from hemagglutinin__InfluenzaA__ABS49976
augaaggucaagcuccucguccuccucugcaccuucaccgccaccuacgccgacaccaucugcaucggcuaccacgccaacaacuccaccgacaccgucgacaccguccucgagaagaacgucaccgucacccacuccgucaaccuccucgaggacucccacaacggcaagcucugccuccucaagggcaucgccccccuccagcucggcaacugcuccgucgccggcuggauccucggcaaccccgagugcgagcuccucaucuccaaggaguccugguccuacaucgucgagacccccaaccccgagaacggcaccugcuaccccggcuacuucgccgacuacgaggagcuccgcgagcagcucuccuccgucuccuccuucgagcgcuucgagaucuuccccaaggaguccuccuggcccaaccacaccgucaccggcgucuccgccuccugcucccacaacggcaaguccuccuucuaccgcaaccuccucuggcucaccggcaagaacggccucuaccccaaccucuccaaguccuacgccaacaacaaggagaaggagguccucguccucuggggcguccaccacccccccaacaucggcaaccagcgcgcccucuaccacaccgagaacgccuacgucuccgucgucuccucccacuacucccgccgcuucacccccgagaucgccaagcgccccaagguccgcgaccaggagggccgcaucaacuacuacuggacccuccucgagcccggcgacaccaucaucuucgaggccaacggcaaccucaucgccccccgcuacgccuucgcccucucccgcggcuucggcuccggcaucaucaccuccaacgcccccauggacgagugcgacgccaagugccagaccccccagggcgccaucaacuccucccuccccuuccagaacguccaccccgucaccaucggcgagugccccaaguacguccgcuccgccaagcuccgcauggucaccggccuccgcaacauccccuccauccagucccgcggccucuucggcgccaucgccggcuucaucgagggcggcuggaccggcauggucgacggcugguacggcuaccaccaccagaacgagcagggcuccggcuacgccgccgaccagaaguccacccagaacgccaucaacggcaucaccaacaaggucaacuccgucaucgagaagaugaacacccaguucaccgccgucggcaaggaguucaacaagcucgagcgccgcauggagaaccucaacaagaaggucgacgacggcuuccucgacaucuggaccuacaacgccgagcuccucguccuccucgagaacgagcgcacccucgacuuccacaacuccaacgucaagaaccucuacgagaaggucaagucccagcucaagaacaacgccaaggagaucggcaacggcugcuucgaguucuaccacaagugcaacaacgagugcauggaguccgucaagaacggcaccuacgacuaccccaaguacuccgaggaguccaagcucaaccgcgagaagaucgacggcgucaagcucgaguccaugggcgucuaccagauccucgccaucuacuccaccgucgccuccucccucguccuccucgucucccucggcgccaucuccuucuggaugugcuccaacggcucccuccagugccgcaucugcaucuga

SEQ ID NO: 97744 - RNA, 1698 nt, Artificial Sequence
  derived and/or modified CDS sequence (opt2) from hemagglutinin__InfluenzaA__ABS49987
augaaggucaagcuccucguccuccucugcaccuucaccgccaccuacgccgacaccaucugcaucggcuaccacgccaacaacuccaccgacaccgucgacaccguccucgagaagaacgucaccgucacccacuccgucaaccuccucgaggacucccacaacggcaagcucugccuccucaagggcaucgccccccuccagcucggcaacugcuccgucgccggcuggauccucggcaaccccgagugcgagcuccucaucuccaaggaguccugguccuacaucgucgagacccccaaccccgagaacggcaccugcuaccccggcuacuucgccgacuacgaggagcuccgcgagcagcucuccuccgucuccuccuucgagcgcuucgagaucuuccccaaggaguccuccuggcccaaccacaccgucaccggcgucuccgccuccugcucccacaacggcaaguccuccuucuaccgcaaccuccucuggcucaccggcaagaacggccucuaccccaaccucuccaaguccuacgccaacaacaaggagaaggagguccucguccucuggggcguccaccacccccccaacaucggcgaccagcgcgcccucuaccacaccgagaacgccuacgucuccgucgucuccucccacuacucccgccgcuucacccccgagaucgccaagcgccccaagguccgcgaccaggagggccgcaucaacuacuacuggacccuccucgagcccggcgacaccaucaucuucgaggccaacggcaaccucaucgccccccgcuacgccuucgcccucucccgcggcuucggcuccggcaucaucaccuccaacgcccccauggacgagugcgacgccaagugccagaccccccagggcgccaucaacuccucccuccccuuccagaacguccaccccgucaccaucggcgagugccccaaguacguccgcuccgccaagcuccgcauggucaccggccuccgcaacauccccuccauccagucccgcggccucuucggcgccaucgccggcuucaucgagggcggcuggaccggcauggucgacggcugguacggcuaccaccaccagaacgagcagggcuccggcuacgccgccgaccagaaguccacccagaacgccaucaacggcaucaccaacaaggucaacuccgucaucgagaagaugaacacccaguucaccgccgucggcaaggaguucaacaagcucgagcgccgcauggagaaccucaacaagaaggucgacgacggcuuccucgacaucuggaccuacaacgccgagcuccucguccuccucgagaacgagcgcacccucgacuuccacgacuccaacaugaagaaccucuacgagaaggucaagucccagcucaagaacaacgccaaggagaucggcaacggcugcuucgaguucuaccacaagugcaacaacgagugcauggaguccgucaagaacggcaccuacgacuaccccaaguacuccgaggaguccaagcucaaccgcgagaagaucgacggcgucaagcucgaguccaugggcgucuaccagauccucgccaucuacuccaccgucgccuccucccucguccuccucgucucccucggcgccaucuccuucuggaugugcuccaacggcucccuccagugccgcaucugcaucuga

SEQ ID NO: 97745 - RNA, 1701 nt, Artificial Sequence
  derived and/or modified CDS sequence (opt2) from hemagglutinin__InfluenzaA__ABS49998
augaagaccaucaucgcccucuccuacauccucugccucgucuucgcccagaagcuccccggcaacgacaacuccaccgccacccucugccucggccaccacgccguccccaacggcacccucgucaagaccaucaccaacgaccagaucgaggucaccaacgccaccgagcucguccaguccuccuccaccggcggcaucugcgacuccccccaccagauccucgacggcgagaacugcacccucaucgacgcccuccucggcgacccccacugcgacggcuuccagaacaaggagugggaccucuucgucgagcgcuccaaggccuacuccaacugcuaccccuacgacguccccgacuacgccucccuccgcucccucgucgccuccuccggcacccucgaguucaacaacgaguccuucaacuggaccggcgucgcccagaacggcaccuccuccgccugcaagcgccgcuccaacaaguccuucuucucccgccucaacuggcuccaccagcucaaguacaaguaccccgcccucaacgucaucaugcccaacaacgagaaguucgacaagcucuacaucuggggcguccaccaccccuccaccgacuccgaccagaucucccucuacgcccaggcccccggccgcgucaccgucuccaccaagcgcucccagcagaccgucauccccaacaucggcucccgccccuggguccgcggcgucuccucccgcaucuccaucuacuggaccaucgucaagcccggcgacauccuccucaucaacugcaccggcaaccucaucgccccccgcggcuacuucaagauccgcuccggcaaguccuccaucaugcgcuccgacgccuccaucggcaagugcaacuccgagugcaucacccccaacggcuccauccccaacgacaagcccuuccagaacgucaaccgcaucaccuacggcgccugcccccgcuacgucaagcagaacacccucaagcucgccaccggcaugcgcaacguccccgagaagcagacccgcggcaucuucggcgccaucgccggcuucaucgagaacggcugggagggcauggucgacggcugguacggcuuccgccaccagaacuccgagggcaccggccaggccgccgaccucaaguccacccaggccgccaucaaccagaucaacggcaagcucaaccgccucaucgagaagaccaacgagaaguuccaccagaucgagaaggaguucuccgaggucgagggccgcauccaggaccucgagaaguacgucgaggacaccaagaucgaccucugguccuacaacgccgagcuccucgucgcccucgagaaccagcacaccaucgaccucaccgacuccgagaugaacaagcucuucgagcgcaccaagaagcagcuccgcgagaacgccgaggacaugggcaacggcugcuucaagaucuaccacaagugcgacaacgccugcaucggcuccauccgcaacggcaccuacgaccacgacgucuaccgcgacgaggcccucaacaaccgcuuccagaucaagggcgucgagcucaaguccggcuacaaggacuggauccucuggaucuccuucgccaucuccugcuuccuccucugcgucguccuccucggcuucaucaugugggccugccagaagggcaacauccgcugcaacaucugcaucuga

SEQ ID NO: 97746 - RNA, 1701 nt, Artificial Sequence
  derived and/or modified CDS sequence (opt2) from hemagglutinin__InfluenzaA__ABS50009
augaagaccaucaucgcccucuccuacauccucugccucgucuucgcccagaagcuccccggcaacgacaacuccaccgccacccucugccucggccaccacgccguccccaacggcacccucgucaagaccaucaccaacgaccagaucgaggucaccaacgccaccgagcucguccaguccuccuccaccggcggcaucugcgacuccccccaccagauccucgacggcgagaacugcacccucaucgacgcccuccucggcgacccccacugcgacggcuuccagaacaaggagugggaccucuucgucgagcgcuccaaggccuacuccaacugcuaccccuacgacguccccgacuacgccucccuccgcucccucgucgccuccuccggcacccucgaguucaacaacgaguccuucaacuggaccggcgucgcccagaacggcaccuccuccgccugcaagcgccgcuccaacaaguccuucuucucccgccucaacuggcuccaccagcucaaguacaaguaccccgcccucaacgucaccaugcccaacaacgagaaguucgacaagcucuacaucuggggcguccaccaccccuccaccgacuccgaccagaucucccucuacgcccaggcccccggccgcgucaccgucuccaccaagcgcucccagcagaccgucauccccaacaucggcucccgccccuggguccgcggcgucuccuccaagaucuccaucuacuggaccaucgucaagcccggcgacauccuccucaucaacugcaccggcaaccucaucgccccccgcggcuacuucaagauccgcuccggcaaguccuccaucaugcgcuccgacgccuccaucggcaagugcaacuccgagugcaucacccccaacggcuccauccccaacgacaagcccuuccagaacgucaaccgcaucaccuacggcgccugcccccgcuacgucaagcagaacacccucaagcucgccaccggcaugcgcaacguccccgagaagcagacccgcggcaucuucggcgccaucgccggcuucaucgagaacggcugggagggcauggucgacggcugguacggcuuccgccaccagaacuccgagggcaccggccaggccgccgaccucaaguccacccaggccgccaucaaccagaucaacggcaagcucaaccgccucaucgagaagaccaacgagaaguuccaccagaucgagaaggaguucuccgaggucgagggccgcauccaggaccucgagaaguacgucgaggacaccaagaucgaccucugguccuacaacgccgagcuccucgucgcccucgagaaccagcacaccaucgaccucaccgacuccgagaugaacaagcucuucgagcgcaccaagaagcagcuccgcgagaacgccgaggacaugggcaacggcugcuucaagaucuaccacaagugcgacaacgccugcaucggcuccauccgcaacggcaccuacgaccacgacgucuaccgcgacgaggcccucaacaaccgcuuccagaucaagggcgucgagcucaaguccggcuacaaggacuggauccucuggaucuccuucgccaucuccugcuuccuccucugcgucguccuccucggcuucaucaugugggccugccagaagggcaacauccgcugcaacaucugcaucuga

SEQ ID NO: 97747 - RNA, 1701 nt, Artificial Sequence; identical to SEQ ID NO: 96746
  derived and/or modified CDS sequence (opt2) from hemagglutinin__InfluenzaA__ABS50020

SEQ ID NO: 97748 - RNA, 1701 nt, Artificial Sequence
  derived and/or modified CDS sequence (opt2) from hemagglutinin__InfluenzaA__ABS50031
augaagaccaucaucgcccucuccuacaugcucugccucgucuucgcccagaagcuccccggcaacgacaacuccaccgccaugcucugccucggccaccacgccguccccaacggcacccucgucaagaccaucaccaacgaccagaucgaggucaccaacgccaccgagcucguccaguccuccuccaccggcggcaucugcgacuccccccaccagauccucgacggcgagaacugcacccucaucgacgcccuccucggcgacccccacugcgacggcuuccagaacaaggagugggaccucuucgucgagcgcuccaaggccuacuccaacugcuaccccuacgacguccccgacuacgccucccuccgcucccucgucgccuccuccggcacccucgaguucaacaacgaguccuucaacuggaccggcgucgcccagaacggcaccuccuccgccugcaagcgccgcuccaacaaguccuucuucucccgccucaacuggcuccaccagcucaaguacaaguaccccgcccucaacgucaccaugcccaacaacgagaaguucgacaagcucuacaucuggggcguccaccaccccuccaccgacuccgaccagaucucccucuacgcccaggcccccggccgcgucaccgucuccaccaagcgcucccagcagaccgucauccccaacaucggcuccggccccuggguccgcggcgucuccucccgcaucuccaucuacuggaccaucgucaagcccggcgacauccuccucaucaacugcaccggcaaccucaucgccccccgcggcuacuucaagauccgcuccggcaaguccuccaucaugcgcuccgacgccuccaucggcaagugcaacuccgagugcaucacccccaacggcuccauccccaacgacaagcccuuccagaacgucaaccgcaucaccuacggcgccugcccccgcuacgucaagcagaacacccucaagcucgccaccggcaugcgcaacguccccgagaagcagacccgcggcaucuucggcgccaucgccggcuucaucgagaacggcugggagggcauggucgacggcugguacggcuuccgccaccagaacuccgagggcaccggccaggccgccgaccucaaguccacccaggccgccaucaaccagaucaacggcaagcucaaccgccucaucgagaagaccaacgagaaguuccaccagaucgagaaggaguucuccgaggucgagggccgcauccaggaccucgagaaguacgucgaggacaccaagaucgaccucugguccuacaacgccgagcuccucgucgcccucgagaaccagcacaccaucgaccucaccgacuccgagaugaacaagcucuucgagcgcaccaagaagcagcuccgcgagaacgccgaggacaugggcaacggcugcuucaagaucuaccacaagugcgacaacgccugcaucggcuccauccgcaacggcaccuacgaccacgacgucuaccgcgacgaggcccucaacaaccgcuuccagaucaagggcgucgagcucaaguccggcuacaaggacuggauccucuggaucuccuucgccaucuccugcuuccuccucugcgucguccuccucggcuucaucaugugggccugccagaagggcaacauccgcugcaacaucugcaucuga

SEQ ID NO: 97749 - RNA, 1701 nt, Artificial Sequence; identical to SEQ ID NO: 96087
  derived and/or modified CDS sequence (opt2) from hemagglutinin__InfluenzaA__ABS50042

SEQ ID NO: 97750 - RNA, 1701 nt, Artificial Sequence; identical to SEQ ID NO: 97729
  derived and/or modified CDS sequence (opt2) from hemagglutinin__InfluenzaA__ABS50053

SEQ ID NO: 97751 - RNA, 1701 nt, Artificial Sequence
  derived and/or modified CDS sequence (opt2) from hemagglutinin__InfluenzaA__ABS50064
augaagaccaucaucgcccucuccuacauccucugccucgucuucgcccagaagcuccccggcaacgacaacuccaccgccacccucugccucggccaccacgccguccccaacggcacccucgucaagaccaucaccaacgaccagaucgaggucaccaacgccaccgagcucguccaguccuccuccaccggccgcaucugcgacuccccccaccagauccucgacggcgagaacugcacccucaucgacgcccuccucggcgacccccacugcgacggcuuccagaacaaggagugggaccucuucgucgagcgcuccaaggccuacuccaacugcuaccccuacgacguccccgacuacgucucccuccgcucccucgucgccuccuccggcacccucgaguucaacaacgaguccuucaacuggaccggcgucgcccagaacggcaccuccuccgccugcaagcgccgcuccgacaaguccuucuucucccgccucaacuggcuccaccagcucaaguacaaguaccccgcccucaacgucaccaugcccaacaacgagaaguucgacaagcucuacaucuggggcguccaccaccccggcaccgacuccgaccagaucucccucuacgcccaggccuccggccgcgucaccgucuccaccaagcgcucccagcagaccgucauccccaacaucggcucccgccccuggguccgcggcgucuccucccgcaucuccaucuacuggaccaucgucaagcccggcgacauccuccucaucaacuccaccggcaaccucaucgccccccgcggcuacuucaagauccgcuccggcaaguccuccaucaugcgcuccgacgcccccaucggcaagugcaacuccgagugcaucacccccaacggcuccauccccaacgacaagcccuuccagaacgucaaccgcaucaccuacggccccugcccccgcuacgucaagcagaccacccucaagcucgccaccggcaugcgcaacguccccgagaagcagacccgcggcaucuucggcgccaucgccggcuucaucgagaacggcugggagggcaugauggacggcugguacggcuuccgccaccagaacuccgagggcaccggccaggccgccgaccucaaguccacccaggccgccaucaaccagaucaacggcaagcucaaccgccucaucgagaagaccaacgagaaguuccaccagaucgagaaggaguucuccgaggucgagggccgcauccaggaccucgagaaguacgucgaggacaccaagaucgaccucugguccuacaacgccgagcuccucgucucccucgagaaccagcacaccaucgaccucaccgacuccgagaugaacaagcucuucgagcgcaccaagaagcagcuccgcgagaacgccgaggacaugggcaacggcugcuucaagaucuaccacaagugcgacaacgccugcaucggcuccauccgcaacggcaccuacgaccacgacgucuaccgcgacgaggcccucaacaaccgcuuccagaucaagggcgucgagcucaaguccggcuacaaggacuggauccucuggaucuccuucgccaucuccugcuuccuccucugcaucguccuccucggcuucaucaugugggccugccagaagggcaacauccgcugcaacaucugcaucuga

SEQ ID NO: 97752 - RNA, 1701 nt, Artificial Sequence
  derived and/or modified CDS sequence (opt2) from hemagglutinin__InfluenzaA__ABS50075
augaagaccaucaucgcccucuccuacauccucugccucgucuucgcccagaagcuccccggcaacgacaacuccaccgccacccucugccucggccaccacgccguccccaacggcaccaucgucaagaccaucaccaacgaccagaucgaggucaccaacgccaccgagcucguccaguccuccuccaccggcggcaucugcgacuccccccacaagauccucgacggcgagaacugcacccucaucgacgcccuccucggcgacccccagugcgacggcuuccagaacaagaagugggaccucuucgucgagcgcuccaaggccuacuccaacugcuaccccuacgacguccccgacuacgccucccuccgcucccucaucgccuccuccggcacccucgaguucaacaacgaguccuucaacuggaccggcgucacccagaacggcaccuccuccgccugcaagcgccgcuccaacuccuccuucuucucccgccucaacuggcucacccaccucaaguucaaguaccccgcccucaacgucaccaugcccaacaacgaggaguucgacaagcucuacaucuggggcguccaccaccccggcaccuacaacgaccagaucucccucuacgcccaggccuccggccgcaucaccgucuccaccaagcgcucccagcagaccgucauccccaacaucggcucccgcccccgcguccgcgacauccccucccgcaucuccaucuacuggaccaucgucaagcccggcgacauccuccucaucaacuccaccggcaaccucaucgccccccgcggcuacuucaagauccgcuccggcaaguccuccaucaugcgcuccgacgcccccaucggcaagugcaacuccgagugcaucacccccaacggcuccauccccaacgacaagcccuuccagaacgucaaccgcaucaccuacggcgccugcccccgcuacgucaagcagaacacccucaagcucgccaccggcaugcgcaacguccccgagaagcagacccgcggcaucuucggcgccaucgccggcuucaucgagaacggcugggagggcauggucgacggcugguacggcuuccgccaccagaacuccgagggcaucggccaggccgccgaccucaaguccacccaggccgccaucgaccagaucaacggcaagcucaaccgccucaucggcaagaccaacgagaaguuccaccagaucgagaaggaguucuccgaggucgagggccgcauccaggaccucgagaaguacgucgaggacaccaagaucgaccucugguccuacaacgccgagcuccucgucgcccucgagaaccagcacaccaucgaccucaccgacuccgagaugaacaagcucuucgagcgcaccaagaagcagcuccgcgagaacgccgaggacaugggcaacggcugcuucaagaucuaccacaagugcgacaacgccugcaucggcuccauccgcaacggcaccuacgaccacgacgucuaccgcgacgaggcccucaacaaccgcuuccagaucaagggcgucgagcucaaguccggcuacaaggacuggauccucuggaucuccuucgccaucuccugcuuccuccucugcgucgcccuccucggcuucaucaugugggccugccagaagggcaacauccgcugcaacaucugcaucuga

SEQ ID NO: 97753 - RNA, 1698 nt, Artificial Sequence
  derived and/or modified CDS sequence (opt2) from hemagglutinin__InfluenzaA__ABS71665
augaaggucaagcuccucguccuccucugcaccuucaccgccaccuacgccgacaccaucugcaucggcuaccacgccaacaacuccaccgacaccgucgacaccguccucgagaagaacgucaccgucacccacuccgucaaccuccucgaggacucccacaacggcaagcucugccuccucaagggcaucgccccccuccagcucggcaacugcuccgucgccggcuggauccucggcaaccccgagugcgagucccucaucucccgcgaguccugguccuacaucgucgagaagcccucccccgagaacggcaccugcuaccccggccacuucgccgacuacgaggagcuccgcgagcagcucuccuccgucuccuccuucgagcgcuucgagaucuuccccaaggaguccuccuggcccaaccacaccgccaccggcgucuccgccuccugcucccacaacggcgaguccuccuucuacaagaaccuccucuggcucaccggcaagaacggccucuaccccaaccucuccaaguccuacgccaacaacaaggagaaggagguccucguccucuggggcguccaccacccccccaacaucggcgaccagcgcgcccucuaccacaccgagaacgccuacgucuccgucgucuccucccacuacucccgcaaguucacccccgagaucgccaagcgccccaagguccgcgaccaggagggccgcaucuccuacuacuggacccuccucgagcccggcgacaccaucaucuucgaggccaacggcaaccucaucgccccccgcuacgccuucgcccucucccgcggcuucggcuccggcaucaucaacuccaacgcccccauggacgagugcgacgccaagugccagaccccccagggcgccaucaacuccucccuccccuuccagaacguccaccccgucaccaucggcgagugccccaaguacguccgcuccgccaagcuccgcauggucaccggccuccgcaacauccccuccauccagucccgcggccucuucggcgccaucgccggcuucaucgagggcggcuggaccggcauggucgacggcugguacggcuaccaccaccagaacgagcagggcuccggcuacgccgccgaccagaaguccacccagaacgccaucaacggcaucaccaacaaggucaacuccgucaucgagaagaugaacacccaguucaccgccgucggcaaggaguucaacaagcucgagcgccgcauggagaaccucaacaagaaggucgacgacggcuucaucgacaucuggaccuacaacgccgagcuccucguccuccucgagaacgagcgcacccucgacuuccacgacuccaacgucaagaaccucuacgagaaggucaagucccagcucaagaacaacgccaaggagaucggcaacggcugcuucgaguucuaccacaagugcaacgacgagugcauggaguccgucaagaacggcaccuacgacuaccccaaguacuccgaggaguccaagcucaaccgcgagaagaucgacggcgucaagcucgaguccaugggcgucuaccagauccucgccaucuacuccaccgucgccuccucccucguccuccucgucucccucggcgccaucuccuucuggaugugcuccaacggcucccuccagugccgcaucugcaucuga

SEQ ID NO: 97754 - RNA, 1698 nt, Artificial Sequence
  derived and/or modified CDS sequence (opt2) from hemagglutinin__InfluenzaA__ABS71666
augaaggucaagcuccucguccuccucugcaccuucaccgccaccuacgccgacaccaucugcaucggcuaccacgccaacaacuccaccgacaccgucgacaccguccucgagaagaacgucaccgucacccacuccgucaaccuccucgaggacucccacaacggcaagcucugccuccucaagggcaucgccccccuccagcucggcaacugcuccgucgccggcuggauccucggcaaccccgagugcgagucccucaucucccgcgaguccugguccuacaucgucgagaagcccucccccgagaacggcaccugcuaccccggccacuucgccgacuacgaggagcuccgcgagcagcucuccuccgucuccuccuucgagcgcuucgagaucuuccccaaggaguccuccuggcccaaccacaccgccaccggcgucuccgccuccugcucccacaacggcaaguccuccuucuacaagaaccuccucuggcucaccggcaagaacggccucuaccccaaccucuccaaguccuacgccaacaacaaggagaaggagguccucguccucuggggcguccaccacccccccaacaucggcgaccagcgcgcccucuaccacaccgagaacgccuacgucuccgucgucuccucccacuacucccgcaaguucacccccgagaucgccaagcgccccaagguccgcgaccaggagggccgcaucuccuacuacuggacccuccucgagcccggcgacaccaucaucuucgaggccaacggcaaccucaucgccccccgcuacgccuucgcccucucccgcggcuucggcuccggcaucaucaacuccaacgcccccauggacgagugcgacgccaagugccagaccccccagggcgccaucaacuccucccuccccuuccagaacguccaccccgucaccaucggcgagugccccaaguacguccgcuccgccaagcuccgcauggucaccggccuccgcaacauccccuccauccagucccgcggccucuucggcgccaucgccggcuucaucgagggcggcuggaccggcauggucgacggcugguacggcuaccaccaccagaacgagcagggcuccggcuacgccgccgaccagaaguccacccagaacgccaucaacggcaucaccaacaaggucaacuccgucaucgagaagaugaacacccaguucaccgccgucggcaaggaguucaacaagcucgagcgccgcauggagaaccucaacaagaaggucgacgacggcuucaucgacaucuggaccuacaacgccgagcuccucguccuccucgagaacgagcgcacccucgacuuccacgacuccaacgucaagaaccucuacgagaaggucaagucccagcucaagaacaacgccaaggagaucggcaacggcugcuucgaguucuaccacaagugcaacgacgagugcauggaguccgucaagaacggcaccuacgacuaccccaaguacuccgaggaguccaagcucaaccgcgagaagaucgacggcgucaagcucgaguccaugggcgucuaccagauccucgccaucuacuccaccgucgccuccucccucguccuccucgucucccucggcgccaucuccuucuggaugugcuccaacggcucccuccagugccgcaucugcaucuga

SEQ ID NO: 97755 - RNA, 1698 nt, Artificial Sequence
  derived and/or modified CDS sequence (opt2) from hemagglutinin__InfluenzaA__ABS71667
augaaggucaagcuccucguccuccucugcaccuucaccgccaccuacgccgacaccaucugcaucggcuaccacgccaacaacuccaccgacaccgucgacaccguccucgagaagaacgucaccgucacccacuccgucaaccuccucgaggacucccacaacggcaagcucugccuccucaagggcaucgccccccuccagcucggcaacugcuccgucgccggcuggauccucggcaaccccgagugcgagucccucaucucccgcgaguccugguccuacaucgucgagaagcccucccccgagaacggcaccugcuaccccggccacuucgccgacuacgaggagcuccgcgagcagcucuccuccgucuccuccuucgagcgcuucgagaucuuccccaaggaguccuccuggcccaaccacaccgccaccggcgucuccgccuccugcucccacaacggcaaguccuccuucuacaagaaccuccucuggcucaccggcaagaacggccucuaccccaaccucuccaaguccuacgccaacaacaaggagaaggagguccucguccucuggggcguccaccacccccccaacaucggcgaccagcgcgcccucuaccacaccgagaacgccuacaucuccgucgucuccucccacuacucccgcaaguucacccccgagaucgccaagcgccccaagguccgcgaccaggagggccgcaucuccuacuacuggacccuccucgagcccggcgacaccaucaucuucgaggccaacggcaaccucaucgccccccgcuacgccuucgcccucucccgcggcuucggcuccggcaucaucaacuccaacgcccccauggacgagugcgacgccaagugccagaccccccagggcgccaucaacuccucccuccccuuccagaacguccaccccgucaccaucggcgagugccccaaguacguccgcuccgccaagcuccgcauggucaccggccuccgcaacauccccuccauccagucccgcggccucuucggcgccaucgccggcuucaucgagggcggcuggaccggcauggucgacggcugguacggcuaccaccaccagaacgagcagggcuccggcuacgccgccgaccagaaguccacccagaacgccaucaacggcaucaccaacaaggucaacuccgucaucgagaagaugaacacccaguucaccgccgucggcaaggaguucaacaagcucgagcgccgcauggagaaccucaacaagaaggucgacgacggcuucaucgacaucuggaccuacaacgccgagcuccucguccuccucgagaacgagcgcacccucgacuuccacgacuccaacgucaagaaccucuacgagaaggucaagucccagcucaagaacaacgccaaggagaucggcaacggcugcuucgaguucuaccacaagugcaacgacgagugcauggaguccgucaagaacggcaccuacgacuaccccaaguacuccgaggaguccaagcucaaccgcgagaagaucgacggcgucaagcucgaguccaugggcgucuaccagauccucgccaucuacuccaccgucgccuccucccucguccuccucgucucccucggcgccaucuccuucuggaugugcuccaacggcucccuccagugccgcaucugcaucuga

SEQ ID NO: 97756 - RNA, 1698 nt, Artificial Sequence
  derived and/or modified CDS sequence (opt2) from hemagglutinin__InfluenzaA__ABS71668
augaaggucaagcuccucguccuccucugcaccuucaccgccaccuacgccgacaccaucugcaucggcuaccacgccaacaacuccaccgacaccgucgacaccguccucgagaagaacgucaccgucacccacuccgucaaccuccucgaggacucccacaacggcaagcucugccuccucaagggcaucgccccccuccagcucggcaacugcuccgucgccggcuggauccucggcaaccccgagugcgagucccucaucucccgcgaguccugguccuacaucgucgagaagcccucccccgagaacggcaccugcuaccccggccacuucgccgacuacgaggagcuccgcgagcagcucuccuccgucuccuccuucgagcgcuucgagaucuuccccaaggaguccuccuggcccaaccacaccgccuccggcgucuccgccuccugcucccacaacggcaaguccuccuucuacaagaaccuccucuggcucaccggcaagaacggccucuaccccaaccucuccaaguccuacgccaacaacaaggagaaggagguccucguccucuggggcguccaccacccccccaacaucggcgaccagcgcgcccucuaccacaccgagaacgccuacgucuccgucgucuccucccacuacucccgcaaguucacccccgagaucgccaagcgccccaagguccgcgaccaggagggccgcaucaacuacuacuggacccuccucgagcccggcgacaccaucaucuucgaggccaacggcaaccucaucgccccccgcuacgccuucgcccucucccgcggcuucggcuccggcaucaucaacuccaacgcccccauggacgagugcgacgccaagugccagaccccccagggcgccaucaacuccucccuccccuuccagaacguccaccccgucaccaucggcgagugccccaaguacguccgcuccgccaagcuccgcauggucaccggccuccgcaacauccccuccauccagucccgcggccucuucggcgccaucgccggcuucaucgagggcggcuggaccggcauggucgacggcugguacggcuaccaccaccagaacgagcagggcuccggcuacgccgccgaccagaaguccacccagaacgccaucaacggcaucaccaacaaggucaacuccgucaucgagaagaugaacacccaguucaccgccgucggcaaggaguucaacaagcucgagcgccgcauggagaaccucaacaagaaggucgacgacggcuucaucgacaucuggaccuacaacgccgagcuccucguccuccucgagaacgagcgcacccucgacuuccacgacuccaacgucaagaaccucuacgagaaggucaagucccagcucaagaacaacgccaaggagaucggcaacggcugcuucgaguucuaccacaagugcaacgacgagugcauggaguccgucaagaacggcaccuacgacuaccccaaguacuccgaggaguccaagcucaaccgcgagaagaucgacggcgucaagcucgaguccaugggcgucuaccagauccucgccaucuacuccaccgucgccuccucccucguccuccucgucucccucggcgccaucuccuucuggaugugcuccaacggcucccuccagugccgcaucugcaucuga

SEQ ID NO: 97757 - RNA, 1698 nt, Artificial Sequence
  derived and/or modified CDS sequence (opt2) from hemagglutinin__InfluenzaA__ABS71669
augaaggucaagcuccucguccuccucugcaccuucaccgccaccuacgccgacaccaucugcaucggcuaccacgccaacaacuccaccgacaccgucgacaccguccucgagaagaacgucaccgucacccacuccgucaaccuccucgaggacucccacaacggcaagcucugccuccucaagggcaucgccccccuccagcucggcaacugcuccgucgccggcuggauccucggcaaccccgagugcgagcuccucaucuccaaggaguccugguccuacaucgucgagaagcccaaccccgagaacggcaccugcuaccccggccacuucgccgacuacgaggagcuccgcgagcagcucuccuccgucuccuccuucgagcgcuucgagaucuuccccaaggaguccuccuggcccaaccacaccgucaccggcgucuccgccuccugcucccacaacggcgaguccuccuucuacaagaaccuccucuggcucaccggcaagaacggccucuaccccaaccucuccaaguccuacgccaacaacaaggagaaggagguccucguccucuggggcguccaccacccccccaacaucggcgaccagaaggcccucuaccacaccgagaacgccuacgucuccgucgucuccucccacuacucccgcaaguucacccccgagaucgccaagcgccccaagguccgcgaccaggagggccgcaucaacuacuacuggacccuccucgagcccggcgacaccaucaucuucgaggccaacggcaaccucaucgccccccgcuacgccuucgcccucucccgcggcuucggcuccggcaucaucaacuccaacgcccccauggacaagugcgacgccaagugccagaccccccagggcgccaucaacuccucccuccccuuccagaacguccaccccgucaccaucggcgagugccccaaguacguccgcuccgccaagcuccgcauggucaccggccuccgcaacauccccuccauccagucccgcggccucuucggcgccaucgccggcuucaucgagggcggcuggaccggcauggucgacggcugguacggcuaccaccaccagaacgagcagggcuccggcuacgccgccgaccagaaguccacccagaacgccaucaacggcaucaccaacaaggucaacuccgucaucgagaagaugaacacccaguucaccgccgucggcaaggaguucaacaagcucgagcgccgcauggagaaccucaacaagaaggucgacgacggcuucaucgacaucuggaccuacaacgccgagcuccucguccuccucgagaacgagcgcacccucgacuuccacgacuccaacgucaagaaccucuacgagaaggucaagucccagcucaagaacaacgccaaggagaucggcaacggcugcuucgaguucuaccacaagugcaacgacgagugcauggaguccgucaagaacggcaccuacgacuaccccaaguacuccgaggaguccaagcucaaccgcgagaagaucgacggcgucaagcucgaguccaugggcgucuaccagauccucgccaucuacuccaccgucgccuccucccucguccuccucgucucccucggcgccaucuccuucuggaugugcuccaacggcucccuccagugccgcaucugcaucuga

SEQ ID NO: 97758 - RNA, 1698 nt, Artificial Sequence
  derived and/or modified CDS sequence (opt2) from hemagglutinin__InfluenzaA__ABS71671
augaaggucaagcuccucguccuccucugcaccuucaccgccaccuacgccgacaccaucugcaucggcuaccacgccaacaacuccaccgacaccgucgacaccguccucgagaagaacgucaccgucacccacuccgucaaccuccucgaggacucccacaacggcaagcucugccuccucaagggcaucgccccccuccagcucggcaacugcuccgucgccggcuggauccucggcaaccccgagugcgagcuccucaucuccaaggaguccugguccuacaucgucgagaagcccaaccccgagaacggcaccugcuaccccggccacuucgccgacuacgaggagcuccgcgagcagcucuccuccgucuccuccuucgagcgcuucgagauguuccccaaggaguccuccuggcccaaccacaccgucaccggcgucuccgccuccugcucccacaacggcaaguccuccuucuacaagaaccuccucuggcucaccggcaagaacggccucuaccccaaccucuccaaguccuacgccaacaacaaggagaaggagguccucguccucuggggcguccaccacccccccaacaucggcgaccagcgcgcccucuaccacaccgagaacgccuacgucuccgucgucuccucccacuacucccgcaaguucacccccgagaucgccaagcgccccaagguccgcgaccaggagggccgcaucaacuacuacuggacccuccucgagcccggcgacaccaucaucuucgaggccaacggcaaccucaucgccccccgcuacgccuucgcccucucccgcggcuucggcuccggcaucaucaacuccaacgcccccauggacgagugcgacgccaagugccagaccccccagggcgccaucaacuccucccuccccuuccagaacguccaccccgucaccaucggcgagugccccaaguacguccgcuccgccaagcuccgcauggucaccggccuccgcaacauccccuccauccagucccgcggccucuucggcgccaucgccggcuucaucgagggcggcuggaccggcauggucgacggcugguacggcuaccaccaccagaacgagcagggcuccggcuacgccgccgaccagaaguccacccagaacgccaucaacggcaucaccaacaaggucaacuccgucaucgagaagaugaacacccaguucaccgccgucggcaaggaguucaacaagcucgagcgccgcauggagaaccucaacaagaaggucgacgacggcuucaucgacaucuggaccuacaacgccgagcuccucguccuccucgagaacgagcgcacccucgacuuccacgacuccaacgucaagaaccucuacgagaaggucaagucccagcucaagaacaacgccaaggagaucggcaacggcugcuucgaguucuaccacaagugcaacgacgagugcauggaguccgucaagaacggcaccuacgacuaccccaaguacuccgaggaguccaagcucaaccgcgagaagaucgacggcgucaagcucgaguccaugggcgucuaccagauccucgccaucuacuccaccgucgccuccucccucguccuccucgucucccucggcgccaucuccuucuggaugugcuccaacggcucccuccagugccgcaucugcaucuga

SEQ ID NO: 97759 - RNA, 1698 nt, Artificial Sequence
  derived and/or modified CDS sequence (opt2) from hemagglutinin__InfluenzaA__ABS71672
augaaggucaagcuccucguccuccucugcaccuucaccgccaccuacgccgacaccaucugcaucggcuaccacgccaacaacuccaccgacaccgucgacaccguccucgagaagaacgucaccgucacccacuccgucaaccuccucgaggacucccacaacggcaagcucugccuccucaagggcaucgccccccuccagcucggcaacugcuccgucgccggcuggauccucggcaaccccgagugcgagcuccucaucuccaaggaguccugguccuacaucgucgagaagcccaaccccgagaacggcaccugcuaccccggccacuucgccgacuacgaggagcuccgcgagcgccucuccuccgucuccuccuucgagcgcuucgagauguuccccaaggaguccuccuggcccaaccacaccgucaccggcgucuccgccuccugcucccacaacggcaaguccuccuucuacaagaaccuccucuggcucaccggcaagaacggccucuaccccaaccucuccaaguccuacgccaacaacaaggagaaggagguccucguccucuggggcguccaccacccccccaacaucggcgcccagcgcgcccucuaccacaccgagaacgccuacgucuccgucgucuccucccacuacucccgcaaguucacccccgagaucgccaagcgccccaagguccgcgaccaggagggccgcaucaacuacuacuggacccuccucgagcccggcgacaccaucaucuucgaggccaacggcaaccucaucgccccccgcuacgccuucgcccucucccgcggcuucggcuccggcaucaucaacuccaacgcccccauggacgagugcgacgccaagugccagaccccccagggcgccaucaacuccucccuccccuuccagaacguccaccccgucaccaucggcgagugccccaaguacguccgcuccgccaagcuccgcauggucaccggccuccgcaacauccccuccauccagucccgcggccucuucggcgccaucgccggcuucaucgagggcggcuggaccggcauggucgacggcugguacggcuaccaccaccagaacgagcagggcuccggcuacgccgccgaccagaaguccacccagaacgccaucaacggcaucaccaacaaggucaacuccgucaucgagaagaugaacacccaguucaccgccgucggcaaggaguucaacaagcucgagcgccgcauggagaaccucaacaagaaggucgacgacggcuucaucgacaucuggaccuacaacgccgagcuccucguccuccucgagaacgagcgcacccucgacuuccacgacuccaacgucaagaaccucuacgagaaggucaagucccagcucaagaacaacgccaaggagaucggcaacggcugcuucgaguucuaccacaagugcaacgacgagugcauggaguccgucaagaacggcaccuacgacuaccccaaguacuccgaggaguccaagcucucccgcgagaagaucgacggcgucaagcucgaguccaugggcgucuaccagauccucgccaucuacuccaccgucgccuccucccucguccuccucgucucccucggcgccaucuccuucuggaugugcuccaacggcucccuccagugccgcaucugcaucuga

SEQ ID NO: 97760 - RNA, 1698 nt, Artificial Sequence
  derived and/or modified CDS sequence (opt2) from hemagglutinin__InfluenzaA__ABS71673
augaaggucaagcuccucguccuccucugcaccuucaccgccaccuacgccgacaccaucugcaucggcuaccacgccaacaacuccaccgacaccgucgacaccguccucgagaagaacgucaccgucacccacuccgucaaccuccucgaggacucccacaacggcaagcucugccuccucaagggcaucgccccccuccagcucggcaacugcuccgucgccggcuggauccucggcaaccccgagugcgagcuccucaucuccaaggaguccugguccuacaucgucgagacccccaaccccgagaacggcaccugcuaccccggcuacuucgccgacuacgaggagcuccgcgagcagcucuccuccgucuccuccuucgagcgcuucgagaucuuccccaaggaguccuccuggcccaaccacaccgucaccggcgucuccgccuccugcucccacaacggccgcuccuccuucuaccgcaaccuccucuggcucaccggcaagaacggccucuaccccaaccucuccaaguccuacgccaacaacaaggagaaggagguccucguccucuggggcguccaccacccccccaacaucggcgaccagcgcgcccucuaccacaccgagaacaccuacgucuccgucgucuccucccacuacucccgccgcuucacccccgagaucgccaagcgccccaagguccgcgaccaggagggccgcaucaacuacuacuggacccuccucgagcccggcgacaccaucaucuucgaggccaacggcaaccucaucgccccccgcuucgccuucgcccucucccgcggcuucggcuccggcaucaucaccuccaacgcccccauggacgagugcgacgccaagugccagaccccccagggcgccaucaacuccucccuccccuuccagaacguccaccccgucaccaucggcgagugccccaaguacguccgcuccgccaagcuccgcauggccaccggccuccgcaacauccccuccauccagucccgcggccucuucggcgccaucgccggcuucaucgagggcggcuggaccggcauggucgacggcugguacggcuaccaccaccagaacgagcagggcuccggcuacgccgccgaccagaaguccacccagaacgccaucaacggcaucaccaacaaggucaacuccgucaucgagaagaugaacacccaguucaccgccgucggcaaggaguucuccaagcucgagcgccgcauggagaaccucaacaagaaggucgacgacggcuuccucgacaucuggaccuacaacgccgagcuccucguccuccucgagaacgagcgcacccucgacuuccacgacuccaacgucaagaaccucuacgagaaggucaagucccagcucaagaacaacgccaaggagaucggcaacggcugcuucgaguucuaccacaagugcaacgacgagugcauggaguccgucaagaacggcaccuacgacuaccccaaguacuccgaggaguccaagcucaaccgcgagaagaucgacggcgucaagcucgaguccaugggcgucuaccagauccucgccaucuacuccaccgucgccuccucccucguccuccucgucucccucggcgccaucuccuucuggaugugcuccaacggcucccuccagugccgcaucugcaucuga

SEQ ID NO: 97761 - RNA, 1701 nt, Artificial Sequence; identical to SEQ ID NO: 96666
  derived and/or modified CDS sequence (opt2) from hemagglutinin__InfluenzaA__ABS71674

SEQ ID NO: 97762 - RNA, 1701 nt, Artificial Sequence
  derived and/or modified CDS sequence (opt2) from hemagglutinin__InfluenzaA__ABS71675
augaagaccaucaucgcccucuccuacauccucugccucgucuucgcccagaagcuccccggcaacgacaacuccaccgccacccucugccucggccaccacgccguccccaacggcaccaucgucaagaccaucaccaacgaccagaucgaggucaccaacgccaccgagcucguccaguccuccuccaccggcggcaucugcgacuccccccaccagauccucgacggcgagaacugcacccucaucgacgcccuccucggcgacccccagugcgacggcuuccagaacaagaagugggaccucuucgucgagcgcuccaaggcccacuccaacugcuaccccuacgacguccccgacuacgccucccuccgcucccucgucgccuccuccggcacccucgaguucaacaacgaguccuucaacuggaccggcgucacccagaacggcaccuccuccgccugcaagcgccgcuccaacaacuccuucuucucccgccucaacuggcucacccaccucaaguucaaguaccccgcccucaacgucaccaugcccaacaacgagaaguucgacaagcucuacaucuggggcguccaccaccccggcaccgacaacgaccagaucuuccucuacgcccaggccuccggccgcaucaccgucuccaccaagcgcucccagcagaccgucauccccaacaucggcucccgcccccgcguccgcaacauccccucccgcaucuccaucuacuggaccaucgucaagcccggcgacauccuccucaucaacuccaccggcaaccucaucgccccccgcggcuacuucaagauccgcuccggcaaguccuccaucaugcgcuccgacgcccccaucggcaagugcaacuccgagugcaucacccccaacggcuccauccccaacgacaagcccuuccagaacgucaaccgcaucaccuacggcgccugcccccgcuacgucaagcagaacacccucaagcucgccaccggcaugcgcaacguccccgagaagcagacccgcggcaucuucggcgccaucgccggcuucaucgagaacggcugggagggcauggucgacggcugguacggcuuccgccaccagaacuccgagggcaucggccaggccgccgaccucaaguccacccaggccgccaucaaccagaucaacggcaagcucaaccgccucaucggcaagaccaacgagaaguuccaccagaucgagaaggaguucuccgaggucgagggccgcauccaggaccucgagaaguacgucgaggacaccaagaucgaccucugguccuacaacgccgagcuccucgucgcccucgagaaccagcacaccaucgaccucaccgacuccgagaugaacaagcucuucgagcgcaccaagaagcagcuccgcgagaacgccgaggacaugggcaacggcugcuucaagaucuaccacaagugcgacaacgccugcaucggcuccauccgcaacggcaccuacgaccacgacgucuaccgcgacgaggcccucaacaaccgcuuccagaucaagggcgucgagcucaaguccggcuacaaggacuggauccucuggaucuccuucgccaucuccugcuuccuccucugcgucgcccuccucggcuucaucaugugggccugccagaagggcaacauccgcugcaacaucugcaucuga

SEQ ID NO: 97763 - RNA, 1701 nt, Artificial Sequence
  derived and/or modified CDS sequence (opt2) from hemagglutinin__InfluenzaA__ABS71676
augaagaccaucaucgcccucuccuacauccucugccucgucuucgcccagaagcuccccggcaucgacaacuccaccgccacccucugccucggccaccacgccguccccaacggcaccaucgucaagaccaucaccaacgaccagaucgaggucaccaacgccaccgagcucguccagaacuccuccaccggcggcaucugcgacuccccccaccagauccucgacggcgagaacugcacccucaucgacgcccuccucggcgacccccagugcgacggcuuccagaacaagaagugggaccucuucgucgagcgcuccaaggccuacuccaacugcuaccccuacgacguccccgacuacgccucccuccgcucccucgucgccuccuccggcacccucgaguucaacaacgaguccuucaacuggaccggcgucacccagaacggcaccuccuccgccugcaagcgcggcuccaacaacuccuucuucucccgccucaacuggcucacccacuccaaguucaaguaccccgcccucaacgucaccaugcccaacaacgaggaguucgacaagcucuacaucuggggcguccaccaccccggcaccgacaacgaccagaucuuccucuacgcccaggccuccggccgcaucaccgucuccaccaagcgcucccagcagaccgucauccccaacaucggcucccgcccccgcguccgcaacauccccucccgcaucuccaucuacuggaccaucgucaagcccggcgacauccuccucaucaacuccaccggcaaccucaucgccccccgcggcuacuucaucauccgcuccggcaaguccuccaucaugcgcuccgacgcccccaucggcaagugcaacuccgagugcaucacccccaacggcuccauccccaacgacaagcccuuccagaacgucaaccgcaucaccuacggcgccugcccccgcuacgucaagcagaacacccucaagcucgccaccggcaugcgcaacguccccgagaagcagacccgcggcaucuucggcgccaucgccggcuucaucgagaacggcugggagggcauggucgacggcugguacggcuuccgccaccagaacuccgagggcaucggccaggccgccgaccucaaguccacccaggccgccaucgaccagaucaacggcaagcucaaccgccucaucggcaagaccaacgagaaguuccaccagaucgagaaggaguucuccgaggucgagggccgcauccaggaccucgagaaguacgucgaggacaccaagaucgaccucugguccuacaacgccgagcuccucgucgcccucgagaaccagcacaccaucgaccucaccgacuccgagaugaacaagcucuucgagaagaccaagaagcagcuccgcgagaacgccgaggacaugggcaacggcugcuucaagaucuaccacaagugcgacaacgccugcaucggcuccauccgcaacggcaccuacgaccacgacgucuaccgcgacgaggcccucaacaaccgcuuccagaucaagggcgucgagcucaaguccggcuacaaggacuggauccucuggaucuccuucgccaucuccugcuuccuccucugcgucgcccuccucggcuucaucaugugggccugccagaagggcaacauccgcugcaacaucugcaucuga

SEQ ID NO: 97764 - RNA, 1701 nt, Artificial Sequence
  derived and/or modified CDS sequence (opt2) from hemagglutinin__InfluenzaA__ABS71677
augaagaccaucaucgcccucuccuacauccucugccucgucuucgcccagaagcuccccggcaucgacaacuccaccgccacccucugccucggccaccacgccguccccaacggcaccaucgucaagaccaucaccgacgaccagaucgaggucaccaacgccaccgagcucguccagaacuccuccaccggcggcaucugcgacuccccccaccagauccucgacggcgagaacugcacccucaucgacgcccuccucggcgacccccagugcgacggcuuccagaacaagaagugggaccucuucgucgagcgcuccaaggccuacuccaacugcuaccccuacgacguccccgacuacgccucccuccgcucccucgucgccuccuccggcacccucgaguucaacaacgaguccuucaacuggaccggcgucacccagaacggcaccuccuccgccugcaagcgcggcuccaacaacuccuucuucucccgccucaacuggcucacccacuccaaguucaaguaccccgcccucaacgucaccaugcccaacaacgaggaguucgacaagcucuacaucuggggcguccaccaccccggcaccgacaacgaccagaucuuccucuacgcccaggccuccggccgcaucaccgucuccaccaagcgcucccagcagaccgucauccccaacaucggcucccgcccccgcguccgcaacauccccucccgcaucuccaucuacuggaccaucgucaagcccggcgacauccuccucaucaacuccaccggcaaccucaucgccccccgcggcuacuucaagauccgcuccggcaaguccuccaucaugcgcuccgacgcccccaucgacaagugcaacuccgagugcaucacccccaacggcuccauccccaacgacaagcccuuccagaacgucaaccgcaucaccuacggcgccugcccccgcuacgucaagcagaacacccucaagcucgccaccggcaugcgcaacguccccgagaagcagacccgcggcaucuucggcgccaucgccggcuucaucgagaacggcugggagggcauggucgacggcugguacggcuuccgccaccagaacuccgagggcaucggccaggccgccgaccucaaguccacccaggccgccaucgaccagaucaacggcaagcucaaccgccucaucggcaagaccaacgagaaguuccaccagaucgagaaggaguucuccgaggucgagggccgcauccaggaccucgagaaguacgucgaggacaccaagaucgaccucugguccuacaacgccgagcuccucgucgcccucgagaaccagcacaccaucgaccucaccgacuccgagaugaacaagcucuucgagaagaccaagaagcagcuccgcgagaacgccgaggacaugggcaacggcugcuucaagaucuaccacaagugcgacaacgccugcaucggcuccauccgcaacggcaccuacgaccacgacgucuaccgcgacgaggcccucaacaaccgcuuccagaucaagggcgucgagcucaaguccggcuacaaggacuggauccucuggaucuccuucgccaucuccugcuuccuccucugcgucgcccuccucggcuucaucaugugggccugccagaagggcaacauccgcugcaacaucugcaucuga

SEQ ID NO: 97765 - RNA, 1701 nt, Artificial Sequence
  derived and/or modified CDS sequence (opt2) from hemagglutinin__InfluenzaA__ABS71679
augaagaccaucaucgcccucuccuacauccucugccucgucuucgcccagaagcuccccggcaucgacaacuccaccgccacccucugccucggccaccacgccguccccaacggcaccaucgucaagaccaucaccaacgaccagaucgaggucaccaacgccaccgagcucguccaguccuccuccaccggcggcaucugcgacuccccccaccagauccucgacggcgagaacugcacccucaucgacgcccuccucggcgacccccagugcgacggcuuccagaacaagaagugggaccucuucgucgagcgcuccaaggccuacuccaacugcuaccccuacgacguccccgacuacgccucccuccgcucccucgucgccuccuccggcacccucgaguucaacaacgaguccuucaacuggaccggcgucacccagaacggcaccuccuccgccugcaagcgcggcuccaacaacuccuucuucucccgccucaacuggcucacccacuccaaguucaaguaccccgcccucaacgucaccaugcccaacaacgaggaguucgacaagcucuacaucuggggcguccaccaccccggcaccgacaacgaccagaucuuccucuacgcccaggccuccggccgcaucaccgucuccaccaagcgcucccagcagaccgucauccccaacaucggcucccgcccccgcguccgcaacauccccucccgcaucuccaucuacuggaccaucgucaagcccggcgacauccuccucaucaacuccaccggcaaccucaucgccccccgcggcuacuucaagauccgcuccggcaaguccuccaucaugcgcuccgacgcccccaucggcaagugcaacuccgagugcaucacccccaacggcuccauccccaacgacaagcccuuccagaacgucaaccgcaucaccuacggcgccugcccccgcuacgucaagcagaacacccucaagcucgccaccggcaugcgcaacguccccgagaagcagacccgcggcaucuucggcgccaucgccggcuucaucgagaacggcugggagggcauggucgacggcugguacggcuuccgccaccagaacuccgagggcaucggccaggccgccgaccucaaguccacccaggccgccaucgaccagaucaacggcaagcucaaccgccucaucggcaagaccaacgagaaguuccaccagaucgagaaggaguucuccgaggucgagggccgcauccaggaccucgagaaguacgucgaggacaccaagaucgaccucugguccuacaacgccgagcuccucgucgcccucgagaaccagcacaccaucgaccucaccgacuccgagaugaacaagcucuucgagaagaccaagaagcagcuccgcgagaacgccgaggacaugggcaacggcugcuucaagaucuaccacaagugcgacaacgccugcaucggcuccauccgcaacggcaccuacgaccacgacgucuaccgcgacgaggcccucaacaaccgcuuccagaucaagggcgucgagcucaaguccggcuacaaggacuggauccucuggaucuccuucgccaucuccugcuuccuccucugcgucgcccuccucggcuucaucaugugggccugccagaagggcaacauccgcugcaacaucugcaucuga

SEQ ID NO: 97766 - RNA, 1701 nt, Artificial Sequence; identical to SEQ ID NO: 97765
  derived and/or modified CDS sequence (opt2) from hemagglutinin__InfluenzaA__ABS71680

SEQ ID NO: 97767 - RNA, 1701 nt, Artificial Sequence
  derived and/or modified CDS sequence (opt2) from hemagglutinin__InfluenzaA__ABS71682
augaagaccaucaucgcccucuccuacauccucugccucgucuucgcccagaagcuccccggcaacgacaacuccaccgccacccucugccucggccaccacgccguccccaacggcaccaucgucaagaccaucaccaacgaccagaucgaggucaccaacgccaccgagcucguccaguccuccuccaccggcggcaucugcgacuccccccaccagauccucgacggcgagaacugcacccucaucgacgcccuccucggcgacccccagugcgacggcuuccagaacaagaagugggaccucuucgucgagcgcuccaaggccuacuccaacugcuaccccuacgacguccccgacuacgccucccuccgcucccucaucgccuccuccggcacccucgaguucaacaacgaguccuucaacuggaccggcgucacccagaacggcaccuccuccgccugcaagcgccgcuccaacaacuccuucuucucccgccucaacuggcucacccaccucaaguucaaguaccccgcccucaacgucaccaugcccaacaacgagaaguucgacaagcucuacaucuggggcguccaccaccccggcaccgacaacgaccagaucuuccucuacgcccaggccuccggccgcaucaccgucuccaccaagcgcucccagcagaccgucauccccaacaucggcucccgcccccgcguccgcaacauccccucccgcaucuccaucuacuggaccaucgucaagcccggcgacauccuccucaucaacuccaccggcaaccucaucgccccccgcggcuacuucaagauccgcuccggcaaguccuccaucaugcgcuccgacgcccccaucggcaagugcaacuccgagugcaucacccccaacggcuccauccccaacgacaagcccuuccagaacgucaaccgcaucaccuacggcgccugcccccgcuacgucaagcagaacacccucaagcucgccaccggcaugcgcaacguccccgagaagcagacccgcggcaucuucggcgccaucgccggcuucaucgagaacggcugggagggcauggucgacggcugguacggcuuccgccaccagaacuccgagggcaucggccaggccgccgaccucaaguccacccaggccgccaucgaccagaucaacggcaagcucaaccgccucaucggcaagaccaacgagaaguuccaccagaucgagaaggaguucuccgaggucgagggccgcauccaggaccucgagaaguacgucgaggacaccaagaucgaccucugguccuacaacgccgagcuccucgucgcccucgagaaccagcacaccaucgaccucaccgacuccgagaugaacaagcucuucgagaagaccaagaagcagcuccgcgagaacgccgaggacaugggcaacggcugcuucaagaucuaccacaagugcgacaacgccugcaucggcuccauccgcaacggcaccuacgaccacgacgucuaccgcgacgaggcccucaacaaccgcuuccagaucaagggcgucgagcucaaguccggcuacaaggacuggauccucuggaucuccuucgccaucuccugcuuccuccucugcgucguccuccucggcuucaucaugugggccugccagaagggcaacauccgcugcaacaucugcaucuga

SEQ ID NO: 97768 - RNA, 1701 nt, Artificial Sequence
  derived and/or modified CDS sequence (opt2) from hemagglutinin__InfluenzaA__ABU80177
augaagaccaucaucgcccucuccuacauccucugccucgucuucgcccagaagcuccccgucaacgacaacuccaccgccacccucugccucggccaccacgccguccccaacggcacccucgucaagaccaucaccaacgaccacaucgaggucaccaacgccaccgagcucguccaguccuccuccaccggccgcaucugcgacuccccccaccagauccucgacggcgagaacugcacccucaucgacgcccuccucggcgacccccacugcgacggcuuccagaacaaggagugggaccucuucgucgagcgcuccaccgccuacuccaacugcuaccccuacgacguccccgacuacgccucccuccgcucccucgucgccuccuccggcacccucgaguucaacaacgaguccuucaacuggaccggcgucgcccagaacggcaccuccuccuccugcaagcgccgcuccaucaaguccuucuucucccgccucaacuggcuccaccagcucaaguacaaguaccccgcccucaacgucaccaugcccaacaacgagaaguucgacaagcucuacaucuggggcguccaccaccccuccaccgacuccgaccagaucucccucuacgcccaggccuccggccgcgucaccgucuccaccaagcgcucccagcagaccgucauccccaacaucggcucccgccccuggguccgcggcgucuccucccgcaucuccaucuacuggaccaucgucaagcccggcgacauccuccucaucaacuccaccggcaaccucaucgccccccgcggcuacuucaagauccgcuccggcaaguccuccaucaugcgcuccaacgcccccaucggcaagugcaacuccgagugcaucacccccaacggcuccauccccaacgacaagcccuuccagaacgucaaccgcaucaccuacggcgccugcccccgcuacgucaagcagaacacccucaagcucgccaccggcaugcgcaacguccccgagaagcagacccgcggcaucuucggcgccaucgccggcuucaucgagaacggcugggagggcauggucgacggcugguacggcuuccgccaccagaacuccgagggcaccggccaggccgccgaccucaaguccacccaggccgccaucaaccagaucaacggcaagcucaaccgccucaucgagaagaccaacgagaaguuccaccagaucgagaaggaguucuccgaggucgagggccgcauccaggaccucgagaaguacgucgaggacaccaagaucgaccucugguccuacaacgccgagcuccucgucgcccucgagaaccagcacaccaucgaccucaccgacuccgagaugaacaagcucuucgagcgcacccgcaagcagcuccgcgagaacgccgaggacaugggcaacggcugcuucaagaucuaccacaagugcgacaacgccugcaucggcuccauccgcaacggcaccuacgaccacgacgucuaccgcgacgaggcccucaacaaccgcuuccagaucaagggcgucgagcucaaguccggcuacaaggacuggauccucuggaucuccuucgccaucuccugcuuccuccucugcgucguccuccucggcuucaucaugugggccugccagaagggcaacauccgcugcaacaucugcaucuga

SEQ ID NO: 97769 - RNA, 1698 nt, Artificial Sequence
  derived and/or modified CDS sequence (opt2) from hemagglutinin__InfluenzaA__ABU80298
augaaggucaagcuccucguccuccucugcaccuucaccgccaccuacgccgacaccaucugcaucggcuaccacgccaacaacuccaccgacaccgucgacaccguccucgagaagaacgucaccgucacccacuccgucaaccuccucgaggacucccacaacggcaagcucugccuccucaagggcaucgccccccuccagcucggcaacugcuccgucgccggcuggauccucggcaaccccgagugcgagcuccucaucuccaaggaguccugguccuacaucgucgagacccccaaccccgagaacggcaccugcuaccccggcuacuucgccgacuacgaggagcuccgcgagcagcucuccuccgucuccuccuucgagcgcuucgagaucuuccccaaggaguccuccuggcccaaccacaccgucaccggcgucuccgccuccugcucccacaacggcaaguccuccuucuaccgcaaccuccucuggcucaccggcaagaacggccucuaccccaaccucuccaaguccuacgccaacaacaaggagaaggagguccucguccucuggggcguccaccacccccccaacaucggcgaccagcgcgcccucuaccacaccgagaacgccuacgucuccgucgucuccucccacuacucccgccgcuucacccccgagaucgccaagcgccccaagguccgcgaccaggagggccgcaucaacuacuacuggacccuccucgagcccggcgacaccaucaucuucgaggccaacggcaaccucaucgccccccgcuacgccuucgcccucucccgcggcuucggcuccggcaucaucaccuccaacgcccccauggacgagugcgacgccaagugccagaccccccagggcgccaucaacuccucccuccccuuccagaacguccaccccgucaccaucggcgagugccccaaguacguccgcuccgccaagcuccgcauggccaccggccuccgcaacauccccuccauccagucccgcggccucuucggcgccaucgccggcuucaucgagggcggcuggaccggcauggucgacggcugguacggcuaccaccaccagaacgagcagggcuccggcuacgccgccgaccagaaguccacccagaacgccaucaacggcaucaccaacaaggucaacuccgucaucgagaagaugaacacccaguucaccgccgucggcaaggaguucaacaagcucgagcgccgcauggagaaccucaacaagaaggucgacgacggcuuccucgacaucuggaccuacaacgccgagcuccucguccuccucgagaacgagcgcacccucgacuuccacgacuccaacgucaagaaccucuacaagaaggucaagucccagcucaagaacaacgccaaggagaucggcaacggcugcuucgaguucuaccacaagugcaacaacgagugcauggaguccgucaagaacggcaccuacgacuaccccaaguacuccgaggaguccaagcucaaccgcgagaagaucgacggcgucaagcucgaguccaugggcgucuaccagauccucgccaucuacuccaccgucgccuccucccucguccuccucgucucccucggcgccaucuccuucuggaugugcuccaacggcucccuccagugccgcaucugcaucuga

SEQ ID NO: 97770 - RNA, 1701 nt, Artificial Sequence
  derived and/or modified CDS sequence (opt2) from hemagglutinin__InfluenzaA__ABU80320
augaagaccaucaucgcccucuccuacauccucugccucgucuucgcccagaagcuccccggcaacgacaacuccaccgccacccucugccucggccaccacgccguccccaacggcacccucgucaagaccaucaccaacgaccagaucgaggucaccaacgccaccgagcucguccaguccuccuccaccggcggcaucugcgacuccccccaccagauccucgacggcgagaacugcacccucaucgacgcccuccucggcgacccccacugcgacuccuuccagaacaaggagugggaccucuucgucgagcgcuccaaggccuacuccaacugcuaccccuacgacguccccgacuacgccucccuccgcucccucgucgccuccuccggcacccucgaguucaacaacgaguccuucaacuggaccggcgucgcccagaacggcaccuccuccgccugcaagcgccgcuccaacaaguccuucuucucccgccucaacuggcuccaccagcucaaguacaaguaccccgcccucaacgucaccaugcccaacaacgagaaguucgacaagcucuacaucuggggcguccaccaccccuccaccgacuccgaccagaucucccucuacgcccaggcccccggccgcgucaccgucuccaccaagcgcucccagcagaccgucauccccaacaucggcucccgccccuggguccgcggcgucuccuccaucaucuccaucuacuggaccaucgucaagcccggcgacauccuccucaucaacugcaccggcaaccucaucgccccccgcggcuacuucaagauccgcuccggcaaguccuccaucaugcgcuccgacgccuccaucggcaagugcaacuccgagugcaucacccccaacggcuccauccccaacgacaagcccuuccagaacgucaaccgcaucaccuacggcgccugcccccgcuacgucaagcagaacacccucaagcucgccaccggcaugcgcaacguccccgagaagcagacccgcggcaucuucggcgccaucgccggcuucaucgagaacggcugggagggcauggucgacggcugguacggcuuccgccaccagaacuccgagggcaccggccaggccgccgaccucaaguccacccaggccgccaucaaccagaucaacggcaagcucaaccgccucaucgagaagaccaacgagaaguuccaccagaucgagaaggaguucuccgaggucgagggccgcauccaggaccucgagaaguacgucgaggacaccaagaucgaccucugguccuacaacgccgagcuccucgucgcccucgagaaccagcacaccaucgaccucaccgacuccgagaugaacaagcucuucgagcgcaccaagaagcagcuccgcgagaacgccgaggacaugggcaacggcugcuucaagaucuaccacaagugcgacaacgccugcaucggcuccauccgcaacggcaccuacgaccacgacgucuaccgcgacgaggcccucaacaaccgcuuccagaucaagggcgucgagcucaaguccggcuacaaggacuggauccucuggaucuccuucgccaucuccugcuuccuccucugcgucguccuccucggcuucaucaugugggccugccagaagggcaacauccgcugcaacaucugcaucuga

SEQ ID NO: 97771 - RNA, 1701 nt, Artificial Sequence; identical to SEQ ID NO: 97075
  derived and/or modified CDS sequence (opt2) from hemagglutinin__InfluenzaA__ABU80331

SEQ ID NO: 97772 - RNA, 1701 nt, Artificial Sequence
  derived and/or modified CDS sequence (opt2) from hemagglutinin__InfluenzaA__ABU80400
augaaggccauccuccucguccuccucuacaccuucaccgccgccaacgccgacacccucugcaucggcuaccacgccaacaacuccaccgacaccgucgacaccguccucgagaagaacgucaccgucacccacuccgucaaccuccucgaggaccgccacaacggcaagcucugcaagcuccgcggcgucgccccccuccaccucggcaagugcaacaucgccggcuggcuccucggcaaccccgagugcgagcuccucuucaccgccuccuccugguccuacaucgucgagaccuccaacuccgacaacggcaccugcuaccccggcgacuucaucaacuacgaggagcuccgcgagcagcucuccuccgucuccuccuucgagcgcuucgagaucuuccccaaggccuccuccuggcccaaccacgagaccaaccgcggcgucaccgccgccugccccuacgccggcgccaacuccuucuaccgcaaccucaucuggcucgucaagaagggcaacuccuaccccaagcucuccaaguccuacgucaacaacaaggagaaggagguccucguccucuggggcauccaccacccccccaccuccaccgaccagcagucccucuaccagaacgccgacgccuacgucuucgucggcuccuccaaguacaacaagaaguucaagcccgagaucgccacccgccccaagguccgcggccaggccggccgcaugaacuacuacuggacccucgucgagcccggcgacaccaucaccuucgaggccaccggcaaccucgucgucccccgcuacgccuucgccaugaagcgcggcuccggcuccggcaucaucaucuccgacacccccguccacgacugcaacaccaccugccagacccccaagggcgccaucaacaccucccuccccuuccagaacauccaccccgucaccaucggcgagugccccaaguacgucaaguccaccaagcuccgcauggccaccggccuccgcaacauccccuccauccagucccgcggccucuucggcgccaucgccggcuucaucgagggcggcuggaccggcaugaucgacggcugguacggcuaccaccaccagaacgagcagggcuccggcuacgccgccgaccgcaaguccacccagaacgccaucgacggcaucaccaacaaggucaacuccgucaucgagaagaugaacacccaguucaccgccgucggcaaggaguucaaccaccucgagaagcgcaucgagaaccucaaccgcaaggucgacgacggcuuccucgacaucuggaccuacaacgccgagcuccucguccuccucgagaacgagcgcacccucgacuaccacgacuccaacgucaagaaccucuacgagaagguccgcucccagcucaagaacaacgccaaggagaucggcaacggcugcuucgaguucuaccacaagugcgacgacaccugcauggaguccgucaagaacggcaccuacgacuaccccaaguacuccgaggaguccaagcucaaccgcgaggagaucgacggcgucaagcucgaguccacccgcaucuaccagauccucgccaucuacuccaccgucgccuccucccucguccuccucgucucccucggcgccaucuccuucuggaugugcuccaacggcucccuccagugccgcaucugcaucuga

SEQ ID NO: 97773 - RNA, 1701 nt, Artificial Sequence
  derived and/or modified CDS sequence (opt2) from hemagglutinin__InfluenzaA__ABU92572
augaagaccaucaucgcccucuccuacauccucugccucgucuucacccagaagcuccccggcaacgacaacuccaccgccacccucugccucggccaccacgccguccccaacggcacccucgucaagaccaucaccaacgaccagaucgaggucaccaacgccaccgagcucguccaguccuccuccaccggccgcaucugcgacuccccccaccagauccucgacggcgagaacugcacccucaucgacgcccuccucggcgacccccacugcgacggcuuccagaacaaggagugggaccucuucgucgagcgcuccaaggccuacuccaacugcuaccccuacgacguccccgacuacgucucccuccgcucccucgucgccuccuccggcacccucgaguucaacaacgaguccuucaacuggaccggcgucgcccagaacggcaccuccuccgccugcaagcgccgcuccgacaaguccuucuucucccgccucaacuggcuccaccagcucaaguacaaguaccccgcccucaacgucaccaugcccaacaacgagaaguucgacaagcucuacaucuggggcguccaccaccccggcaccgacuccgaccagaucucccucuacgcccaggccuccggccgcgucaccgucuccaccaagcgcucccagcagaccgucauccccaacaucggcucccgccccuggguccgcggcgucuccucccgcaucuccaucuacuggaccaucgucaagcccggcgacauccuccucaucaacuccaccggcaaccucaucgccccccgcggcuacuucaagauccgcuccggcaaguccuccaucaugcgcuccgacgcccccaucggcaagugcaacuccgagugcaucacccccaacggcuccauccccaacgacaagcccuuccagaacgucaaccgcaucaccuacggccccugcccccgcuacgucaagcagaacacccucaagcucgccaccggcaugcgcaacguccccgagaagcagacccgcggcaucuucggcgccaucgccggcuucaucgagaacggcugggagggcaugauggacggcugguacggcuuccgccaccagaacuccgagggcaccggccaggccgccgaccucaaguccacccaggccgccaucaaccagaucaacggcaagcucaaccgccucaucgagaagaccaacgagaaguuccaccagaucgagaaggaguucuccgaggucgagggccgcauccaggaccucgagaaguacgucgaggacaccaagaucgaccucugguccuacaacgccgagcuccucgucgcccucgagaaccagcacaccaucgaccucaccgacuccgagaugaacaagcucuucgagcgcaccaagaagcagcuccgcgagaacgccgaggacaugggcaacggcugcuucaagaucuaccacaagugcgacaacgccugcaucggcuccauccgcaacggcaccuacgaccacgacgucuaccgcgacgaggcccucaacaaccgcuuccagaucaagggcgucgagcucaaguccggcuacaaggacuggauccucuggaucuccuucgccaucuccugcuuccuccucugcaucguccuccucggcuucaucaugugggccugccagaagggcaacauccgcugcaacaucugcaucuga

SEQ ID NO: 97774 - RNA, 1701 nt, Artificial Sequence
  derived and/or modified CDS sequence (opt2) from hemagglutinin__InfluenzaA__ABU92573
augaagaccaucaucgcccucuccuacauccucugccucgucuucgcccagaagcuccccggcaacgacaacuccaccgccacccucugccucggccaccacgccguccccaacggcacccucgucaagaccaucaccaacgaccagaucgaggucaccaacgccaccgagcucguccaguccuccuccaccggccgcaucugcgacuccccccaccagauccucgacggcgagaacugcacccucaucgacgcccuccucggcgacccccacugcgacggcuuccagaacaaggagugggaccucuucgucgagcgcuccaaggccuacuccaacugcuaccccuacgacguccccgacuacgucucccuccgcucccucgucgccuccuccggcacccucgaguucaacaacgaguccuucaacuggaccggcgucgcccagaacggcaccuccuccgccugcaagcgccgcuccgacaaguccuucuucucccgccucaacuggcuccaccagcucaaguacaaguaccccgcccucaacgucaccaugcccaacaacgagaaguucgacaagcucuacaucuggggcguccaccaccccggcaccgacuccgaccagaucucccucuacgcccaggccuccggccgcgucaccgucuccaccaagcgcucccagcagaccgucauccccaacaucggcucccgccccuggguccgcggcgucuccucccgcaucuccaucuacuggaccaucgucaagcccggcgacauccuccucaucaacuccaccggcaaccucaucgccccccgcggcuacuucaagauccgcuccggcaaguccuccaucaugcgcuccgacgcccccaucggcaagugcaacuccgagugcaucacccccaacggcuccauccccaacggcaagcccuuccagaacgucaaccgcaucaccuacggcgccugcccccgcuacgucaagcagaacacccucaagcucgccaccggcaugcgcaacguccccgagaagcagacccgcggcaucuucggcgccaucgccggcuucaucgagaacggcugggagggcaugauggacggcugguacggcuuccgccaccagaacuccgagggcaccggccaggccgccgaccucaaguccacccaggccgccaucaaccagaucaacggcaagcucaaccgccucaucaagaagaccaacgagaaguuccaccagaucgagaaggaguucuccgaggucgagggccgcauccaggaccucgagaaguacgucgaggacaccaagaucgaccucugguccuacaacgccgagcuccucgucgcccucgagaaccagcacaccaucgaccucaccgacuccgagaugaacaagcucuucgagcgcaccaagaagcagcuccgcgagaacgccgaggacaugggcaacggcugcuucaagaucuaccacaagugcgacaacgccugcaucggcuccauccgcaacggcaccuacgaccacgacgucuaccgcgacgaggcccucaacaaccgcuuccagaucaagggcgucgagcucaaguccggcuacaaggacuggauccucuggaucuccuucgccaucuccugcuuccuccucugcaucguccuccucggcuucaucaugugggccugccagaagggcaacauccgcugcaacaucugcaucuga

SEQ ID NO: 97775 - RNA, 1701 nt, Artificial Sequence
  derived and/or modified CDS sequence (opt2) from hemagglutinin__InfluenzaA__ABU92575
augaagaccaucaucgcccucuccuacauccucugccucgucuucgcccagaagcuccccggcaacgacaacuccaccgccacccucugccucggccaccacgccguccccaacggcacccucgucaagaccaucaccaacgaccagaucgaggucaccaacgccaccgagcucguccaguccuccuccaccggccgcaucugcgacuccccccaccagauccucgacggcgagaacugcacccucaucgacgcccuccucggcgacccccacugcgacggcuuccagaacaaggagugggaccucuucgucgagcgcuccaaggccuacuccaacugcuaccccuacgacguccccgacuacgucucccuccgcucccucgucgccuccuccggcacccucgaguucaacaacgaguccuucaacuggaccggcgucgcccagaacggcaccuccuccgccugcaagcgccgcuccgacaaguccuucuucucccgccucaacuggcuccaccagcucaaguacaaguaccccgcccucaacgucaccaugcccaacaacgagaaguucgacaagcucuacaucuggggcguccaccaccccggcaccgacuccgaccagaucucccucuacgcccaggccuccggccgcgucaccgucuccaccaagcgcucccagcagaccgucauccccaacaucggcuccaagcccuggguccgcggcgucuccucccgcaucuccaucuacuggaccaucgucaagcccggcgacauccuccucaucaacuccaccggcaaccucaucgccccccgcggcuacuucaagauccgcuccggcaaguccuccaucaugcgcuccgacgcccccaucggcaagugcaacuccgagugcaucacccccaacggcuccauccccaacgacaagcccuuccagaacgucaaccgcaucaccuacggccccugcccccgcuacgucaagcagaacacccucaagcucgccaccggcaugcgcaacguccccgagaagcagacccgcggcaucuucggcgccaucgccggcuucaucgagaacggcugggagggcaugauggacggcugguacggcuuccgccaccagaacuccgagggcaccggccaggccgccgaccucaaguccacccaggccgccaucaaccagaucaacggcaagcucaaccgccucaucgagaagaccaacgagaaguuccaccagaucgagaaggaguucuccgaggucgagggccgcauccaggaccucgagaaguacgucgaggacaccaagaucgaccucugguccuacaacgccgagcuccucgucgcccucgagaaccagcacaccaucgaccucaccgacuccgagaugaacaagcucuucgagcgcaccaagaagcagcuccgcgagaacgccgaggacaugggcaacggcugcuucaagaucuaccacaagugcgacaacgccugcaucggcuccauccgcaacggcaccuacgaccacgacgucuaccgcgacgaggcccucaacaaccgcuuccagaucaagggcgucgagcucaaguccggcuacaaggacuggauccucuggaucuccuucgccaucuccugcuuccuccucugcaucguccuccucggcuucaucaugugggccugccagaagggcaacauccgcugcaacaucugcaucuga

SEQ ID NO: 97776 - RNA, 1701 nt, Artificial Sequence; identical to SEQ ID NO: 96087
  derived and/or modified CDS sequence (opt2) from hemagglutinin__InfluenzaA__ABU92576

SEQ ID NO: 97777 - RNA, 1701 nt, Artificial Sequence; identical to SEQ ID NO: 96087
  derived and/or modified CDS sequence (opt2) from hemagglutinin__InfluenzaA__ABU92577

SEQ ID NO: 97778 - RNA, 1701 nt, Artificial Sequence; identical to SEQ ID NO: 96108
  derived and/or modified CDS sequence (opt2) from hemagglutinin__InfluenzaA__ABU92578

SEQ ID NO: 97779 - RNA, 1701 nt, Artificial Sequence; identical to SEQ ID NO: 96108
  derived and/or modified CDS sequence (opt2) from hemagglutinin__InfluenzaA__ABU92579

SEQ ID NO: 97780 - RNA, 1701 nt, Artificial Sequence; identical to SEQ ID NO: 96108
  derived and/or modified CDS sequence (opt2) from hemagglutinin__InfluenzaA__ABU92580

SEQ ID NO: 97781 - RNA, 1701 nt, Artificial Sequence; identical to SEQ ID NO: 97773
  derived and/or modified CDS sequence (opt2) from hemagglutinin__InfluenzaA__ABU92581

SEQ ID NO: 97782 - RNA, 1701 nt, Artificial Sequence
  derived and/or modified CDS sequence (opt2) from hemagglutinin__InfluenzaA__ABU92582
augaagaccaucaucgcccucuccuacauccucugccucgucuucgcccagaagcuccccggcaacgacaacuccaccgccacccucugccucggccaccacgccguccccaacggcacccucgucaagaccaucaccaacgaccagaucgaggucaccaacgccaccgagcucguccaguccuccuccaccggccgcaucugcgacuccccccaccagauccucgacggcgagaacugcacccucaucgacgcccuccucggcgacccccacugcgacggcuuccagaacaaggagugggaccucuucgucgagcgcuccaaggccuacuccaacugcuaccccuacgacguccccgacuacgucucccuccgcucccucgucgccuccuccggcacccucgaguucaacaacgaguccuucaacuggaccggcgucgcccagaacggcaccuccuccgccugcaagcgccgcuccgacaaguccuucuucucccgccucaacuggcuccaccagcucaaguacaaguaccccgcccagaacgucaccaugcccaacaacgagaaguucgacaagcucuacaucuggggcguccaccaccccggcaccgacuccgaccagaucucccucuacgcccaggccuccggccgcgucaccgucuccaccaagcgcucccagcagaccgucauccccaacaucggcucccgccccuggguccgcggcgucuccucccgcaucuccaucuacuggaccaucgucaagcccggcgacauccuccucaucaacuccaccggcaaccucaucgccccccgcggcuacuucaagauccgcuccggcaaguccuccaucaugcgcuccgacgcccccaucggcaagugcaacuccgagugcaucacccccaacggcuccauccccaacgacaagcccuuccagaacgucaaccgcaucaccuacggcgccugcccccgcuacgucaagcagaacacccucaagcucgccaccggcaugcgcaacguccccgagaagcagacccgcggcaucuucggcgccaucgccggcuucaucgagaacggcugggagggcaugauggacggcugguacggcuuccgccaccagaacuccgagggcaccggccaggccgccgaccucaaguccacccaggccgccaucaaccagaucaacggcaagcucaaccgccucaucgagaagaccaacgagaaguuccaccagaucgagaaggaguucuccgaggucgagggccgcauccaggaccucgagaaguacgucgaggacaccaagaucgaccucugguccuacaacgccgagcuccucgucgcccucgagaaccagcacaccaucgaccucaccgacuccgagaugaacaagcucuucgagcgcaccaagaagcagcuccgcgagaacgccgaggacaugggcaacggcugcuucaagaucuaccacaagugcgacaacgccugcaucggcuccauccgcaacggcaccuacgaccacgacgucuaccgcgacgaggcccucaacaaccgcuuccagaucaagggcgucgagcucaaguccggcuacaaggacuggauccucuggaucuccuucgccaucuccugcuuccuccucugcaucguccuccucggcuucaucaugugggccugccagaagggcaacauccgcugcaacaucugcaucuga

SEQ ID NO: 97783 - RNA, 1701 nt, Artificial Sequence; identical to SEQ ID NO: 97782
  derived and/or modified CDS sequence (opt2) from hemagglutinin__InfluenzaA__ABU92583

SEQ ID NO: 97784 - RNA, 1701 nt, Artificial Sequence
  derived and/or modified CDS sequence (opt2) from hemagglutinin__InfluenzaA__ABU92584
augaagaccaucaucgcccucuccuacauccucugccucgucuucgcccagaagcuccccggcaacgacaacuccaccgccacccucugccucggccaccacgccguccccaacggcacccucgucaagaccaucaccaacgaccagaucgaggucaccaacgccaccgagcucguccaguccuccuccaccggccgcaucugcgacuccccccaccagauccucgacggcgagaacugcacccucaucgacgcccuccucggcgacccccacugcgacggcuuccagaacaaggagugggaccucuucgucgagcgcuccaaggccuacuccaacugcuaccccuacgacguccccgacuacgucucccuccgcucccucgucgccuccuccggcacccucgaguucaacaacgaguccuucaacuggaccggcgucgcccagaacggcaccuccuccgccugcaagcgccgcuccgacaaguccuucuucucccgccucaacuggcuccaccagcuccgcuacaaguaccccgcccucaacgucaccaugcccaacaacgagaaguucgacaagcucuacaucuggggcguccaccaccccggcaccgacuccgaccagaucucccucuacgcccaggccuccggccgcgucaccgucuccaccaagcgcucccagcagaccgucauccccaacaucggcucccgccccuggguccgcggcgucuccucccgcaucuccaucuacuggaccaucgucaagcccggcgacauccuccucaucaacuccaccggcaaccucaucgccccccgcggcuacuucaagauccgcuccggcaaguccuccaucaugcgcuccgacgcccccaucggcaagugcaacuccgagugcaucacccccaacggcuccauccccaacgacaagcccuuccagaacgucaaccgcaucaccuacggcgccugcccccgcuacgucaagcagaagacccucaagcucgccaccggcaugcgcaacguccccgagaagcagacccgcggcaucuucggcgccaucgccggcuucaucgagaacggcugggagggcaugauggacggcugguacggcuuccgccaccagaacuccgagggcaccggccaggccgccgaccucaaguccacccaggccgccaucaaccagaucaacggcaagcucaaccgccucaucgagaagaccaacgagaaguuccaccagaucgagaaggaguucuccgaggucgagggccgcauccaggaccucgagaaguacgucgaggacaccaagaucgaccucugguccuacaacgccgagcuccucgucgcccucgagaaccagcacaccaucgaccucaccgacuccgagaugaacaagcucuucgagcgcaccaagaagcagcuccgcgagaacgccgaggacaugggcaacggcugcuucaagaucuaccacaagugcgacaacgccugcaucggcuccauccgcaacggcaccuacgaccacgacgucuaccgcgacgaggcccucaacaaccgcuuccagaucaagggcgucgagcucaaguccggcuacaaggacuggauccucuggaucuccuucgccaucuccugcuuccuccucugcaucguccuccucggcuucaucaugugggccugccagaagggcaacauccgcugcaacaucugcaucuga

SEQ ID NO: 97785 - RNA, 1701 nt, Artificial Sequence
  derived and/or modified CDS sequence (opt2) from hemagglutinin__InfluenzaA__ABU92586
augaagaccaucaucgcccucuccuacauccucugccucgucuucgcccagaagcuccccggcaacgacaacuccaccgccacccucugccucggccaccacgccguccccaacggcaccaucgucaagaccaucaccaacgaccagaucgaggucaccaacgccaccgagcucguccaguccuccuccaccggcggcaucugcgacuccccccaccagauccucgacggcgagaacugcacccucaucgacgcccuccucggcgacccccagugcgacggcuuccagaacaagaagugggaccucuucgucgagcgcuccaaggccuacuccaacugcuaccccuacgacguccccgacuacgccucccuccgcucccucaucgccuccuccggcacccucgaguucaacaacgaguccuucaacuggaccggcgucacccagaacggcaccuccuccgccugcaagcgccgcuccaacuccuccuucuucucccgccucaacuggcucacccaccucaaguucaaguaccccgcccucaacgucaccaugcccaacaacgaggaguucgacaagcucuacaucuggggcguccaccaccccggcaccgacaacgaccagaucucccucuacgcccaggccuccggccgcaucaccgucuccaccaagcgcucccagcagaccgucauccccaacaucggcucccgcccccgcguccgcgacauccccucccgcaucuccaucuacuggaccaucgucaagcccggcgacauccuccucaucaacuccaccggcaaccucaucgccccccgcggcuacuucaagauccgcuccggcaaguccuccaucaugcgcuccgacgcccccaucggcaagugcaacuccgagugcaucacccccaacggcuccauccccaacgacaagcccuuccagaacgucaaccgcaucaccuacggcgccugcccccgcuacgucaagcagaacacccucaagcucgccaccggcaugcgcaacguccccgagaagcagacccgcggcaucuucggcgccaucgccggcuucaucgagaacggcugggagggcauggucgacggcugguacggcuuccgccaccagaacuccgagggcaucggccaggccgccgaccucaaguccacccaggccgccaucgaccagaucaacggcaagcucaaccgccucaucggcaagaccaacgagaaguuccaccagaucgagaaggaguucuccgaggucgagggccgcauccaggaccucgagaaguacgucgaggacaccaagaucgaccucugguccuacaacgccgagcuccucgucgcccucgagaaccagcacaccaucgaccucaccgacuccgagaugaacaagcucuucgagcgcaccaagaagcagcuccgcgagaacgccgaggacaugggcaacggcugcuucaagaucuaccacaagugcgacaacgccugcaucggcuccauccgcaacggcaccuacgaccacgacgucuaccgcgacgaggcccucaacaaccgcuuccagaucaagggcgucgagcucaaguccggcuacaagaacuggauccucuggaucuccuucgccaucuccugcuuccuccucugcgucgcccuccucggcuucaucaugugggccugccagaagggcaacauccgcugcaacaucugcaucuga

SEQ ID NO: 97786 - RNA, 1701 nt, Artificial Sequence
  derived and/or modified CDS sequence (opt2) from hemagglutinin__InfluenzaA__ABU92587
augaagaccaucaucgcccucuccuacauccucugccucgucuucgcccagaagcuccccggcaacgacaacuccaccgccacccucugccucggccaccacgccguccccaacggcaccaucgucaagaccaucaccaacgaccagaucgaggucaccaacgccaccgagcucguccaguccuccuccaccggcggcaucugcgacuccccccaccagauccucgacggcgagaacugcacccucaucgacgcccuccucggcgacccccagugcgacggcuuccagaacaagaagugggaccucuucgucgagcgcuccaaggccuacuccaacugcuaccccuacgacguccccgacuacgccucccuccgcucccucaucgccuccuccggcacccucgaguucaacaacgaguccuucaacuggaccggcgucacccagaacggcaccuccuccgccugcaagcgccgcuccaacuccuccuucuucucccgccucaacuggcucacccaccucaaguucaaguaccccgcccucaacgucaccaugcccaacaacgaggaguucgacaagcucuacaucuggggcguccaccaccccggcaccuacaacgaccagaucucccucuacgcccaggccuccggccgcaucaccgucuccaccaagcgcucccagcagaccgccauccccaacaucggcucccgcccccgcguccgcgacauccccucccgcaucuccaucuacuggaccaucgucaagcccggcgacauccuccucaucaacuccaccggcaaccucaucgccccccgcggcuacuucaagauccgcuccggcaaguccuccaucaugcgcuccgacgcccccaucggcaagugcaacuccgagugcaucacccccaacggcuccauccccaacgacaagcccuuccagaacgucaaccgcaucaccuacggcgccugcccccgcuacgucaagcagaacacccucaagcucgccaccggcaugcgcaacguccccgagaagcagacccgcggcaucuucggcgccaucgccggcuucaucgagaacggcugggagggcauggucgacggcugguacggcuuccgccaccagaacuccgagggcaucggccaggccgccgaccucaaguccacccaggccgccaucgaccagaucaacggcaagcucaaccgccucaucggcaagaccaacgagaaguuccaccagaucgagaaggaguucuccgaggucgagggccgcauccaggaccucgagaaguacgucgaggacaccaagaucgaccucugguccuacaacgccgagcuccucgucgcccucgagaaccagcacaccaucgaccucaccgacuccgagaugaacaagcucuucgagcgcaccaagaagcagcuccgcgagaacgccgaggacaugggcaacggcugcuucaagaucuaccacaagugcgacaacgccugcaucggcuccauccgcaacggcaccuacgaccacgacgucuaccgcgacgaggcccucaacaaccgcuuccagaucaagggcgucgagcucaaguccggcuacaaggacuggauccucuggaucuccuucgccaucuccugcuuccuccucugcgucgcccuccucggcuucaucaugugggccugccagaagggcaacauccgcugcaacaucugcaucuga

SEQ ID NO: 97787 - RNA, 1701 nt, Artificial Sequence
  derived and/or modified CDS sequence (opt2) from hemagglutinin__InfluenzaA__ABU92588
augaagaccaucaucgcccucuccuacauccucugccucgucuucgcccagaagcuccccggcaacgacaacuccaccgccacccucugccucggccaccacgccguccccaacggcaccaucgucaagaccaucaccaacgaccagaucgaggucaccaacgccaccgagcucguccaguccuccuccaccggcggcaucugcgacuccccccaccagauccucgacggcgagaacugcacccucaucgacgcccuccucggcgacccccagugcgacggcuuccagaacaagaagugggaccucuucgucgagcgcuccaaggccuacuccaacugcuaccccuacgacguccccgacuacgccucccuccgcucccucgucgccuccuccggcacccucgaguucaacaacgaguccuucaacuggaccggcgucacccagaacggcaccuccuccgccugcaagcgcaaguccaacaacuccuucuucucccgccucaacuggcucacccaccucaaguucaaguaccccgcccucaacgucaccaugcccaacaacgagaaguucgacaagcucuacaucuggggcguccaccaccccggcaccgacaacgaccagaucucccucuacgcccaggccuccggccgcaucaccgucuccaccaagcgcucccagcagaccgucauccccaacaucggcucccgcccccgcguccgcgacauccccucccgcaucuccaucuacuggaccaucgucaagcccggcgacauccuccucaucaacuccaccggcaaccucaucgccccccgcggcuacuucaagauccgcuccggcaaguccuccaucaugcgcuccgacgcccccaucggcaagugcaacuccgagugcaucacccccaacggcuccauccccaacgacaagcccuuccagaacgucaaccgcaucaccuacggcgccugcccccgcuacgucaagcagaacacccucaagcucgccaccggcaugcgcaacguccccgagaagcagacccgcggcaucuucggcgccaucgccggcuucaucgagaacggcugggagggcauggucgacggcugguacggcuuccgccaccagaacuccgagggcaucggccaggccgccgaccucaaguccacccaggccgccaucaaccagaucaacggcaagcucaaccgccucaucggcaagaccaacgagaaguuccaccagaucgagaaggaguucuccgaggucgagggccgcauccaggaccucgagaaguacgucgaggacaccaagaucgaccucugguccuacaacgccgaguuccucgucgcccucgagaaccagcacaccaucgaccucaccgacuccgagaugaacaagcucuucgagcgcaccaagaagcagcuccgcgagaacgccgaggacaugggcaacggcugcuucaagaucuaccacaagugcgacaacgccugcaucggcuccauccgcaacggcaccuacgaccacgacgucuaccgcgacgaggcccucaacaaccgcuuccagaucaagggcgucgagcucaaguccggcuacaaggacuggauccucuggaucuccuucgccaucuccugcuuccuccucugcgucgcccuccucggcuucaucaugugggccugccagaagggcaacauccgcugcaacaucugcaucuga

SEQ ID NO: 97788 - RNA, 1701 nt, Artificial Sequence; identical to SEQ ID NO: 96669
  derived and/or modified CDS sequence (opt2) from hemagglutinin__InfluenzaA__ABU92590

SEQ ID NO: 97789 - RNA, 1701 nt, Artificial Sequence
  derived and/or modified CDS sequence (opt2) from hemagglutinin__InfluenzaA__ABU92591
augaagaccaucaucgcccucuccuacauccucugccucgucuucgcccagaagcuccccggcaacgacaacuccaccgccacccucugccucggccaccacgccguccccaacggcaccaucgucaagaccaucaccaacgaccagaucgaggucaccaacgccaccgagcucguccaguccuccuccaccggcggcaucugcgacuccccccaccagauccucgacggcgagaacugcacccucaucgacgcccuccucggcgacccccagugcgacggcuuccagaacaagaagugggaccucuucgucgagcgcuccaaggccuacuccaacugcuaccccuacgacguccccgacuacgccucccuccgcucccucaucgccuccuccggcacccucgaguucaacaacgaguccuucaacuggaccggcgucacccagaacggcaccuccuccgccugcaagcgccgcuccaacuccuccuucuucucccgccucaacuggcucacccaccucaaguucaaguaccccgcccucaacgucaccaugcccaacaacgaggaguucgacaagcucuacaucuggggcguccaccaccccggcaccgacaacgaccagaucucccucuacgcccaggccuccggccgcaucaccgucuccaccaagcgcucccagcagaccgucauccccaacaucggcucccgcccccgcguccgcgacauccccucccgcaucuccaucuacuggaccaucgucaagcccggcgacauccuccucaucaacuccaccggcaaccucaucgccccccgcggcuacuucaagauccgcuccggcaaguccuccaucaugcgcuccgacgcccccaucggcaagugcaacuccgagugcaucacccccaacggcuccauccccaacgacaagcccuuccagaacgucaaccgcaucaccuacggcgccugcccccgcuacgucaagcagaacacccucaagcucgccaccggcaugcgcaacguccccgagaagcagacccgcggcaucuucggcgccaucgccggcuucaucgagaacggcugggagggcauggucgacggcugguacggcuuccgccaccagaacuccgagggcaucggccaggccgccgaccucaaguccacccaggccgccaucgaccagaucaacggcaagcucaaccgccucaucggcaagaccaacgagaaguuccaccagaucgagaaggaguucuccgaggucgagggccgcauccaggaccucgagaaguacgucgaggacaccaagaucgaccucugguccuacaacgccgagcuccucgucgcccucgagaaccagcacaccaucgaccucaccgacuccgagaugaacaagcucuucgagcgcaccaagaagcagcuccgcgagaacgccgaggacaugggcaacggcugcuucaagaucuaccacaagugcgacaacgccugcaucggcuccauccgcaacggcaccuacgaccacgacgucuaccgcgacgaggcccucaacaaccgcuuccagaucaagggcgucgagcucaaguccggcuacaaggacuggauccucuggaucuccuucgccaucuccugcuuccuccucugcgucgcccuccucggcuucaucaugugggccugccagaagggcaacauccgcugcaacaucugcaucuga

SEQ ID NO: 97790 - RNA, 1701 nt, Artificial Sequence; identical to SEQ ID NO: 97789
  derived and/or modified CDS sequence (opt2) from hemagglutinin__InfluenzaA__ABU92592

SEQ ID NO: 97791 - RNA, 1701 nt, Artificial Sequence
  derived and/or modified CDS sequence (opt2) from hemagglutinin__InfluenzaA__ABU92593
augaagaccaucaucgcccucuccuacauccucugccucgucuucgcccagaagcuccccggcaacgacaacuccaccgccacccucugccucggccaccacgccguccccaacggcaccaucgucaagaccaucaccaacgaccagaucgaggucaccaacgccaccgagcucguccaguccuccuccaccggcggcaucugcgacuccccccaccagauccucgacggcgagaacugcacccucaucgacgcccuccucggcgacccccagugcgacggcuuccagaacaagaagugggaccucuucgucgagcgcuccaaggccuacuccaacugcuaccccuacgacguccccgacuacgccucccuccgcucccucgucgccuccuccggcacccucgaguucaacaacgaguccuucaacuggaccggcgucacccagaacggcaccuccuccgccugcaagcgccgcuccaacaacuccuucuucucccgccucaacuggcucacccaccucaaguucaaguaccccgcccucaacgucaccaugcccaacaacgagaaguucgacaagcucuacaucuggggcguccaccaccccggcaccgacaacgaccagaucuuccucuacgcccaggccuccggccgcaucaccgucuccaccaagcgcucccagcagaccgucauccccaacaucggcucccgcccccgcguccgcaacauccccucccgcaucuccaucuacuggaccaucgucaagcccggcgacauccuccucaucaacuccaccggcaaccucaucgccccccgcggcuacuucaagauccgcuccggcaaguccuccaucaugcgcuccgacgcccccaucggcaagugcaacuccgagugcaucacccccaacggcuccauccccaacgacaagcccuuccagaacgucaaccgcaucaccuacggcgccugcccccgcuacgucaagcagaacacccucaagcucgccaccggcaugcgcaacguccccgagaagcagacccgcggcaucuucggcgccaucgccggcuucaucgagaacggcugggagggcauggucgacggcugguacggcuuccgccaccagaacuccgagggcaucggccaggccgccgaccucaaguccacccaggccgccaucgaccagaucaacggcaagcucaaccgccucaucggcaagaccaacgagaaguuccaccagaucgagaaggaguucuccgaggucgagggccgcauccaggaccucgagaaguacgucgaggacaccaagaucgaccucugguccuacaacgccgagcuccucgucgcccucgagaaccagcacaccaucgaccucaccgacuccgagaugaacaagcucuucgagaagaccaagaagcagcuccgcgagaacgccgaggacaugggcaacggcugcuucaagaucuaccacaagugcgacaacgccugcaucggcuccauccgcaacggcaccuacgaccacgacgucuaccgcgacgaggcccucaacaaccgcuuccagaucaagggcgucgagcucaaguccggcuacaaggacuggauccucuggaucuccuucgccaucuccugcuuccuccucugcgucgcccuccucggcuucaucaugugggccggccagaagggcaacaagcgcugcaacaucugcaucuga

SEQ ID NO: 97792 - RNA, 1701 nt, Artificial Sequence
  derived and/or modified CDS sequence (opt2) from hemagglutinin__InfluenzaA__ABU92594
augaagaccaucaucgcccucuccuacauccucugccucgucuucgcccagaagcuccccggcaacgacaacuccaccgccacccucugccucggccaccacgccguccccaacggcaccaucgucaagaccaucaccaacgaccagaucgaggucaccaacgccaccgagcucguccaguccuccuccaccggcgagaucugcaacuccccccaccagauccucgacggcgaguccugcacccucaucgacgcccuccucggcgacccccagugcgacggcuuccagaacaagaagugggaccucuucgucgagcgcuccaaggccuacuccaacugcuaccccuacgacguccccgacuacgccucccuccgcucccucgucgccuccuccggcacccucgaguucaacaacgaguccuucaacuggaccggcgucacccagaacggcaccuccuccgccugcaagcgccgcuccaacaacuccuucuucucccgccucaacuggcucacccaccucaaguucaaguaccccgcccucaacgucaccaugcccaacaacgagaaguucgacaagcucuacaucuggggcguccaccaccccggcaccgacaacgaccagaucuuccucuacgcccaggccuccggccgcaucaccgucuccaccaagcgcucccagcagaccgucauccccaacaucggcucccgcccccgcguccgcaacauccccucccgcaucuccaucuacuggaccaucgucaagcccggcgacauccuccucaucaacuccaccggcaaccucaucgccccccgcggcuacuucaagauccgcuccggcaaguccuccaucaugcgcuccgacgcccccaucggcaagugcaacuccgagugcaucacccccaacggcuccauccccaacgacaagcccuuccagaacgucaaccgcaucaccuacggcgccugcccccgcuacgucaagcagaacacccucaagcucgccaccggcaugcgcaacguccccgagaagcagacccgcggcaucuucggcgccaucgccggcuucaucgagaacggcugggagggcauggucgacggcugguacggcuuccgccaccagaacuccgagggcaucggccaggccgccgaccucaaguccacccaggccgccaucaaccagaucaacggcaagcucaaccgccucaucggcaagaccaacgagaaguuccaccagaucgagaaggaguucuccgaggucgagggccgcauccaggaccucgagaaguacgucgaggacaccaagaucgaccucugguccuacaacgccgagcuccucgucgcccucgagaaccagcacaccaucgaccucaccgacuccgagaugaacaagcucuucgagcgcaccaagaagcagcuccgcgagaacgccgaggacaugggcaacggcugcuucaagaucuaccacaagugcgacaacgccugcaucggcuccauccgcaacggcaccuacgaccacgacgucuaccgcgacgaggcccucaacaaccgcuuccagaucaagggcgucgagcucaaguccggcuacaaggacuggauccucuggaucuccuucgccaucuccugcuuccuccucugcgucgcccucuccggcuucaucaugugggccugccagaagggcaacauccgcugcaacaucugcaucuga

SEQ ID NO: 97793 - RNA, 1701 nt, Artificial Sequence
  derived and/or modified CDS sequence (opt2) from hemagglutinin__InfluenzaA__ABU92595
augaagaccaucaucgcccucuccuacauccucugccucgucuucgcccagaagcuccccgagaacgacaacuccaccgccacccucugccucggccaccacgccguccccaacggcaccaucgucaagaccaucaccaacgaccagaucgaggucaccaacgccaccgagcucguccaguccuccuccaccggcggcaucugcgacuccccccaccagauccucgacggcgagaacugcacccucaucgacgcccuccucggcgacccccagugcgacggcuuccagaacaagaagugggaccucuucgucgagcgcuccaaggccuacuccaacugcuaccccuacgacguccccgacuacgccucccuccgcucccucgucgccuccuccggcacccucgaguucaacaacgaguccuucaacuggaccggcgucacccagaacggcaccuccuccgccugcaagcgccgcuccaacaacuccuucuucucccgccucaacuggcucacccaccucaaguucaaguaccccgcccucaacgucaccaugcccaacaacgagaaguucgacaagcucuacaucuggggcguccaccaccccggcaccgacaacgaccagaucuuccucuacgcccaggccuccggccgcaucaccgucuccaccaagcgcucccagcagaccgucauccccaacaucggcucccgcccccgcguccgcaacauccccucccgcaucuccaucuacuggaccaucgucaagcccggcgacauccuccucaucaacuccaccggcaaccucaucgccccccgcggcuacuucaagauccgcuccggcaaguccuccaucaugcgcuccgacgcccccaucggcaagugcaacuccgagugcaucacccccaacggcuccauccccaacgacaagcccuuccagaacgucaaccgcaucaccuacggcgccugcccccgcuacgucaagcagaacacccucaagcucgccaccggcaugcgcaacguccccgagaagcagacccgcggcaucuucggcgccaucgccggcuucaucgagaacggcugggagggcauggucgacggcugguacggcuuccgccaccagaacuccgagggcaucggccaggccgccgaccucaaguccacccaggccgccaucgaccagaucaacggcaagcucaaccgccucaucggcaagaccaacgagaaguuccaccagaucgagaaggaguucuccgaggucgagggccgcauccaggaccucgagaaguacgucgaggacaccaagaucgaccucugguccuacaacgccgagcuccucgucgcccucgagaaccagcacaccaucgaccucaccgacuccgagaugaacaagcucuucgagaagaccaagaagcagcuccgcgagaacgccgaggacaugggcaacggcugcuucaagaucuaccacaagugcgacaacgccugcaucggcuccauccgcaacggcaccuacgaccacgacgucuaccgcgacgaggcccucaacaaccgcuuccagaucaagggcgucgagcucaaguccggcuacaaggacuggauccucuggaucuccuucgccaucuccugcuuccuccucugcgucgcccuccucggcuucaucaugugggccugccagaagggcaacauccgcugcaacaucugcaucuga

SEQ ID NO: 97794 - RNA, 1701 nt, Artificial Sequence
  derived and/or modified CDS sequence (opt2) from hemagglutinin__InfluenzaA__ABU92596
augaagaccaucaucgcccucuccuacauccucugccucgucuucgcccagaagcuccccggcaacgacaacuccaccgccacccucugccucggccaccacgccguccccaacggcaccauggucaagaccaucaccaacgaccagaucgaggucaccaacgccaccgagcucguccaguccuccuccaccggcgagaucugcgacuccccccaccagauccucgacggcgagaacugcacccucaucgacgcccuccucggcgacccccagugcgacggcuuccagaacaagaagugggaccucuucgucgagcgcuccaaggcccacuccaacugcuaccccuacgacguccccgacuacgccucccuccgcucccucaucgccuccuccggcacccucgaguucaacaacgaguccuucaacuggaccggcgucacccagaacggcaccuccuccgccugcaagcgccgcuccgacaacuccuucuucucccgccucaacuggcucacccaccucaaguucaaguaccccgcccucaacgucaccaugcccaacaacgaggaguucgacaagcucuacaucuggggcguccaccaccccggcaccgacaacgaccagaucucccucuacgcccaggccuccggccgcaucaccgucuccaccaagcgcucccagcagaccgucauccccaacaucggcucccgcccccgcguccgcgacauccccucccgcaucuccaucuacuggaccaucgucaagcccggcgacauccuccucaucaacuccaccggcaaccucaucgccccccgcggcuacuucaagauccgcuccggcaaguccuccaucaugcgcuccgacgcccccaucggcaagugcaacuccggcugcaucacccccaacggcuccauccccaacgacaagcccuuccagaacgucaaccgcaucaccuacggcgccugcccccgcuacgucaagcagaacacccucaagcucgccaccggcaugcgcaacguccccgagaagcagacccgcggcaucuucggcgccaucgccggcuucaucgagaacggcugggagggcauggucgacggcugguacggcuuccgccaccagaacuccgagggcaucggccaggccgccgaccucaaguccacccaggccgccaucgaccagaucaacggcaagcucaaccgccucaucggcaagaccaacgagaaguuccaccagaucgagaaggaguucuccgaggucgagggccgcauccaggaccucgagaaguacgucgaggacaccaagaucgaccucugguccuacaacgccgagcuccucgucgcccucgagaaccagcacaccaucgaccucaccgacuccgagaugaacaagcucuucgagcgcaccaagaagcagcuccgcgagaacgccgaggacaugggcaacggcugcuucaagaucuaccacaagugcgacaacgccugcaucggcuccauccgcaacggcaccuacgaccacgacgucuaccgcgacgaggcccucaacaaccgcuuccagaucaagggcgucgagcucaaguccggcuacaaggacuggauccucuggaucuccuucgccaucuccugcuuccuccucugcgucgcccuccucggcuucaucaugugggccugccagaagggcaacauccgcugcaacaucugcaucuga

SEQ ID NO: 97795 - RNA, 1701 nt, Artificial Sequence; identical to SEQ ID NO: 96666
  derived and/or modified CDS sequence (opt2) from hemagglutinin__InfluenzaA__ABU92597

SEQ ID NO: 97796 - RNA, 1701 nt, Artificial Sequence; identical to SEQ ID NO: 96109
  derived and/or modified CDS sequence (opt2) from hemagglutinin__InfluenzaA__ABU92601

SEQ ID NO: 97797 - RNA, 1701 nt, Artificial Sequence; identical to SEQ ID NO: 96109
  derived and/or modified CDS sequence (opt2) from hemagglutinin__InfluenzaA__ABU92602

SEQ ID NO: 97798 - RNA, 1701 nt, Artificial Sequence
  derived and/or modified CDS sequence (opt2) from hemagglutinin__InfluenzaA__ABU92603
augaagaccaucaucgcccucuccuacauccucugccucgucuucgcccagaagcuccccggcaacgacaacuccaccgccacccucugccucggccaccacgccguccccaacggcaccaucgucaagaccaucaccaacgaccagaucgaggucaccaacgccaccgagcucguccagaucuccuccaccggcgagaucugcgacuccccccaccagauccucgacggcgagaacugcacccucaucgacgcccuccucggcgacccccagugcgacggcuuccagaacaagaagugggaccucuucgucgagcgcuccaaggccuacuccaacugcuaccccuacgacguccccgacuacgccucccuccgcucccucgucgccuccuccggcacccucgaguucaacaacgaguccuucgacuggaccggcgucacccagaacggcaccuccuccgccugcaagcgccgcuccgacaaguccuucuucucccgccucaacuggcucacccaccucaaguacaaguaccccgcccucaacgucaccaugcccaacaacgagaaguucgacaagcucuacaucuggggcguccaccaccccggcaccgacuccgaccagaucucccucuacgcccaggccuccggccgcaucaccgucuccaccaagcgcucccagcagaccgucauccccaacaucggcucccgcccccgcguccgcgacgucuccucccgcaucuccaucuacuggaccaucgucaagcccggcgacauccuccucaucaacuccaccggcaaccucaucgccccccgcggcuacuucaagauccgcuccggcaaguccuccaucaugcgcuccgacgcccccaucggcaagugcaacuccgagugcaucacccccaacggcuccauccccaacgacaagcccuuccagaacgucaaccgcaucaccuacggcgccugcccccgcuacgucaagcagaacacccucaagcucgccaccggcaugcgcaacguccccgagaagcagacccgcggcaucuucggcgccaucgccggcuucaucgagaacggcugggagggcauggucgacggcugguacggcuuccgccaccagaacuccgagggcaccggccaggccgccgaccucaaguccacccaggccgccaucaaccagaucaacggcaagcucaaccgccucaucggcaagaccaacgagaaguuccaccagaucgagaaggaguucuccgaggucgagggccgcauccaggaccucgagaaguacgucgaggacaccaagaucgaccucugguccuacaacgccgagcuccucgucgcccucgagaaccagcacaccaucgaccucaccgacuccgagaugaacaagcucuucgagcgcaccaagaagcagcuccgcgagaacgccgaggacaugggcaacggcugcuucaagaucuaccacaagugcgacaacgccugcaucggcuccauccgcaacggcaccuacgaccacgacgucuaccgcgacgaggcccucaacaaccgcuuccagaucaagggcgucgagcucaaguccggcuacaaggacuggauccucuggaucuccuucgccaucuccugcuuccuccucugcgucgcccuccucggcuucaucaugugggccugccagaagggcaacauccgcugcaacaucugcaucuga

SEQ ID NO: 97799 - RNA, 1701 nt, Artificial Sequence; identical to SEQ ID NO: 96109
  derived and/or modified CDS sequence (opt2) from hemagglutinin__InfluenzaA__ABU92604

SEQ ID NO: 97800 - RNA, 1701 nt, Artificial Sequence; identical to SEQ ID NO: 97798
  derived and/or modified CDS sequence (opt2) from hemagglutinin__InfluenzaA__ABU92605

SEQ ID NO: 97801 - RNA, 1701 nt, Artificial Sequence; identical to SEQ ID NO: 97798
  derived and/or modified CDS sequence (opt2) from hemagglutinin__InfluenzaA__ABU92606

SEQ ID NO: 97802 - RNA, 1701 nt, Artificial Sequence; identical to SEQ ID NO: 96648
  derived and/or modified CDS sequence (opt2) from hemagglutinin__InfluenzaA__ABU92608

SEQ ID NO: 97803 - RNA, 1701 nt, Artificial Sequence; identical to SEQ ID NO: 96648
  derived and/or modified CDS sequence (opt2) from hemagglutinin__InfluenzaA__ABU92609

SEQ ID NO: 97804 - RNA, 1701 nt, Artificial Sequence
  derived and/or modified CDS sequence (opt2) from hemagglutinin__InfluenzaA__ABU92610
augaagaccaucaucgcccucuccuacauccucugccucgucuucgcccagaagcuccccggcaacgacaacuccaccgccacccucugccucggccaccacgccguccccaacggcaccaucgucaagaccaucaccaacgaccagaucgaggucaccaacgccaccgagcucguccaguccuccuccaccggcgagaucugcgacuccccccaccagauccucgacggcgagaacugcacccucaucgacgcccuccucggcgacccccagugcgacggcuuccagaacaagaagugggaccucuucgucgagcgcuccaaggccuacuccaacugcuaccccuacgacguccccgacuacgccucccuccgcucccucgucgccuccuccggcacccucgaguucaacaacgaguccuucaacuggaccggcgucacccagaacggcaccuccuccgccugcaagcgccgcuccaacaacuccuucuucucccgccucaacuggcucacccacuccaaguucaaguaccccgcccucaacgucaccaugcccaacaacgagaaguucgacaagcucuacaucuggggcguccaccaccccggcaccgacaacgaccagaucuuccucuacgcccaggccuccggccgcaucaccgucuccaccaagcgcucccagcagaccgucauccccaacaucggcucccgcccccgcguccgcaacauccccucccgcaucuccaucuacuggaccaucgucaagcccggcgacauccuccucaucaacuccaccggcaaccucaucgccccccgcggcuacuucaagauccgcuccggcaaguccuccaucaugcgcuccgacgcccccaucggcaagugcaacuccgagugcaucacccccaacggcuccauccccaacgacaagcccuuccagaacgucaaccgcaucgccuacggcgccugcccccgcuacgucaagcagaacacccucaagcucgccaccggcaugcgcaacguccccgagaagcagacccgcggcaucuucggcgccaucgccggcuucaucgagaacggcugggagggcauggucgacggcugguacggcuuccgccaccagaacuccgagggcaucggccaggccgccgaccucaaguccacccaggccgccaucaaccagaucaacggcaagcucaaccgccucaucggcaagaccaacgagaaguuccaccagaucgagaaggaguucuccgaggucgagggccgcauccaggaccucgagaaguacgucgaggacaccaagaucgaccucugguccuacaacgccgagcuccucgucgcccucgagaaccagcacaccaucgaccucaccgacuccgagaugaacaagcucuucgagcgcaccaagaagcagcuccgcgagaacgccgaggacauguccaacggcugcuucaagaucuaccacaagugcgacaacgccugcaucggcuccauccgcaacggcaccuacgaccacgacgucuaccgcgacgaggcccucaacaaccgcuuccagaucaagggcgucgagcucaaguccggcuacaaggacuggauccucuggaucuccuucgccaucuccugcuuccuccucugcgucguccuccucggcuucaucaugugggccugccagaagggcaacauccgcugcaacaucugcaucuga

SEQ ID NO: 97805 - RNA, 1701 nt, Artificial Sequence
  derived and/or modified CDS sequence (opt2) from hemagglutinin__InfluenzaA__ABU92611
augaagaccaucaucgcccucuccuacauccucugccucgucuucgcccagaagcuccccggcaacgacaacuccaccgccacccucugccucggccaccacgccguccccaacggcaccaucgucaagaccaucaccaacgaccagaucgaggucaccaacgccaccgagcucguccaguccuccuccaccggcggcaucugcgacuccccccaccagauccucgacggcgagaacugcacccucaucgacgcccuccucggcgacccccagugcgacggcuuccagaacaagaagugggaccucuucgucgagcgcuccaaggccuacuccaacugcuaccccuacgacguccccgacuacgccucccuccgcucccucaucgccuccuccggcacccucgaguucaacaacgaguccuucaacuggaccggcgucacccagaacggcaccuccuccgccugcaagcgccgcuccaacaacuccuucuucucccgccucaacuggcucacccaccucaaguucaaguaccccgcccucaacgucaccaugcccaacaacgaggaguucgacaagcucuacaucuggggcguccaccaccccggcaccgacaacgaccagaucucccucuacgcccaggccuccggcaagaucaccgucuccaccaagcgcucccagcagaccgucauccccaacaucggcucccgcccccgcguccgcgacauccccucccgcaucuccaucuacuggaccaucgucaagcccggcgacauccuccucaucaacuccaccggcaaccucaucgccccccgcggcuacuucaagauccgcuccggcaaguccuccaucaugcgcuccgacgcccccaucggcaagugcaacuccgagugcaucacccccaacggcuccauccccaacgacaagcccuuccagaacgucaaccgcaucaccuacggcgccugcccccgcuacgucaagcagaacacccucaagcucgccaccggcaugcgcaacguccccgagaagcagacccgcggcaucuucggcgccaucgccggcuucaucgagaacggcugggagggcauggucgacggcugguacggcuuccgccaccagaacuccgagggcaucggccaggccgccgaccucaaguccacccaggccgccaucgaccagaucaacggcaagcucaaccgccucaucggcaagaccaacgagaaguuccaccagaucgagaaggaguucuccgaggucgagggccgcauccaggaccucgagaaguacgucgaggacaccaagaucgaccucugguccuacaacgccgagcuccucgucgcccucgagaaccagcacaccaucgaccucaccgacuccgagaugaacaagcucuucgagcgcaccaagaagcagcuccgcgagaacgccgaggacaugggcaacggcugcuucaagaucuaccacaagugcgacaacgccugcaucggcuccauccgcaacggcaccuacgaccacgacgucuaccgcgacgaggcccucaacaaccgcuuccagaucaagggcgucgagcucaaguccggcuacaaggacuggauccucuggaucuccuucgccaucuccugcuuccuccucugcgucgcccuccucggcuucaucaucugggccugccucaagggcaacauccgcugcaacaucugcaucuga

SEQ ID NO: 97806 - RNA, 1701 nt, Artificial Sequence
  derived and/or modified CDS sequence (opt2) from hemagglutinin__InfluenzaA__ABU92612
augaagaccaucaucgcccucuccuacauccucugccucgucuucgcccagaagcuccccggcaacgacaacuccaccgccacccucugccucggccaccacgccguccccaacggcaccauggucaagaccaucaccaacgaccagaucgaggucaccaacgccaccgagcucguccaguccuccuccaccggcggcaucugcgacuccccccaccagauccucgacggcgagaacugcacccucaucgacgcccuccucggcgacccccagugcgacggcuuccagaacaagaagugggaccucuucgucgagcgcuccaaggcccacuccaacugcuaccccuacgacguccccgacuacgccucccuccgcucccucgucgccuccuccggcacccucgaguucaacaacgaguccuucaacuggaccggcgucacccagaacggcaccuccuccgccugcaagcgccgcuccaacaacuccuucuucucccgccucaacuggcucacccaccucaaguucaaguaccccgcccucaacgucaccaugcccaacaacgagaaguucgacaagcucuacaucuggggcguccaccaccccggcaccgacaacgaccagaucucccucuacgcccaggccuccggccgcaucaccgucuccaccaagcgcucccagcagaccgucauccccaacaucggcucccgcccccgcguccgcgacauccccucccgcaucuccaucuacuggaccaucgucaagcccggcgacauccuccucaucaacuccaccggcaaccucaucgccccccgcggcuacuucaagauccgcuccggcaaguccuccaucaugcgcuccgacgcccccaucggcaagugcaacuccgagugcaucacccccaacggcuccauccccaacaacaagcccuuccagaacgucaaccgcaucaccuacggcgccugcccccgcuacgucaagcagaacacccucaagcucgccaccggcaugcgcaacguccccgagaagcagacccgcggcaucuucggcgccaucgccggcuucaucgagaacggcugggagggcauggucgacggcugguacggcuuccgccaccagaacuccgagggcaucggccaggccgccgaccucaaguccacccaggccgccaucaaccagaucaacggcaagcucaaccgccucaucggcaagaccaacgagaaguuccaccagaucgagaaggaguucuccgaggucgagggccgcauccaggaccucgagaaguacgucgaggacaccaagaucgaccucugguccuacaacgccgagcuccucgucgcccucgagaaccagcacaccaucgaccucaccgacuccgagaugaacaagcucuucgagcgcaccaagaagcagcuccgcgagaacgccgaggacaugggcaacggcugcuucaagaucuaccacaagugcgacaacgccugcaucggcuccauccgcaacggcaccuacgaccacgacgucuaccgcgacgaggcccucaacaaccgcuuccagaucaagggcgucgagcucaaguccggcuacaaggacuggauccucuggaucuccuucgccaucuccugcuuccuccucugcgucgcccuccucggcuucaucaugugggccugccagaagggcaacauccgcugcaacaucugcaucuga

SEQ ID NO: 97807 - RNA, 1701 nt, Artificial Sequence; identical to SEQ ID NO: 97294
  derived and/or modified CDS sequence (opt2) from hemagglutinin__InfluenzaA__ABU92613

SEQ ID NO: 97808 - RNA, 1701 nt, Artificial Sequence; identical to SEQ ID NO: 97793
  derived and/or modified CDS sequence (opt2) from hemagglutinin__InfluenzaA__ABU92614

SEQ ID NO: 97809 - RNA, 1701 nt, Artificial Sequence
  derived and/or modified CDS sequence (opt2) from hemagglutinin__InfluenzaA__ABU92615
augaagaccaucaucgcccucuccuacauccucugccucgucuucgcccagaagcuccccggcaacgacaacuccaccgccacccucugccucggccaccacgccguccccaacggcaccaucguccgcaccaucaccaacgaccagaucgaggucaccaacgccaccgagcucguccaguccuccuccaccggcggcaucugcgacuccccccaccagauccucgacggcgagaacugcacccucaucgacgcccuccucggcgacccccagugcgacggcuuccagaacaagaagugggaccucuucgucgagcgcuccaaggccuacuccaacugcuaccccuacgacguccccgacuacgccucccuccgcucccucgucgccuccuccggcacccucgaguucaacaacgaguccuucaacuggaccggcgucacccagaacggcaccuccuccgccugcaagcgccgcuccaacaacuccuucuucucccgccucaacuggcucacccaccucaaguucaaguaccccgcccucaacgucaccaugcccaacaacgagaaguucgacaagcucuacaucuggggcguccaccaccccggcaccgacaacgaccagaucucccucuacgcccaggccuccggccgcaucaccgucuccaccaagcgcucccagcagaccgucauccccaacgucggcucccgcccccgcguccgcgacauccccucccgcaucuccaucuacuggaccaucgucaagcccggcgacauccuccucaucaacuccaccggcaaccucaucgccccccgcggcuacuucaagauccgcuccggcaaguccuccaucaugcgcuccgacgcccccaucggcaagugcaacuccgagugcaucacccccaacggcuccauccccaacgacaagcccuuccagaacgucaaccgcaucaccuacggcgccugcccccgcuacgucaagcagaacacccucaagcucgccaccggcaugcgcaacguccccgagaagcagacccgcggcaucuucggcgccaucgccggcuucaucgagaacggcugggagggcauggucgacggcugguacggcuuccgccaccagaacuccgagggcaucggccaggccgccgaccucaaguccacccaggccgccaucaaccagaucaacggcaagcucaaccgccucaucggcaagaccaacgagaaguuccaccagaucgagaaggaguucuccgaggucgagggccgcauccaggaccucgagaaguacgucgaggacaccaagaucgaccucugguccuacaacgccgagcuccucgucgcccucgagaaccagcacaccaucgaccucaccgacuccgagaugaacaagcucuucgagcgcaccaagaagcagcuccgcgagaacgccgaggacaugggcaacggcugcuucaagaucuaccacaagugcgacaacgccugcaucggcuccauccgcaacggcaccuacgaccacgacgucuaccgcgacgaggcccucaacaaccgcuuccagaucaagggcgucgagcucaaguccggcuacaaggacuggauccucuggaucuccuucgccaucuccugcuuccuccucugcgucgcccuccucggcuucaucaugugggccugccagaagggcaacauccgcugcaacaucugcaucuga

SEQ ID NO: 97810 - RNA, 1701 nt, Artificial Sequence
  derived and/or modified CDS sequence (opt2) from hemagglutinin__InfluenzaA__ABU92617
augaagaccaucaucgcccucuccuacauccucugccucgucuucgcccagaagcuccccggcaacgacaacuccaccgccacccucugccucggccaccacuccguccccaacggcaccaucgucaagaccaucaccaacgaccagaucgaggucaccaacgccaccgagcucguccaguccuccuccaccggcggcaucugcgacuccccccaccagauccucgacggcgagaacugcacccucaucgacgcccuccucggcgacccccagugcgacggcuuccagaacaagaagugggaccucuucgucgagcgcuccaaggccuacuccaacugcuaccccuacgacguccccgacuacgccucccuccgcucccucaucgccuccuccggcacccucgaguucaacaacgaguccuucaacuggaccggcgucacccagaacggcaccuccuccgccugcaagcgccgcuccaacuccuccuucuucucccgccucaacuggcucacccaccucaaguucaaguaccccgcccucaacgucaccaugcccaacaacgaggaguucgacaagcucuacaucuggggcguccaccaccccggcaccgacaacgaccagaucucccucuacgcccaggccuccggccgcaucaccgucuccaccaagcgcucccagcagaccgucauccccaacaucggcucccgcccccgcguccgcgacauccccucccgcaucuccaucuacuggaccaucgucaagcccggcgacauccuccucaucaacuccaccggcaaccucaucgccccccgcggcuacuucaagauccgcuccggcaaguccuccaucaugcgcuccgacgcccccaucggcaagugcaacuccgagugcaucacccccaacggcuccauccccaacgacaagcccuuccagaacgucaaccgcaucaccuacggcgccugcccccgcuacgucaagcagaacacccucaagcucgccaccggcaugcgcaacguccccgagaagcagacccgcggcaucuucggcgccaucgccggcuucaucgagaacggcugggagggcauggucgacggcugguacggcuuccgccaccagaacuccgagggcaucggccaggccgccgaccucaaguccacccaggccgccaucgaccagaucaacggcaagcucaaccgccucaucggcaagaccaacgagaaguuccaccagaucgagaaggaguucuccgaggucgagggccgcauccaggaccucgagaaguacgucgaggacaccaagaucgaccucugguccuacaacgccgagcuccucgucgcccucgagaaccagcacaccaucgaccucaccgacuccgagaugaacaagcucuucgagcgcaccaagaagcagcuccgcgagaacgccgaggacaugggcaacggcugcuucaagaucuaccacaagugcgacaacgccugcaucggcuccauccgcaacggcaccuacgaccacgacgucuaccgcgacgaggcccucaacaaccgcuuccagaucaagggcgucgagcucaaguccggcuacaaggacuggauccucuggaucuccuucgccaucuccugcuuccuccucugcgucgcccuccucggcuucaucaugugggccugccagaagggcaacauccgcugcaacaucugcaucuga

SEQ ID NO: 97811 - RNA, 1701 nt, Artificial Sequence; identical to SEQ ID NO: 97294
  derived and/or modified CDS sequence (opt2) from hemagglutinin__InfluenzaA__ABU92619

SEQ ID NO: 97812 - RNA, 1701 nt, Artificial Sequence; identical to SEQ ID NO: 97793
  derived and/or modified CDS sequence (opt2) from hemagglutinin__InfluenzaA__ABU92620

SEQ ID NO: 97813 - RNA, 1701 nt, Artificial Sequence
  derived and/or modified CDS sequence (opt2) from hemagglutinin__InfluenzaA__ABU92622
augaagaccaucaucgcccucuccuacauccucugccucgucuucgcccagaagcuccccggcaacgacaacuccaccgccacccucugccucggccaccacgccguccccaacggcaccaucgucaagaccaucaccaacgaccagaucgaggucaccaacgccaccgagcucguccaguccuccuccaccggcggcaucugcgacuccccccaccagauccucgacggcgagaacugcacccucaucgacgcccuccucggcgacccccagugcgacggcuuccagaacaagaagugggaccucuucgucgagcgcuccaaggccuacuccaacugcuaccccuacgacguccccgacuacgccucccuccgcucccucaucgccuccuccggcacccucgaguucaacaacgaguccuucaacuggaccggcgucacccagaacggcaccuccuccgccugcaagcgccgcuccaacuccuccuucuucucccgccucaacuggcucacccaccucaaguucaaguaccccgcccucaacgucaccaugcccaacaacgaggaguucgacaagcucuacaucuggggcguccaccaccccggcaccgacaacgaccagaucucccucuacgcccaggccuccggccgcaucaccgucuccaccaagcgcucccagcagaccgucauccccaacaucggcucccgcccccgcguccgcgacauccccucccgcaucuccaucuacuggaccaucgucaagcccggcgacauccuccucaucaacuccaccggcaaccucaucgccccccgcggcuacuucaagauccgcuccggcaaguccuccaucaugcgcuccgacgcccccaucggcaagugcaacuccgagugcaucacccccaacggcuccauccccaacgacaagcccuuccagaacgucaaccgcaucaccuacggcgccugcccccgcuccgucaagcagaacacccucaagcucgccaccggcaugcgcaacguccccgagaagcagacccgcggcaucuucggcgccaucgccggcuucaucgagaacggcugggagggcauggucgacggcugguacggcuuccgccaccagaacuccgagggcaucggccaggccgccgaccucaaguccacccaggccgccaucgaccagaucaacggcaagcucaaccgccucaucggcaagaccaacgagaaguuccaccagaucgagaaggaguucuccgaggucgagggccgcauccaggaccucgagaaguacgucgaggacaccaagaucgaccucugguccuacaacgccgagcuccucgucgcccucgagaaccagcacaccaucgaccucaccgacuccgagaugaacaagcucuucgagcgcaccaagaagcagcuccgcgagaacgccgaggacaugggcaacggcugcuucaagaucuaccacaagugcgacaacgccugcaucggcuccauccgcaacggcaccuacgaccacgacgucuaccgcgacgaggcccucaacaaccgcuuccagaucaagggcgucgagcucaaguccggcuacaaggacuggauccucuggaucuccuucgccaucuccugcuuccuccucugcgucgcccuccucggcuucaucaugugggccugccagaagggcaacauccgcugcaacaucugcaucuga

SEQ ID NO: 97814 - RNA, 1701 nt, Artificial Sequence; identical to SEQ ID NO: 96109
  derived and/or modified CDS sequence (opt2) from hemagglutinin__InfluenzaA__ABU92623

SEQ ID NO: 97815 - RNA, 1701 nt, Artificial Sequence
  derived and/or modified CDS sequence (opt2) from hemagglutinin__InfluenzaA__ABU92624
augaagaccaucaucgcccucuccuacauccucugccucgucuucgcccagaagcuccccggcaacgacaacuccaccgccacccucugccucggccaccacgccguccccaacggcaccaucgucaagaccaucaccaacgaccagaucgaggucaccaacgccaccgagcucguccagaucuccuccaccggcgagaucugcgacuccccccaccagauccucgacggcgagaacugcacccucaucgacgcccuccucggcgacccccagugcgacggcuuccagaacaagaagugggaccucuucgucgagcgcuccaaggccuacuccaacugcuaccccuacgacguccccgacuacgccucccuccgcucccucgucgccuccuccggcacccucgaguucaacaacgaguccuucgacuggaccggcgucacccagaacggcaccuccuccgccugcaagcgccgcuccgacaaguccuucuucucccgccucaacuggcucacccaccucaaguacaaguaccccgcccucaacgucaccaugcccaacaacgagaaguucgacaagcucuacaucuggggcguccaccaccccggcaccgacuccgaccagaucucccucuacgcccaggcccucggccgcaucaccgucuccaccaagcgcucccagcagaccgucauccccaacaucggcucccgcccccgcguccgcgacgucuccucccgcaucuccaucuacuggaccaucgucaagcccggcgacauccuccucaucaacuccaccggcaaccucaucgccccccgcggcuacuucaagauccgcuccggcaaguccuccaucaugcgcuccgacgcccccaucggcaagugcaacuccgagugcaucacccccaacggcuccauccccaacgacaagcccuuccagaacgucaaccgcaucaccuacggcgccugcccccgcuacgucaagcagaacacccucaagcucgccaccggcaugcgcaacguccccgagaagcagacccgcggcaucuucggcgccaucgccggcuucaucgagaacggcugggagggcauggucgacggcugguacggcuuccgccaccagaacuccgagggcaccggccaggccgccgaccucaaguccacccaggccgccaucaaccagaucaacggcaagcucaaccgccucaucggcaagaccaacgagaaguuccaccagaucgagaaggaguucuccgaggucgagggccgcauccaggaccucgagaaguacgucgaggacaccaagaucgaccucugguccuacaacgccgagcuccucgucgcccucgagaaccagcacaccaucgaccucaccgacuccgagaugaacaagcucuucgagcgcaccaagaagcagcuccgcgagaacgccgaggacaugggcaacggcugcuucaagaucuaccacaagugcgacaacgccugcaucggcuccauccgcaacggcaccuacgaccacgacgucuaccgcgacgaggcccucaacaaccgcuuccagaucaagggcgucgagcucaaguccggcuacaaggacuggauccucuggaucuccuucgccaucuccugcuuccuccucugcgucgcccuccucggcuucaucaugugggccugccagaagggcaacauccgcugcaacaucugcaucuga

SEQ ID NO: 97816 - RNA, 1701 nt, Artificial Sequence; identical to SEQ ID NO: 97798
  derived and/or modified CDS sequence (opt2) from hemagglutinin__InfluenzaA__ABU92625

SEQ ID NO: 97817 - RNA, 1701 nt, Artificial Sequence; identical to SEQ ID NO: 96109
  derived and/or modified CDS sequence (opt2) from hemagglutinin__InfluenzaA__ABU92626

SEQ ID NO: 97818 - RNA, 1701 nt, Artificial Sequence
  derived and/or modified CDS sequence (opt2) from hemagglutinin__InfluenzaA__ABU92627
augaagaccaucaucgcccucuccuacauccucugcauggucuucgcccagaagcuccccggcaacgacaacuccaccgccacccucugccucggccaccacgccguccccaacggcaccaucgucaagaccaucaccaacgaccagaucgaggucaccaacgccaccgagcucguccagaucuccuccaccggcgagaucugcgacuccccccaccagauccucgacggcgagaacugcacccucaucgacgcccuccucggcgacccccagugcgacggcuuccagaacaagaagugggaccucuucgucgagcgcuccaaggccuacuccaacugcuaccccuacgacguccccgacuacgccucccuccgcucccucgucgccuccuccggcacccucgaguucaacaacgaguccuucgacuggaccggcgucacccagaacggcaccuccuccgccugcaagcgccgcuccgacaaguccuucuucucccgccucaacuggcucacccaccucaaguacaaguaccccgcccucaacgucaccaugcccaacaacgagaaguucgacaagcucuacaucuggggcguccaccaccccggcaccgacuccgaccagaucucccucuacgcccaggccuccggccgcaucaccgucuccaccaagcgcucccagcagaccgucauccccaacaucggcucccgcccccgcguccgcgacgucuccucccgcaucuccaucuacuggaccaucgucaagcccggcgacauccuccucaucaaccgccccggcaaccucaucgccccccgcggcuacuucaagauccgcuccggcaaguccuccaucaugcgcuccgacgcccccaucggcaagugcaacuccgagugcaucacccccaacggcuccauccccaacgacaagcccuuccagaacgucaaccgcaucaccuacggcgccugcccccgcuacgucaagcagaacacccucaagcucgccaccggcaugcgcaacguccccgagaagcagacccgcggcaucuucggcgccaucgccggcuucaucgagaacggcugggagggcauggucgacggcugguacggcuuccgccaccagaacuccgagggcaccggccaggccgccgaccucaaguccacccaggccgccaucaaccagaucaacggcaagcucaaccgccucaucggcaagaccaacgagaaguuccaccagaucgagaaggaguucuccgaggucgagggccgcauccaggaccucgagaaguacgucgaggacaccaagaucgaccucugguccuacaacgccgagcuccucgucgcccucgagaaccagcacaccaucgaccucaccgacuccgagaugaacaagcucuucgagcgcaccaagaagcagcuccgcgagaacgccgaggacaugggcaacggcugcuucaagaucuaccacaagugcgacaacgccugcaucggcuccauccgcaacggcaccuacgaccacgacgucuaccgcgacgaggcccucaacaaccgcuuccagaucaagggcgucgagcucaaguccggcuacaaggacuggauccucuggaucuccuucgccaucuccugcuuccuccucugcgucgcccuccucggcuucaucaugugggccugccagaagggcaacauccgcugcaacaucugcaucuga

SEQ ID NO: 97819 - RNA, 1701 nt, Artificial Sequence; identical to SEQ ID NO: 97798
  derived and/or modified CDS sequence (opt2) from hemagglutinin__InfluenzaA__ABU92628

SEQ ID NO: 97820 - RNA, 1701 nt, Artificial Sequence; identical to SEQ ID NO: 97798
  derived and/or modified CDS sequence (opt2) from hemagglutinin__InfluenzaA__ABU92631

SEQ ID NO: 97821 - RNA, 1701 nt, Artificial Sequence
  derived and/or modified CDS sequence (opt2) from hemagglutinin__InfluenzaA__ABU92632
augaagaccaucaucgcccucuccuacauccucugccucgucuucgcccagaagcuccccggcaacgacaacuccaccgccacccucugccucggccaccacgccguccccaacggcaccaucgucaagaccaucaccaacgaccagaucgaggucaccaacgccaccgagcucguccaguccuccuccaccggcggcaucugcgacuccccccaccagauccucgacggcgagaacugcacccucaucgacgcccuccucggcgacccccagugcgacggcuuccagaacaagaagugggaccucuucgucgagcgcuccaaggccuacuccaacugcuaccccuacgacguccccgacuacgccucccuccgcucccucaucgccuccuccggcacccucgaguucaacaacgaguccuucaacuggaccggcgucacccagaacggcaccuccuccgccugcaagcgccgcuccaacaaguccuucuucucccgccucaacuggcucacccaccucaaguacaaguaccccgcccucaacgucaccaugcccaacaacgagaaguucgacaagcucuacaucuggggcguccaccaccccggcaccgacuccgaccagaucucccucuacgcccaggccuccggccgcaucaccgucuccaccaagcgcucccagcagaccgucauccccaacaucggcucccgcccccgcguccgcgacgucuccucccgcaucuccaucuacuggaccaucgucaagcccggcgacauccuccucaucaacuccaccggcaaccucaucgccccccgcggcuacuucaagauccgcuccggcaaguccuccaucaugcgcuccgacgcccccaucggcaagugcaacuccgagugcaucacccccaacggcuccauccccaacgacaagcccuuccagaacgucaaccgcaucaccuacggcgccugcccccgcuacgucaagcagaacacccucaagcucgccaccggcaugcgcaacguccccgagaagcagacccgcggcaucuucggcgccaucgccggcuucaucgagaacggcugggagggcauggucgacggcugguacggcuuccgccaccucaacuccgagggcaccggccaggccgccgaccucaaguccacccaggccgccaucaaccagaucaacggcaagcucaaccgccucaucggcaagaccaacgagaaguuccaccagaucgagaaggaguucuccgaggucgagggccgcauccaggaccucgagaaguacgucgaggacaccaagaucgaccucugguccuacaacgccgagcuccucgucgcccucgagaaccagcacaccaucgaccucaccgacuccgagaugaacaagcucuucgagcgcaccaagaagcagcuccgcgagaacgccgaggacaugggcaacggcugcuucaagaucuaccacaagugcgacaacgccugcaucggcuccauccgcaacggcaccuacgaccacgacgucuaccgcgacgaggcccucaacaaccgcuuccagaucaagggcgucgagcucaaguccggcuacaaggacuggauccucuggaucuccuucgccaucuccugcuuccuccucugcgucgcccuccucggcuucaucaugugggccugccagaagggcaacauccgcugcaacaucugcaucuga

SEQ ID NO: 97822 - RNA, 1701 nt, Artificial Sequence
  derived and/or modified CDS sequence (opt2) from hemagglutinin__InfluenzaA__ABU92635
augaagaccaucaucgcccucuccuacauccucugccucgucuucgcccagaagcuccccggcaacgacaacuccaccgccacccucugccucggccaccacgccguccccaacggcaccaucgucaagaccaucaccaacgaccagaucgaggucaccaacgccaccgagcucguccaguccuccuccaccggcggcaucugcgacuccccccaccagauccucgacggcgagaacugcacccucaucgacgcccuccucggcgacccccagugcgacggcuuccagaacaagaagugggaccucuucgucgagcgcuccaaggccuacuccaacugcuaccccuacgacguccccgacuacgccucccuccgcuccaucgucgccuccuccggcacccucgaguucaacaacgaguccuucaacuggaccggcgucacccagaacggcaccuccuccgccugcaagcgcaaguccaacaaguccuucuucucccgccucaacuggcucacccaccucaaguacaaguaccccgcccucaacgucaccaugcccaacaacgagaaguucgacaagcucuacaucuggggcguccaccaccccggcaccgacaacgaccagaucucccucuacgcccaggccuccggccgcaucaccgucuccaccaagcgcucccagcagaccgucauccccaacaucggcucccgcccccgcguccgcgacgucuccucccgcaucuccaucuacuggaccaucgucaagcccggcgacauccuccucaucaacuccaccggcaaccucaucgccccccgcggcuacuucaagauccgcuccggcaaguccuccaucaugcgcuccgacgcccccaucggcaagugcaacuccgagugcaucacccccaacggcuccauccccaacgacaagcccuuccagaacgucaaccgcaucaccuacggcgccugcccccgcuacgucaagcagaacacccucaagcucgccaccggcaugcgcaacguccccgagaagcagacccgcggcaucuucggcgccaucgccggcuucaucgagaacggcugggagggcauggucgacggcugguacggcuuccgccaccagaacuccgagggcaccggccaggccgccgaccucaaguccacccaggccgccaucaaccagaucaacggcaagcucaaccgccucaucggcaagaccaacgagaaguuccaccagaucgagaaggaguucuccgaggucgagggccgcauccaggaccucgagaaguacgucgaggacaccaagaucgaccucugguccuacaacgccgagcuccucgucgcccucgagaaccagcacaccaucgaccucaccgacuccgagaugaacaagcucuucgagcgcaccaagaagcagcuccgcgagaacgccgaggacaugggcaacggcugcuucaagaucuaccacaagugcgacaacgccugcaucggcuccauccgcaacggcaccuacgaccacgacgucuaccgcgacgaggcccucaacaaccgcuuccagaucaagggcgucgagcucaaguccggcuacaaggacuggauccucuggaucuccuucgccaucuccugcuuccuccucugcgucgcccuccucggcuucaucaugugggccugccagaagggcaacauccgcugcaacaucugcaucuga

SEQ ID NO: 97823 - RNA, 1701 nt, Artificial Sequence; identical to SEQ ID NO: 96666
  derived and/or modified CDS sequence (opt2) from hemagglutinin__InfluenzaA__ABU92636

SEQ ID NO: 97824 - RNA, 1701 nt, Artificial Sequence
  derived and/or modified CDS sequence (opt2) from hemagglutinin__InfluenzaA__ABU92637
augaagaccaucaucgcccucuccuacauccucugccucgucuucgcccagaagcuccccggcaacgacaacuccaccgccacccucugccucggccaccacgccguccccaacggcaccaccgucaagaccaucaccaacgaccagaucgaggucaccaacgccaccgagcucguccaguccuccuccaccggcggcaucugcgacuccccccaccagauccucgacggcgagaacugcacccucaucgacgcccuccucggcgacccccagugcgacggcuuccagaacaagaagugggaccucuucgucgagcgcuccaaggccuacuccaacugcuaccccuacgacguccccgacuacgucucccuccgcucccucgucgccuccuccggcacccucgaguucaacaacgaguccuucaacuggaccggcgucacccagaacggcaccuccuccgccugcaagcgccgcuccaacaacuccuucuucucccgccucaacuggcucacccaccucaaguucaaguaccccgcccucaacgucaccaugcccaacaacgagaaguucgacaagcucuacaucuggggcguccaccaccccggcaccgacaacgaccagaucucccucuacgcccaggccuccggccgcaucaccgucuccaccaagcgcucccagcagaccgucauccccaacaucggcucccgcccccgcguccgcgacauccccucccgcaucuccaucuacuggaccaucgucaagcccggcgacauccuccucaucaacuccaccggcaaccucaucgccccccgcggcuacuucaagauccgcuccggcaaguccuccaucaugcgcuccgacgcccccaucggcaagugcaacuccgagugcaucacccccaacggcuccauccccaacgacaagcccuuccagaacgucaaccgcaucaccuacggcgccugcccccgcuacgucaagcagaacacccucaagcucgccaccggcaugcgcaacguccccgagaagcagacccgcggcaucuucggcgccaucgccggcuucaucgagaacggcugggagggcauggucgacggcugguacggcuuccgccaccagaacuccgagggcaucggccaggccgccgaccucaaguccacccaggccgccaucaaccagaucaacggcaagcucaaccgccucaucggcaagaccaacgagaaguuccaccagaucgagaaggaguucuccgaggucgagggccgcauccaggaccucgagaaguacgucgaggacaccaagaucgaccucugguccuacaacgccgagcuccucgucgcccucgagaaccagcacaccaucgaccucaccgacuccgagaugaacaagcucuucgagcgcaccaagaagcagcuccgcgagaacgccgaggacaugggcaacggcugcuucaagaucuaccacaagugcgacaacgccugcaucggcuccauccgcaacggcaccuacgaccacgacgucuaccgcgacgaggcccucaacaaccgcuuccagaucaagggcgucgagcucaaguccggcuacaaggacuggauccucuggaucuccuucgccaucuccugcuuccuccucugcgucgcccuccucggcuucaucaugugggccugccagaagggcaacauccgcugcaacaucugcaucuga

SEQ ID NO: 97825 - RNA, 1701 nt, Artificial Sequence
  derived and/or modified CDS sequence (opt2) from hemagglutinin__InfluenzaA__ABU92639
augaagaccaucaucgcccucuccuacauccucugccucgucuucgcccagaagcuccccggcaacgacaacuccaccgccacccucugccucggccaccacgccguccccaacggcaccaucgucaagaccaucaccaacgaccagaucgaggucaccaacgccaccgagcucguccagaucuccuccaccggcgagaucugcgacuccccccaccagauccucgacggcgagaacugcacccucaucgacgcccuccucggcgacccccagugcgacggcuuccagaacaccaagugggaccucuucgucgagcgcuccaaggccuacuccaacugcuaccccuacgacguccccgacuacgccucccuccgcucccucgucgccuccuccggcacccucgaguucaacaacgaguccuucgacuggaccggcgucacccagaacggcaccuccuccgccugcaagcgccgcuccgacaaguccuucuucucccgccucaacuggcucacccaccucaaguacaaguaccccgcccucaacgucaccaugcccaacaacgagaaguucgacaagcucuacaucuggggcguccaccaccccggcaccgacuccgaccagaucucccucuacgcccaggccuccggccgcaucaccgucuccaccaagcgcucccagcagaccgucauccccaacaucggcucccgcccccgcguccgcgacgucuccucccgcaucuccaucuacuggaccaucgucaagcccggcgacauccuccucaucaacuccaccggcaaccucaucgccccccgcggcuacuucaagauccgcuccggcaaguccuccaucaugcgcuccgacgcccccaucggcaagugcaacuccgagugcaucacccccaacggcuccauccccaacgacaagcccuuccagaacgucaaccgcaucaccuacggcgccugcccccgcuacgucaagcagaacacccucaagcucgccaccggcaugcgcaacguccccgagaagcagacccgcggcaucuucggcgccaucgccggcuucaucgagaacggcugggagggcauggucgacggcugguacggcuuccgccaccagaacuccgagggcaccggccaggccgccgaccucaaguccacccaggccgccaucaaccagaucaacggcaagcucaaccgccucaucggcaagaccaacgagaaguuccaccagaucgagaaggaguucuccgaggucgagggccgcauccaggaccucgagaaguacaucgaggacaccaagaucgaccucugguccuacaacgccgagcuccucgucgcccucgagaaccagcacaccaucgaccucaccgacuccgagaugaacaagcucuucgagcgcaccaagaagcagcuccgcgagaacgccgaggacaugggcaacggcugcuucaagaucuaccacaagugcgacaacgccugcaucggcuccauccgcaacggcaccuacgaccacgacgucuaccgcgacgaggcccucaacaaccgcuuccagaucaagggcgucgagcucaaguccggcuacaaggacuggauccucuggaucuccuucgccaucuccugcuuccuccucugcgucgcccuccucggcuucaucaugugggccugccagaagggcaacauccgcugcaacaucugcaucuga

SEQ ID NO: 97826 - RNA, 1701 nt, Artificial Sequence
  derived and/or modified CDS sequence (opt2) from hemagglutinin__InfluenzaA__ABU92640
augaagaccaucaucgcccucuccuacauccucugccucgucuucgcccagaagcuccccggcaacgacaacuccaccgccacccucugccucggccaccacgccguccccaacggcaccaucgucaagaccaucaccaacgaccagaucgaggucaccaacgccaccgagcucguccaguccuccuccaccggcgagaucugcgacuccccccaccagauccucgacggcgagaacugcacccucaucgacgcccuccucggcgacccccagugcgacggcuuccagaacaagaagugggaccucuucgucgagcgcuccaaggccuacuccaacugcuaccccuacgacguccccgacuacgccucccuccgcucccucgucgccuccuccggcacccucgaguucaacaacgaguccuucaacuggaccggcgucacccagaacggcaccuccuccgccugcaagcgccgcuccaacaacuccuucuucucccgccucaacuggcucacccaccucaaguucaaguaccccgcccucaacgucaccaugcccaacaacgagaaguucgacaagcucuacaucuggggcguccaccaccccggcaccgacaacgaccagaucuuccucuacgcccaggccuccggccgcaucaccgucuccaccaagcgcucccagcagaccgucauccccaacaucggcucccgcccccgcguccgcaacauccccucccgcaucuccaucuacuggaccaucgucaagcccggcgacauccuccucaucaacuccaccggcaaccucaucgccccccgcggcuacuucaagauccgcuccggcaaguccuccaucaugcgcuccgacgcccccaucggcaagugcaacuccgagugcaucacccccaacggcuccauccccaacgacaagcccuuccagaacgucaaccgcaucaccuacggcgccugcccccgcuacgucaagcagaacacccucaagcucgccaccggcaugcgcaacguccccgagaagcagacccgcggcaucuucggcgccaucgccggcuucaucgagaacggcugggagggcauggucgacggcugguacggcuuccgccaccagaacuccgagggcaucggccaggccgccgaccucaaguccacccaggccgccaucaaccagaucaacggcaagcucaaccgccucaucggcaagaccaacgagaaguuccaccagaucgagaaggaguucuccgaggucgagggccgcauccaggaccucgagaaguacgucgaggacaccaagaucgaccucugguccuacaacgccgagcuccucgucgcccucgagaaccagcacaccaucgaccucaccgacuccgagaugaacaagcucuucgagcgcaccaagaagcagcuccgcgagaacgccgaggacaugggcaacggcugcuucaagaucuaccacaagugcgacaacgccugcaucggcuccauccgcaacggcaccuacgaccacgacgucuaccgcgacgaggcccucaacaaccgcuuccagaucaagggcgucgagcucaaguccggcuacaaggacuggauccucuggaucuccuucgccaucuccugcuuccuccucugcgccgcccuccucggcuucaucaugugggccugccagaagggcaacauccgcugcaacaucugcaucuga

SEQ ID NO: 97827 - RNA, 1701 nt, Artificial Sequence
  derived and/or modified CDS sequence (opt2) from hemagglutinin__InfluenzaA__ABU92641
augaagaccaucaucgcccucuccuacauccucugccucgucuucgcccagaagcuccccggcaacgacaacuccaccgccacccucugccucggccaccacgccguccccaacggcaccaucgucaagaccaucaccaacgaccagaucgaggucaccaacgccaccgagcucguccaguccuccuccaccggcggcaucugcgacuccccccaccagauccucgacggcgagaacugcacccucaucgacgcccuccucggcgacccccagugcgacggcuuccagaacaagaagugggaccucuucgucgagcgcuccaaggccuacuccaacugcuaccccuacgacguccccgacuacgccucccuccgcucccucgucgccuccuccggcacccucgaguucaacaacgaguccuucaacuggaccggcgucacccagaacggcaccuccuccgccugcaagcgcaaguccaacaacuccuucuucucccgccucaacuggcucacccaccucaaguucaaguaccccgcccucaacgucaccaugcccaacaacgagaaguucgacaagcucuacaucuggggcguccaccaccccggcaccgacaacgaccagaucucccucuacgcccaggccuccggccgcaucaccgucuccaccaagcgcucccagcagaccgucauccccaacaucggcucccgcccccgcguccgcgacauccccucccgcaucuccaucuacuggaccaucgucaagcccggcgacauccuccucaucaacuccaccggcaaccucaucgccccccgcggcuacuucaagauccgcuccggcaaguccuccaucaugcgcuccgacgcccccaucggcaagugcaacuccgagugcaucacccccaacggcuccauccccaacgacaagcccuuccagaacgucaaccgcaucaccuacggcgccugcccccgcuacgucaagcagaacacccucaagcucgccaccggcaugcgcaacguccccgagaagcagacccgcggcaucuucggcgccaucgccggcuucaucgagaacggcugggagggcauggucgacggcugguacggcuuccgccaccagaacuccgagggcaucggccaggccgccgaccucaaguccacccaggccgccaucaaccagaucaacggcaagcucaaccgccucaucggcaagaccaacgagaaguuccaccagaucgagaaggaguucuccgaggucgagggccgcauccaggaccucgagaaguacgucgaggacaccaagaucgaccucugguccuacaacgccgagcuccucgucgcccucgagaaccagcacaccaucgaccucaccgacuccgagaugaacaagcucuucgagcgcaccaagaagcagcuccgcgagaacgccgaggacaugggcaacggcugcuucaagaucuaccacaagugcgacaacgccugcaucggcuccauccgcaacggcaccuacgaccacgacgucuaccgcgacgaggcccucaacaaccgcuuccagaucaagggcgucgagcucaaguccggcuacaaggacuggauccucuggaucuccuucgccaucuccugcuuccuccucugcgucgcccuccucggcuucaucaugugggccugccagaagggcaacauccgcugcaacaucugcaucuga

SEQ ID NO: 97828 - RNA, 1701 nt, Artificial Sequence
  derived and/or modified CDS sequence (opt2) from hemagglutinin__InfluenzaA__ABU92642
augaagaccaucaucgcccucuccuacauccucugccucgucuucgcccagaagcuccccggcaacgacaacuccaccgccacccucugccucggccaccacgccguccccaacggcaccaucgucaagaccaucaccaacgaccagaucgaggucaccaacgccaccgagcucguccaguccuccuccaccggcggcaucugcgacuccccccaccagauccucgacggcgagaacugcacccucaucgacgcccuccucggcgacccccagugcgacggcuuccagaacaagaagugggaccucuucgucgagcgcuccaaggccuacuccaacugcuaccccuacgacguccccgacuacgccucccuccgcucccucgucgccuccuccggcacccucgaguucaacaacgaguccuucaacuggaccggcgucacccagaacggcaccuccuccgccugcaagcgccgcuccaacaacuccuucuucucccgccucaacuggcucacccaccucaaguucaaguaccccgcccucaacgucaccaugcccaacaacgagaaguucgacaagcucuacaucuggggcguccaccaccccggcaccgacaacgaccagaucuuccucuacgcccaggccuccggccgcaucaucgucuccaccaagcgcucccagcagaccgucauccccaacaucggcucccgcccccgcguccgcaacauccccucccgcaucuccaucuacuggaccaucgucaagcccggcgacauccuccucaucaacuccaccggcaaccucaucgccccccgcggcuacuucaagauccgcuccggcaaguccuccaucaugcgcuccgacgcccccaucggcaagugcaacuccgagugcaucacccccaacggcuccauccccaacgacaagcccuuccagaacgucaaccgcaucaccuacggcgccugcccccgcuacgucaagcagaacacccucaagcucgccaccggcaugcgcaacguccccgagaagcagacccgcggcaucuucggcgccaucgccggcuucaucgagaacggcugggagggcauggucgacggcugguacggcuuccgccaccagaacuccgagggcaucggccaggccgccgaccucaaguccacccaggccgccaucgaccagaucaacggcaagcucaaccgccucaucggcaagaccaacgagaaguuccaccagaucgagaaggaguucuccgaggucgagggccgcauccaggaccucgagaaguacgucgaggacaccaagaucgaccucugguccuacaacgccgagcuccucgucgcccucgagaaccagcacaccaucgaccucaccgacuccgagaugaacaagcucuucgagaagaccaagaagcagcuccgcgagaacgccgaggacaugggcaacggcugcuucaagaucuaccacaagugcgacaacgccugcaucggcuccauccgcaacggcaccuacgaccacgacgucuaccgcgacgaggcccucaacaaccgcuuccagaucaagggcgucgagcucaaguccggcuacaaggacuggauccucuggaucuccuucgccaucuccugcuuccuccucugcgucgcccuccucggcuucaucaugugggccugccagaagggcaacauccgcugcaacaucugcaucuga

SEQ ID NO: 97829 - RNA, 1701 nt, Artificial Sequence
  derived and/or modified CDS sequence (opt2) from hemagglutinin__InfluenzaA__ABU92643
augaagaccaucaucgcccucuccuacauccucugccucgucuucgcccagaagcuccccggcaacgacaacuccaccgccacccucugccucggccaccacgccguccccaacggcaccaucgucaagaccaucaccaacgaccagaucgaggucaccaacgccaccgagcucguccagaucuccuccaccggcgagaucugcgacuccccccaccagauccucgacggcgagaacugcacccucaucgacgcccuccucggcgacccccagugcgacggcuuccagaacaagaagugggaccucuucgucgagcgcuccaaggccuacuccaacugcuaccccuacgacguccccgacuacgccucccuccgcucccucgucgccuccuccggcacccucgaguucaacaacgaguccuucgacuggaccggcgucacccagaacggcaccuccuccgccugcaagcgccgcuccgacaaguccuucuucucccgccucaacuggcucacccaccucaaguacaaguaccccgcccucaacgucaccaugcccaacaacgagaaguucgacaagcucuacaucuggggcguccaccaccccggcaccgacuccgaccagaucucccucuacgcccaggccuccggccgcaucaccgucuccaccaagcgcucccagcagaccgucauccccaacaucggcucccgcccccgcguccgcgacgucuccucccgcaucuccaucuacuggaccaucgucaagcccggcgacauccuccucaucaacuccaccggcaaccucaucgccccccgcggcuacuucaagauccgcuccggcaaguccuccaucaugcgcuccgacgcccccaucggcaagugcaacuccgagugcaucacccccaacggcuccauccccaacgacaagcccuuccagaacgucaaccgcaucaccuacggcgccugcccccgcuacgucaagcagaacacccucaagcucgccaccggcaugcgcaacguccccgagaagcagacccgcggcaucuucggcgccaucgccggcuucaucgagaacggcugggagggcauggucgacggcugguacggcuuccgccaccagaacuccgagggcaccggccaggccgccgaccucaaguccacccaggccgccaucaaccagaucaacggcaagcucaaccgccucaucggcaagaccaacgagaaguuccaccagaucgagaaggaguucuccgaggucgagggccgcauccaggaccucgagaaguacgucgaggacaccaagaucgaccucugguccuacaacgccgagcuccucgucgcccucgagaaccagcacaccaucgaccucaccgacuccgagaugaacaagcucuucgagcgcaccaagaagcagcuccgcgagaacgccgaggacaugggcaacggcugcuucaagaucuaccacaagugcgacaacgccugcaucggcuccauccgcaacggcaccuacgaccacaacgucuaccgcgacgaggcccucaacaaccgcuuccagaucaagggcgucgagcucaaguccggcuacaaggacuggauccucuggaucuccuucgccaucuccugcuuccuccucugcgucgcccuccucggcuucaucaugugggccugccagaagggcaacauccgcugcaacaucugcaucuga

SEQ ID NO: 97830 - RNA, 1701 nt, Artificial Sequence
  derived and/or modified CDS sequence (opt2) from hemagglutinin__InfluenzaA__ABU92645
augaagaccaucaucgcccucuccuacauccucugccucgucuucgcccagaagcuccccggcaacgacaacuccaccgccacccucugccucggccaccacgccguccccaacggcaccaucgucaagaccaucaccaacgaccagaucgaggucaccaacgccaccgagcucguccaguccuccuccaccggcgagaucugcgacuccccccaccagauccucgacggcgagaacugcacccucaucgacgcccuccucggcgacccccagugcgacggcuuccagaacaagaagugggaccucuucgucgagcgcuccaaggccuacuccaacugcuaccccuacgacguccccgacuacgccucccuccgcucccucgucgccuccuccggcacccucgaguucaacaacgaguccuucaacuggaccggcgucacccagaacggcaccuccuccgccugcaagcgccgcuccaacaacuccuucuucucccgccucaacuggcucacccaccucaaguucaaguaccccgcccucaacgucaccaugcccaacaacgagaaguucgacaagcucuacaucuggggcguccaccaccccggcaccgacaacgaccagaucuuccucuacgcccaggccuccggccgcaucaccgucuccaccaagcgcucccagcagaccgucauccccaacaucggcucccgcccccgcguccgcaacauccccucccgcaucuccaucuacuggaccaucgucaagcccggcgacauccuccucaucaacuccaccggcaaccucaucgccccccgcggcuacuucaagauccgcuccggcaaguccuccaucaugcgcuccgacgcccccaucggcaagugcaacuccgagugcaucacccccaacggcuccauccccaacgacaagcccuuccagaacgucaaccgcaucgccuacggcgccugcccccgcuacgucaagcagaacacccucaagcucgccaccggcaugcgcaacguccccgagaagcagacccgcggcaucuucggcgccaucgccggcuucaucgagaacggcugggagggcauggucgacggcugguacggcuuccgccaccagaacuccgagggcaucggccaggccgccgaccucaaguccacccaggccgccaucaaccagaucaacggcaagcucaaccgccucaucggcaagaccaacgagaaguuccaccagaucgagaaggaguucuccgaggucgagggccgcauccaggaccucgagaaguacgucgaggacaccaagaucgaccucugguccuacaacgccgagcuccucgucgcccucgagaaccagcacaccaucgaccucaccgacuccgagaugaacaagcucuucgagcgcaccaagaagcagcuccgcgagaacgccgaggacaugggcaacggcugcuucaagaucuaccacaagugcgacaacgccugcaucggcuccauccgcaacggcaccuacgaccacgacgucuaccgcgacgaggcccucaacaaccgcuuccagaucaagggcaucgagcucaaguccggcuacaaggacuggauccucuggaucuccuucgccaucuccugcuuccuccucugcgucguccuccucggcuucaucaugugggccugccagaagggcaacauccgcugcaacaucugcaucuga

SEQ ID NO: 97831 - RNA, 1701 nt, Artificial Sequence
  derived and/or modified CDS sequence (opt2) from hemagglutinin__InfluenzaA__ABU92646
augaagaccaucaucgcccucuccuacauccucugccucgucuucgcccagaagcuccccggcaacgacaacuccaccgccacccucugccucggccaccacgccguccccaacggcaccaucgucaagaccaucaccaacgaccagaucgaggucaccaacgccaccgagcucguccaguccuccuccaccggcggcaucugcgacuccccccaccagauccucgacggcgagaacugcacccucaucgacgcccuccucggcgacccccagugcgacggcuuccagaacaagaagugggaccucuucgucgagcgcuccaaggccuacuccaacugcuaccccuacgacguccccgacuacgccucccuccgcucccucgucgccuccuccggcacccucgaguucaacaacgaguccuucaacuggaccggcgucacccagaacggcaccuccuccgccugcaagcgccgcuccaacaaguccuucuucucccgccucaacuggcucacccaccucaaguucaaguaccccgcccucaacgucaccaugcccaacaacgagaaguucgacaagcucuacaucuggggcguccaccaccccggcaccgacaacgaccagaucucccucuacgcccaggccuccggccgcaucaccgucuccaccaagcgcucccagcagaccgucauccccaacaucggcucccgcccccgcguccgcgacguccccucccgcaucuccaucuacuggaccaucgucaagcccggcgacauccuccucaucaacuccaccggcaaccucaucgccccccgcggcuacuucaagauccgcuccggcaaguccuccaucaugcgcuccgacgcccccaucggcaagugcaacuccgagugcaucacccccaacggcuccauccccaacgacaagcccuuccagaacgucaaccgcaucaccuacggcgccugcccccgcuacgucaagcagaacacccucaagcucgccaccggcaugcgcaacguccccgagaagcagacccgcggcaucuucggcgccaucgccggcuucaucgagaacggcugggagggcauggucgacggcugguacggcuuccgccaccagaacuccgagggcaccggccaggccgccgaccucaaguccacccaggccgccaucaaccagaucaacggcaagcucaaccgccucaucggcaagaccaacgagaaguuccaccagaucgagaaggaguucuccgaggucgagggccgcauccaggaccucgagaaguacgucgaggacaccaagaucgaccucugguccuacaacgccgagcuccucgucgcccucgagaaccagcacaccaucgaccucaccgacuccgagaugaacaagcucuucgagcgcaccaagaagcagcuccgcgagaacgccgaggacaugggcaacggcugcuucaagaucuaccacaagugcgacaacgccugcaucggcuccauccgcaacggcaccuacgaccacgacgucuaccgcgacgaggcccucaacaaccgcuuccagaucaagggcgucgagcucaaguccggcuacaaggacuggauccucuggaucuccuucgccaucuccugcuuccuccucugcgucgcccuccucggcuucaucaugugggccugccagaagggcaacauccgcugcaacaucugcaucuga

SEQ ID NO: 97832 - RNA, 1701 nt, Artificial Sequence; identical to SEQ ID NO: 96109
  derived and/or modified CDS sequence (opt2) from hemagglutinin__InfluenzaA__ABU92647

SEQ ID NO: 97833 - RNA, 1701 nt, Artificial Sequence
  derived and/or modified CDS sequence (opt2) from hemagglutinin__InfluenzaA__ABU92648
augaagaccaucaucgcccucuccuacauccucugccucgucuucgcccagaagcuccccggcaacgacaacuccaccgccacccucugccucggccaccacgccguccccaacggcaccaucgucaagaccaucaccaacgaccagaucgaggucaccaacgccaccgagcucguccagaucuccuccaccggcgagaucugcgacuccccccaccagauccucgacggcgagaacugcacccucaucgacgcccuccucggcgacccccagugcgacggcuuccagaacaagaagugggaccucuucgucgagcgcuccaaggccuacuccaacugcuaccccuacgacguccccgacuacgccucccuccgcucccucgucgccuccuccggcacccucgaguucaacaacgaguccuucaacuggaccggcgucacccagaacggcaccuccuccgccugcaagcgccgcuccgacaaguccuucuucucccgccucaacuggcucacccaccucaaguacaaguaccccgcccucaacgucaccaugcccaacaacgagaaguucgacaagcucuacaucuggggcguccaccaccccggcaccgacuccgaccagaucucccucuacgcccaggccuccggccgcaucaccgucuccaccaagcgcucccagcagaccgucauccccaacaucggcucccgcccccgcguccgcgacgucuccucccgcaucuccaucuacuggaccaucgucaagcccggcgacauccuccucaucaacuccaccggcaaccucaucgccccccgcggcuacuucaagauccgcuccggcaaguccuccaucaugcgcuccgacgcccccaucggcaagugcaacuccgagugcaucacccccaacggcuccauccccaacgacaagcccuuccagaacgucaaccgcaucaccuacggcgccugcccccgcuacgucaagcagaacacccucaagcucgccaccggcaugcgcaacguccccgagaagcagacccgcggcaucuucggcgccaucgccggcuucaucgagaacggcugggagggcauggucgacggcugguacggcuuccgccaccagaacuccgagggcaccggccaggccgccgaccucaaguccacccaggccgccaucaaccagaucaacggcaagcucaaccgccucaucggcaagaccaacgagaaguuccaccagaucgagaaggaguucuccgaggucgagggccgcauccaggaccucgagaaguacgucgaggacaccaagaucgaccucugguccuacaacgccgagcuccucgucgcccucgagaaccagcacaccaucgaccucaccgacuccgagaugaacaagcucuucgagcgcaccaagaagcagcuccgcgagaacgccgaggacaugggcaacggcugcuucaagaucuaccacaagugcgacaacgccugcaucggcuccauccgcaacggcaccuacgaccacgacgucuaccgcgacgaggcccucaacaaccgcuuccagaucaagggcgucgagcucaaguccggcuacaaggacuggauccucuggaucuccuucgccaucuccugcuuccuccucugcgucgcccuccucggcuucaucaugugggccugccagaagggcaacauccgcugcaacaucugcaucuga

SEQ ID NO: 97834 - RNA, 1701 nt, Artificial Sequence; identical to SEQ ID NO: 96109
  derived and/or modified CDS sequence (opt2) from hemagglutinin__InfluenzaA__ABU92649

SEQ ID NO: 97835 - RNA, 1701 nt, Artificial Sequence; identical to SEQ ID NO: 97798
  derived and/or modified CDS sequence (opt2) from hemagglutinin__InfluenzaA__ABU92650

SEQ ID NO: 97836 - RNA, 1701 nt, Artificial Sequence
  derived and/or modified CDS sequence (opt2) from hemagglutinin__InfluenzaA__ABU92651
augaagaccaucaucgcccucuccuacauccucugccucgucuucgcccagaagcuccccggcaacgacaacuccaccgccacccucugccucggccaccacgccguccccaacggcaccaucgucaagaccaucaccaacgaccagaucgaggucaccaacgccaccgagcucguccagaucuccuccaccggcgagaucugcgacuccccccaccagauccucgacggcgagaacugcacccucaucgacgcccuccucggcgacccccagugcgacggcuuccagaacaagaagugggaccucuucgucgagcgcuccaaggccuacuccaacugcuaccccuacgacguccccgacuacgccucccuccgcucccucgucgccuccuccggcacccucgaguucuacaacgaguccuucgacuggaccggcgucacccagaacggcaccuccuccgccugcaagcgccgcuccgacaaguccuucuucucccgccucaacuggcucacccaccucaaguacaaguaccccgcccucaacgucaccaugcccaacaacgagaaguucgacaagcucuacaucuggggcguccaccaccccggcaccgacuccgaccagaucucccucuacgcccaggccuccggccgcaucaccgucuccaccaagcgcucccagcagaccgucauccccaacaucggcucccgcccccgcguccgcgacgucuccucccgcaucuccaucuacuggaccaucgucaagcccggcgacauccuccucaucaacuccaccggcaaccucaucgccccccgcggcuacuucaagauccgcuccggcaaguccuccaucaugcgcuccgacgcccccaucggcaagugcaacuccgagugcaucacccccaacggcuccauccccaacgacaagcccuuccagaacgucaaccgcaucaccuacggcgccugcccccgcuacgucaagcagaacacccucaagcucgccaccggcaugcgcaacguccccgagaagcagacccgcggcaucuucggcgccaucgccggcuucaucgagaacggcugggagggcauggucgacggcugguacggcuuccgccaccagaacuccgagggcaccggccaggccgccgaccucaaguccacccaggccgccaucaaccagaucaacggcaagcucaaccgccucaucggcaagaccaacgagaaguuccaccagaucgagaaggaguucuccgaggucgagggccgcauccaggaccucgagaaguacgucgaggacaccaagaucgaccucugguccuacaacgccgagcuccucgucgcccucgagaaccagcacaccaucgaccucaccgacuccgagaugaacaagcucuucgagcgcaccaagaagcagcuccgcgagaacgccgaggacaugggcaacggcugcuucaagaucuaccacaagugcgacaacgccugcaucggcuccauccgcaacggcaccuacgaccacgacgucuaccgcgacgaggcccucaacaaccgcuuccagaucaagggcgucgagcucaaguccggcuacaaggacuggauccucuggaucuccuucgccaucuccugcuuccuccucugcgucgcccuccucggcuucaucaugugggccugccagaagggcaacauccgcugcaacaucugcaucuga

SEQ ID NO: 97837 - RNA, 1701 nt, Artificial Sequence
  derived and/or modified CDS sequence (opt2) from hemagglutinin__InfluenzaA__ABU92652
augaagaccaucaucgcccucuccuacauccucugccucgucuucgcccagaagcuccccggcaacgacaacuccaccgccacccucugccucggccaccacgccguccccaacggcaccaucgucaagaccaucaccaacgaccagaucgaggucaccaacgccaccgagcucguccaguccuccuccaccggcggcaucugcgacuccccccaccagauccucgacggcgagaacugcacccucaucgacgcccuccucggcgacccccagugcgacggcuuccagaacaagaagugggaccucuucgucgagcgcuccaaggccuacuccaacugcuaccccuacgacguccccgacuacgccucccuccgcucccucgucgccuccuccggcacccucgaguucaacaacgaguccuucgacuggaccggcgucacccagaacggcaccuccuccgccugcaagcgccgcuccaacaaguccuucuucucccgccucaacuggcucacccaccucaaguacaaguaccccgcccucaacgucaccaugcccaacaacgagaaguucgacaagcucuacaucuggggcguccaccaccccggcaccgacuccgaccagaucucccucuacgcccaggccuccggccgcaucaccgucuccaccaagcgcucccagcagaccgucauccccaacaucggcucccgcccccgcguccgcgacgucuccucccgcaucuccaucuacuggaccaucgucaagcccggcgacauccuccucaucaacuccaccggcaaccucaucgccccccgcggcuacuucaagauccgcuccggcaaguccuccaucaugcgcuccgacgcccccaucggcaagugcaacuccgagugcaucacccccaacggcuccauccccaacgacaagcccuuccagaacgucaaccgcaucaccuacggcgccugcccccgcuacgucaagcagaacacccucaagcucgccaccggcaugcgcaacguccccgagaagcagacccgcggcaucuucggcgccaucgccggcuucaucgagaacggcugggagggcauggucgacggcugguacggcuuccgccaccagaacuccgagggcaccggccaggccgccgaccucaaguccacccaggccgccaucaaccagaucaacggcaagcucaaccgccucaucggcaagaccaacgagaaguuccaccagaucgagaaggaguucuccgaggucgagggccgcauccaggaccucgagaaguacgucgaggacaccaagaucgaccucugguccuacaacgccgagcuccucgucgcccucgagaaccagcacaccaucgaccucaccgacuccgagaugaacaagcucuucgagcgcaccaagaagcagcuccgcgagaacgccgaggacaucggcaacggcugcuucaagaucuaccacaagugcgacaacgccugcaucggcuccauccgcaacggcaccuacgaccacgacgucuaccgcgacgaggcccucaacaaccgcuuccagaucaagggcgucgagcucaaguccggcuacaaggacuggauccucuggaucuccuucgccaucuccugcuuccuccucugcgucgcccuccucggcuucaucaugugggccugccagaagggcaacauccgcugcaacaucugcaucuga

SEQ ID NO: 97838 - RNA, 1701 nt, Artificial Sequence; identical to SEQ ID NO: 97798
  derived and/or modified CDS sequence (opt2) from hemagglutinin__InfluenzaA__ABU92653

SEQ ID NO: 97839 - RNA, 1701 nt, Artificial Sequence
  derived and/or modified CDS sequence (opt2) from hemagglutinin__InfluenzaA__ABU92654
augaagaccaucaucgcccucuccuacauccucugccucgucuucgcccagaagcuccccggcaacgacaacuccaccgccacccucugccucggccaccacgccguccccaacggcaccaucgucaagaccaucaccaacgaccagaucgaggucaccaacgccaccgagcucguccaguccuccuccaccggcggcaucugcgacuccccccaccagauccucgacggcgagaacugcacccucaucgacgcccuccucggcgacccccagugcgacggcuuccagaacaagaagugggaccucuucgucgagcgcuccaaggccuacuccaacugcuaccccuacgacguccccgacuacgccucccuccgcucccucgucgccuccuccggcacccucgaguucaacaacgaguccuucaacuggaccggcgucacccagaacggcaccuccuccgccugcaagcgccgcuccaacaaguccuucuucucccgccucaacuggcucacccaccucaaguucaaguaccccgcccucaacgucaccaugcccaacaacgagaaguucgacaagcucuacaucuggggcguccaccaccccggcaccgacaacgaccagaucucccucuacgcccaggccuccggcaagaucaccgucuccaccaagcgcucccagcagaccgucauccccaacaucggcucccgcccccgcguccgcgacguccccucccgcaucuccaucuacuggaccaucgucaagcccggcgacauccuccucaucaacuccaccggcaaccucaucgccccccgcggcuacuucaagauccgcuccggcaaguccuccaucaugcgcuccgacgcccccaucggcaagugcaacuccgagugcaucacccccaacggcuccauccucaacgacaagcccuuccagaacgucaaccgcaucaccuacggcgccugcccccgcuacgucaagcagaacacccucaagcucgccaccggcaugcgcaacguccccgagaagcagacccgcggcaucuucggcgccaucgccggcuucaucgagaacggcugggagggcauggucgacggcugguacggcuuccgccaccagaacgccgagggcaccggccaggccgccgaccucaaguccacccaggccgccaucaaccagaucaacggcaagcucaaccgccucaucggcaagaccaacgagaaguuccaccagaucgagaaggaguucuccgaggucgagggccgcauccaggaccucgagaaguacgucgaggacaccaagaucgaccucugguccuacaacgccgagcuccucgucgcccucgagaaccagcacaccaucgaccucaccgacuccgagaugaacaagcucuucgagcgcaccaagaagcagcuccgcgagaacgccgaggacaugggcaacggcugcuucaagaucuaccacaagugcgacaacgccugcaucggcuccauccgcaacggcaccuacgaccacgacgucuaccgcgacgaggcccucaacaaccgcuuccagaucaagggcgucgagcucaaguccggcuacaaggacuggauccucuggaucuccuucgccaucuccugcuuccuccucugcgucgcccuccucggcuucaucaugugggccugccagaagggcaacauccgcugcaacaucugcaucuga

SEQ ID NO: 97840 - RNA, 1701 nt, Artificial Sequence
  derived and/or modified CDS sequence (opt2) from hemagglutinin__InfluenzaA__ABU92655
augaagaccaucaucgcccucuccuacauccucugccucgucuucgcccagaagcuccccggcaacgacaacuccaccgccacccucugccucggccaccacgccguccccaacggcaccaucgucaagaccaucaccaacgaccagaucgaggucaccaacgccaccgagcucguccaguccuccuccaccggcggcaucugcgacuccccccaccagauccucgacggcgagaacugcacccucaucgacgcccuccucggcgacccccagugcgacggcuuccagaacaagaagugggaccucuucgucgagcgcuccaaggccuacuccaacugcuaccccuacgacguccccgacuacgccucccuccgcucccucgucgccuccuccggcacccucgaguucaacaacgaguccuucaacuggaccggcgucacccagaacggcaccuccuccgccugcaagcgccgcuccaacaaguccuucuucucccgccucaacuggcucacccaccucaaguucaaguaccccgcccucaacgucaccaugcccaacaacgagaaguucgacaagcucuacaucuggggcguccaccaccccggcaccgacaacgaccagaucucccucuacgcccaggccuccggccgcaucaccgucuccaccaagcgcucccagcagaccgucauccccaacaucggcucccgcccccgcguccgcgacguccccucccgcaucuccaucuacuggaccaucgucaagcccggcgacauccuccucaucaacuccaccggcaaccucaucgccccccgcggcuacuucaagauccgcuccggcaaguccuccaucaugcgcuccgacgcccccaucggcaagugcaacuccgagugcaucacccccaacggcuccauccccaacgacaagcccuuccagaacgucaaccgcaucaccuacggcgccugcccccgcuacgucaagcagaacacccucaagcucgccaccggcaugcgcaacguccccgagaagcagacccgcggcaucuucggcgccaucgccggcuucaucgagaacggcugggagggcauggucgacggcugguacggcuuccgccaccagaacgccgagggcaccggccaggccgccgaccucaaguccacccaggccgccaucaaccagaucaacggcaagcucaaccgccucaucggcaagaccaacgagaaguuccaccagaucgagaaggaguucuccgaggucgagggccgcauccaggaccucgagaaguacgucgaggacaccaagaucgaccucugguccuacaacgccgagcuccucgucgcccucgagaaccagcacaccaucgaccucaccgacuccgagaugaacaagcucuucgagcgcaccaagaagcagcuccgcgagaacgccgaggacaugggcaacggcugcuucaagaucuaccacaagugcgacaacgccugcaucggcuccauccgcaacggcaccuacgaccacgacgucuaccgcgacgaggcccucaacaaccgcuuccagaucaagggcgucgagcucaaguccggcuacaaggacuggauccucuggaucuccuucgccaucuccugcuuccuccucugcgucgcccuccucggcuucaucaugugggccugccagaagggcaacauccgcugcaacaucugcaucuga

SEQ ID NO: 97841 - RNA, 1701 nt, Artificial Sequence; identical to SEQ ID NO: 97798
  derived and/or modified CDS sequence (opt2) from hemagglutinin__InfluenzaA__ABU92656

SEQ ID NO: 97842 - RNA, 1701 nt, Artificial Sequence; identical to SEQ ID NO: 96669
  derived and/or modified CDS sequence (opt2) from hemagglutinin__InfluenzaA__ABU92657

SEQ ID NO: 97843 - RNA, 1701 nt, Artificial Sequence; identical to SEQ ID NO: 97798
  derived and/or modified CDS sequence (opt2) from hemagglutinin__InfluenzaA__ABU92658

SEQ ID NO: 97844 - RNA, 1701 nt, Artificial Sequence; identical to SEQ ID NO: 96669
  derived and/or modified CDS sequence (opt2) from hemagglutinin__InfluenzaA__ABU92659

SEQ ID NO: 97845 - RNA, 1701 nt, Artificial Sequence; identical to SEQ ID NO: 97798
  derived and/or modified CDS sequence (opt2) from hemagglutinin__InfluenzaA__ABU92660

SEQ ID NO: 97846 - RNA, 1701 nt, Artificial Sequence
  derived and/or modified CDS sequence (opt2) from hemagglutinin__InfluenzaA__ABU92661
augaagaccaucaucgcccucuccuacauccucugccucgucuucgcccagaagcuccccggcaacgacaacuccaccgccacccucugccucggccaccacgccguccccaacggcaccaucgucaagaccaucaccaacgaccagaucgaggucaccaacgccaccgagcucguccagaucuccuccaccggcgagaucugcgacuccccccaccagauccucgacggcgagaacugcacccucaucgacgcccuccucggcgacccccagugcgacggcuuccagaacaagaagugggaccucuucgucgagcgcuccaaggccuacuccaacugcuaccccuacgacguccccgacuacgccucccuccgcucccucgucgccuccuccggcacccucgaguucaacaacgaguccuucgacuggaccggcgucacccagaacggcaccuccuccgccugcaagcgccgcuccgacaaguccuucuucucccgccucaacuggcucacccaccucaaguacaaguaccccgcccucaacgucaccaugcccaacaacgagaaguucgacaagcucuacaucuggggcguccaccaccccggcaccgacuccgaccagaucucccucuacgcccaggccuccggccgcaucaccgucuccaccaagcgcucccagcagaccgucauccccaacaucggcucccgcccccgcguccgcgacgucuccucccgcaucuccaucuacuggaccaucgucaagcccggcgacauccuccucaucaacuccaccggcaaccucaucgccccccgcggcuacuucaagauccgcuccggcaaguccuccaucaugcgcuccgacgcccccaucggcaagugcaacuccgagugcaucacccccaacggcuccauccccaacgacaagcccuuccagaacgucaaccgcaucaccuacggcgccugcccccgcuacgucaagcagaacacccucaagcucgccaccggcaugcgcaacguccccgagaagcagacccgcggcaucuucggcgccaucgccggcuucaucgagaacggcugggagggcauggucgacggcugguacggcuuccgccaccagaacuccgagggcaccggccaggccgccgaccucaaguccacccaggccgccaucaaccagaucaacggcaagcucaaccgccucaucggcaagaccaacgagaaguuccaccagaucgagaaggaguucuccgaggucgagggccgcauccaggaccucgagaaguacgucgaggacaccaagaucgaccucugguccuacaacgccgagcuccucgucgcccucgagaaccagcacaccaucgaccucaccgacuccgagaugaacaagcucuucgagcgcaccaagaagcagcuccgcgagaacgccgaggacaugggcaacggcugcuucaagaucuaccacaagugcgacaacgccugcaucggcuccauccgcaacggcaccuacgaccacgacgucuaccgcgacgaggcccucaacaaccgcuuccagaucaagggcgucgagcucgaguccggcuacaaggacuggauccucuggaucuccuucgccaucuccugcuuccuccucugcgucgcccuccucggcuucaucaugugggccugccagaagggcaacauccgcugcaacaucugcaucuga

SEQ ID NO: 97847 - RNA, 1701 nt, Artificial Sequence; identical to SEQ ID NO: 96109
  derived and/or modified CDS sequence (opt2) from hemagglutinin__InfluenzaA__ABU92662

SEQ ID NO: 97848 - RNA, 1701 nt, Artificial Sequence; identical to SEQ ID NO: 97798
  derived and/or modified CDS sequence (opt2) from hemagglutinin__InfluenzaA__ABU92663

SEQ ID NO: 97849 - RNA, 1701 nt, Artificial Sequence; identical to SEQ ID NO: 97798
  derived and/or modified CDS sequence (opt2) from hemagglutinin__InfluenzaA__ABU92664

SEQ ID NO: 97850 - RNA, 1701 nt, Artificial Sequence
  derived and/or modified CDS sequence (opt2) from hemagglutinin__InfluenzaA__ABU92665
augaagaccaucaucgcccucuccuacauccucugccucgucuucgcccagaagcuccccggcaacgacaacuccaccgccacccucugccucggccaccacgccguccccaacggcaccaucgucaagaccaucaccaacgaccagaucgaggucaccaacgccaccgagcucguccaguccuccuccaccggcggcaucugcgacuccccccaccagauccucgacggcgagaacugcacccucaucgacgcccuccucggcgacccccagugcgacggcuuccagaacaagaagugggaccucuucgucgagcgcuccaaggccuacuccaacugcuaccccuacgacguccccgacuacgccucccuccgcucccucgucgccuccuccggcacccucgaguucaacaacgaguccuucaacuggaccggcgucacccagaacggcaccuccuccgccugcaagcgccgcuccaacaaguccuucuucucccgccucaacuggcucacccaccucaaguucaaguaccccgcccucaacgucaccaugcccaacaacgagaaguucgacaagcucuacaucuggggcguccaccaccccggcaccgacaacgaccagaucucccucuacgcccaggccuccggccgcaucaccgucuccaccaagcgcucccagcagaccgucauccccaacaucggcucccgcccccgcguccgcgacguccccucccgcaucuccaucuacuggaccaucgucaagcccggcgacauccuccucaucaacuccaccggcaaccucaucgccccccgcggcuacuucaagauccgcuccggcaaguccuccaucaugcgcuccgacgcccccaucggcaagugcaacuccgagugcaucacccccaacggcuccauccccaacgacaagcccuuccagaacgucaaccgcaucaccuacggcgccugcccccgcuacgucacccagaacacccucaagcucgccaccggcaugcgcaacguccccgagaagcagacccgcggcaucuucggcgccaucgccggcuucaucgagaacggcugggagggcauggucgacggcugguacggcuuccgccaccagaacuccgagggcaccggccaggccgccgaccucaaguccacccaggccgccaucaaccagaucaacggcaagcucaaccgccucaucggcaagaccaacgagaaguuccaccagaucgagaaggaguucuccgaggucgagggccgcauccaggaccucgagaaguacgucgaggacaccaagaucgaccucugguccuacaacgccgagcuccucgucgcccucgagaaccagcacaccaucgaccucaccgacuccgagaugaacaagcucuucgagcgcaccaagaagcagcuccgcgagaacgccgaggacaugggcaacggcugcuucaagaucuaccacaagugcgacaacgccugcaucggcuccauccgcaacggcaccuacgaccacgacgucuaccgcgacgaggcccucaacaaccgcuuccagaucaagggcgucgagcucaaguccggcuacaaggacuggauccucuggaucuccuucgccaucuccugcuuccuccucugcgucgcccuccucggcuucaucaugugggccugccagaagggcaacauccgcugcaacaucugcaucuga

SEQ ID NO: 97851 - RNA, 1701 nt, Artificial Sequence; identical to SEQ ID NO: 97798
  derived and/or modified CDS sequence (opt2) from hemagglutinin__InfluenzaA__ABU92666

SEQ ID NO: 97852 - RNA, 1701 nt, Artificial Sequence; identical to SEQ ID NO: 96108
  derived and/or modified CDS sequence (opt2) from hemagglutinin__InfluenzaA__ABU92667

SEQ ID NO: 97853 - RNA, 1701 nt, Artificial Sequence; identical to SEQ ID NO: 96108
  derived and/or modified CDS sequence (opt2) from hemagglutinin__InfluenzaA__ABU92668

SEQ ID NO: 97854 - RNA, 1701 nt, Artificial Sequence
  derived and/or modified CDS sequence (opt2) from hemagglutinin__InfluenzaA__ABU92669
augaagaccaucaucgcccucuccuacauccucugccucgucuucgcccagaagcuccccgucaacgacaacuccaccgccacccucugccucggccaccacgccguccccaacggcacccucgucaagaccaucaccaacgaccacaucgaggucaccaacgccaccgagcucguccaguccuccuccaccggccgcaucugcgacuccccccaccagauccucgacggcgagaacugcacccucaucgacgcccuccucggcgacccccacugcgacggcuuccagaacaaggagugggaccucuucgucgagcgcuccaccgccuacuccaacugcuaccccuacgacguccccgacuacgccucccuccgcucccucgucgccuccuccggcacccucgaguucaacaacgaguccuucaacuggaccggcgucgcccagaacggcaccuccuccgccugcaagcgccgcuccaucaaguccuucuucucccgccucaacuggcuccaccagcucaaguacaaguaccccgcccucaacgucaccaugcccaacaacgagaaguucgacaagcucuacaucuggggcguccaccaccccuccaccgacuccgaccagaucucccucuacgcccaggccuccggccgcgucaccgucuccaccaagcgcucccagcagaccgucauccccaacaucggcucccgccccuggguccgcggcgucuccucccgcaucuccaucuacuggaccaucgucaagcccggcgacauccuccucaucaacuccaccggcaaccucaucgccccccgcggcuacuucaagauccgcaacggcaaguccuccaucaugcgcuccaacgcccccaucggcaagugcaacuccgagugcaucacccccaacggcuccauccccaacgacaagcccuuccagaacgucaaccgcaucaccuacggcgccugcccccgcuacgucaagcagaacacccucaagcucgccaccggcaugcgcaacguccccgagaagcagacccgcggcaucuucggcgccaucgccggcuucaucgagaacggcugggagggcauggucgacggcugguacggcuuccgccaccagaacuccgagggcaccggccaggccgccgaccucaaguccacccaggccgccaucaaccagaucaacggcaagcucaaccgccucaucgagaagaccaacgagaaguuccaccagaucgagaaggaguucuccgaggucgagggccgcauccaggaccucgagaaguacgucgaggacaccaagaucgaccucugguccuacaacgccgagcuccucgucgcccucgagaaccagcacaccaucgaccucaccgacuccgagaugaacaagcucuucgagcgcacccgcaagcagcuccgcgagaacgccgaggacaugggcaacggcugcuucaagaucuaccacaagugcgacaacgccugcaucggcuccauccgcaacggcaccuacgaccacgacgucuaccgcgacgaggcccucaacaaccgcuuccagaucaagggcgucgagcucaaguccggcuacaaggacuggauccucuggaucuccuucgccaucuccugcuuccuccucugcgucguccuccucggcuucaucaugugggccugccagaagggcaacauccgcugcaacaucugcaucuga

SEQ ID NO: 97855 - RNA, 1701 nt, Artificial Sequence; identical to SEQ ID NO: 96108
  derived and/or modified CDS sequence (opt2) from hemagglutinin__InfluenzaA__ABU92670

SEQ ID NO: 97856 - RNA, 1701 nt, Artificial Sequence
  derived and/or modified CDS sequence (opt2) from hemagglutinin__InfluenzaA__ABU92671
augaagaccaucaucgcccucucccacauccucugccucgucuucgcccagaagcuccccgucaacgacaacuccaccgccacccucugccucggccaccacgccguccccaacggcacccucgucaagaccaucaccaacgaccacaucgaggucaccaacgccaccgagcucguccaguccuccuccaccggccgcaucugcgacaucccccaccagauccucgacggcgagaacugcacccucaucgacgcccuccucggcgacccccacugcgacggcuuccagaacaaggagugggaccucuucgucgagcgcuccaccgccuacuccaacugcuaccccuacgacguccccgacuacgccucccuccgcucccucgucgccuccuccggcacccucgaguucaacaacgaguccuucaacuggaccggcgucgcccagaacggcaccuccuccgccugcaagcgccgcuccaucaaguccuucuucucccgccucaacuggcuccaccagcucaaguacaaguaccccgcccucaacgucaccaugcccaacaacgagaaguucgacaagcucuacaucuggggcguccaccaccccuccaccgacuccgaccagaucucccucuacgcccaggcccccggccgcgucaccgucuccaccaagcgcucccagcagaccgucauccccaacaucggcucccgccccuggguccgcggcgucuccucccgcaucuccaucuacuggaccaucgucaagcccggcgacauccuccucaucaacuccaccggcaaccucaucgccccccgcggcuacuucaagauccgcuccggcaaguccuccaucaugcgcuccaacgcccccaucggcaagugcaacuccgagugcaucacccccaacggcuccauccccaacgacaagcccuuccagaacgucaaccgcaucaccuacggcgccugcccccgcuacgucaagcagaacacccucaagcucgccaccggcaugcgcaacguccccgagaagcagacccgcggcaucuucggcgccaucgccggcuucaucgagaacggcugggagggcauggucgacggcugguacggcuuccgccaccagaacuccgagggcaccggccaggccgccgaccucaaguccacccaggccgccaucaaccagaucaacggcaagcucaaccgccucaucgagaagaccaacgagaaguuccaccagaucgagaaggaguucuccgaggccgagggccgcauccaggaccucgagaaguacgucgaggacaccaagaucgaccucugguccuacaacgccgagcuccucgucgcccucgagaaccagcacaccaucgaccucaccgacuccgagaugaacaagcucuucgagcgcacccgcaagcagcuccgcgagaacgccgaggacaugggcaacggcugcuucaagaucuaccacaagugcgacaacgccugcaucggcuccauccgcaacggcaccuacgaccacgacgucuaccgcgacgaggcccucaacaaccgcuuccagaucaagggcgucgagcucaaguccggcuacaaggacuggauccucuggaucuccuucgccaucuccugcuuccuccucugcgucguccuccucggcuucaucaugugggccugccagaagggcaacauccgcugcaacaucugcaucuga

SEQ ID NO: 97857 - RNA, 1701 nt, Artificial Sequence; identical to SEQ ID NO: 96108
  derived and/or modified CDS sequence (opt2) from hemagglutinin__InfluenzaA__ABU92672

SEQ ID NO: 97858 - RNA, 1701 nt, Artificial Sequence; identical to SEQ ID NO: 96108
  derived and/or modified CDS sequence (opt2) from hemagglutinin__InfluenzaA__ABU92673

SEQ ID NO: 97859 - RNA, 1701 nt, Artificial Sequence
  derived and/or modified CDS sequence (opt2) from hemagglutinin__InfluenzaA__ABU92674
augaagaccaucaucgcccucuccuacauccucugccucgucuucgcccagaagcuccccgucaacgacaacuccaccgccacccucugccucggccaccacgccguccccaacggcacccucgucaagaccaucaccaacgaccacaucgaggucaccaacgccaccgagcucguccaguccuccuccaccggccgcaucugcgacuccccccaccagauccucgacggcgagaacugcacccucaucgacgcccuccucggcgacccccacugcgacggcuuccagaacaaggagugggaccucuucgucgagcgccgcaccgccuacuccaacugcuaccccuacgacguccccgacuacgccucccuccgcucccucgucgccuccuccggcacccucgaguucaacaacgaguccuucaacuggaccggcgucgcccagaacggcaccuccuccgccugcaagcgccgcuccaucaaguccuucuucucccgccucaacuggcuccaccagcucaaguacaaguaccccgcccucaacgucaccaugcccaacaacgagaaguucgacaagcucuacaucuggggcguccaccaccccuccaccgacuccgaccagaucucccucuacgcccaggccuccggccgcgucaccgucuccaccaagcgcucccagcagaccgucauccccaacaucggcucccgccccuggguccgcggcgucuccucccgcaucuccaucuacuggaccaucgucaagcccggcgacauccuccucaucaacuccaccggcaaccucaucgccccccgcggcuacuucaagauccgcuccggcaaguccuccaucaugcgcuccaacgcccccaucggcaagugcaacuccgagugcaucacccccaacggcuccauccccaacgacaagcccuuccagaacgucaaccgcaucaccuacggcgccugcccccgcuacgucaagcagaacacccucaagcucgccaccggcaugcgcaacguccccgagaagcagacccgcggcaucuucggcgccaucgccggcuucaucgagaacggcugggagggcauggucgacggcugguacggcuuccgccaccagaacuccgagggcaccggccaggccgccgaccucaaguccacccaggccgccaucaaccagaucaacggcaagcucaaccgccucaucgagaagaccaacgagaaguuccaccagaucgagaaggaguucuccgaggucgagggccgcauccaggaccucgagaaguacgucgaggacaccaagaucgaccucugguccuacaacgccgagcuccucgucgcccucgagaaccagcacaccaucgaccucaccgacuccgagaugaacaagcucuucgagcgcacccgcaagcagcuccgcgagaacgccgaggacaugggcaacggcugcuucaagaucuaccacaagugcgacaacgccugcaucggcuccauccgcaacggcaccuacgaccacgacgucuaccgcgacgaggcccucaacaaccgcuuccagaucaagggcgucgagcucaaguccggcuacaaggacuggauccucuggaucuccuucgccaucuccugcuuccuccucugcgucguccuccucggcuucaucaugugggccugccagaagggcaacauccgcugcaacaucugcaucuga

SEQ ID NO: 97860 - RNA, 1701 nt, Artificial Sequence
  derived and/or modified CDS sequence (opt2) from hemagglutinin__InfluenzaA__ABU92675
augaagaccaucaucgcccucuccuacauccucugccucgucuucgcccagaagcuccccggcaacgacaacuccaccgccacccucugccucggccaccacgccguccccaacggcaccaucgucaagaccaucaccaacgaccagaucgaggucaccaacgccaccgagcucguccaguccuccuccaccggcggcaucugcgacuccccccaccagauccucgacggcgagaacugcacccucaucgacgcccuccucggcgacccccagugcgacggcuuccagaacaagaagugggaccucuucgucgagcgcuccaaggccuacuccaacugcuaccccuacgacguccccgacuacgccucccuccgcucccucaucgccuccuccggcacccucgaguucaacaacgaguccuucaacuggaccggcgucacccagaacggcaccuccuccgccugcaagcgccgcuccaacuccuccuucuucucccgccucaacuggcucacccaccucaaguucaaguaccccgcccucaacgucaccaugcccaacaacgaggaguucgacaagcucuacaucuggggcguccaccaccccggcaccgacaacgaccagaucucccucuacgcccaggccuccggccgcaucaccgucuccaccaagcgcucccagcagaccgucauccccaacaucggcucccgcccccgcguccgcgacauccccucccgcaucuccaucuacuggaccaucgucaagcccggcgacauccuccucaucaacuccaccggcaaccucaucgccccccgcggcuacuucaagauccgcuccggcaaguccuccaucaugcgcuccgacgcccccaucggcaagugcaacuccgagugcaucacccccaacggcuccauccccaacgacaagcccuuccagaacgucaaccgcaucaccuacggcgccugcccccgcuacgucaagcagaacacccucaagcucgccaccggcaugcgcaacguccccgagaagcagacccgcggcaucuucggcgccaucgccggcuucaucgagaacggcugggagggcauggucgacggcugguacggcuuccgccaccagaacuccgagggcaucggccaggccgccgaccucaaguccacccaggccgccaucgaccagaucaacggcaagcucaaccgccucaucggcaagaccaacgagaaguuccaccagaucgagaaggaguucuccgaggucgagggccgcauccaggaccucgagaaguacgucgaggacaccaagaucgaccucugguccuacaacgccgagcuccucgucgcccucgagaaccagcacaccaucgaccucaccgacuccgagaugaacaagcucuucgagcgcaccaagaagcagcuccgcgagaacgccgaggacaugggcaacggcugcuucaagaucuaccacaagugcgacaacgccugcaugggcuccauccgcaacggcaccuacgaccacgacgucuaccgcgacgaggcccucaacaaccgcuuccagaucaagggcgucgagcucaaguccggcuacaaggacuggauccucuggaucuccuucgccaucuccugcuuccuccucugcgucgcccuccucggcuucaucaugugggccugccagaagggcaacauccgcugcaacaucugcaucuga

SEQ ID NO: 97861 - RNA, 1701 nt, Artificial Sequence; identical to SEQ ID NO: 96669
  derived and/or modified CDS sequence (opt2) from hemagglutinin__InfluenzaA__ABU92676

SEQ ID NO: 97862 - RNA, 1701 nt, Artificial Sequence; identical to SEQ ID NO: 97789
  derived and/or modified CDS sequence (opt2) from hemagglutinin__InfluenzaA__ABU92677

SEQ ID NO: 97863 - RNA, 1701 nt, Artificial Sequence
  derived and/or modified CDS sequence (opt2) from hemagglutinin__InfluenzaA__ABU92678
augaagaccaucaucgcccucuccuacauccucugccucgucuucgcccagaagcuccccggcaacgacaacuccaccgccacccucugccucggccaccacgccguccccaacggcaccaucgucaagaccaucaccaacgaccagaucgaggucaccaacgccaccgagcucguccaguccuccuccaccggcggcaucugcgacuccccccaccagauccucgacggcgagaacugcacccucaucgacgcccuccucggcgacccccagugcgacggccuccagaacaagaagugggaccucuucgucgagcgcuccaaggccuacuccaacugcuaccccuacgacguccccgacuacgccucccuccgcucccucaucgccuccuccggcacccucgaguucaacaacgaguccuucaacuggaccggcgucacccagaacggcaccuccuccgccugcaagcgccgcuccaacaacuccuucuucucccgccucaacuggcucacccaccucaaguucaaguaccccgcccucaacgucaccaugcccaacaacgaggaguucgacaagcucuacaucuggggcguccaccaccccggcaccgacaacgaccagaucucccucuacgcccaggccuccggccgcaucaccgucuccaccaagcgcucccagcagaccgucauccccaacaucggcucccgcccccgcguccgcgacauccccucccgcaucuccaucuacuggaccaucgucaagcccggcgacauccuccucaucaacuccaccggcaaccucaucgccccccgcggcuacuucaagauccgcuccggcaaguccuccaucaugcgcuccgacgcccccaucggcaacugcaacuccgagugcaucacccccaacggcuccauccccaacgacaagcccuuccagaacgucaaccgcaucaccuacggcgccugcccccgcuacgucaagcagaacacccucaagcucgccaccggcaugcgcaacguccccgagaagcagacccgcggcaucuucggcgccaucgccggcuucaucgagaacggcugggagggcauggucgacggcugguacggcuuccgccaccagaacuccgagggcaucggccaggccgccgaccucaaguccacccaggccgccaucgaccagaucaacggcaagcucaaccgccucaucggcaagaccaacgagaaguuccaccagaucgagaaggaguucuccgaggucgagggccgcauccaggaccucgagaaguacgucgaggacaccaagaucgaccucugguccuacaacgccgagcuccucgucgcccucgagaaccagcacaccaucgaccucaccgacuccgagaugaacaagcucuucgagcgcaccaagaagcagcuccgcgagaacgccgaggacaugggcaacggcugcuucaagaucuaccacaagugcgacaacgccugcaucggcuccauccgcaacggcaccuacgaccacgacgucuaccgcgacgaggcccucaacaaccgcuuccagaucaagggcgucgagcucaaguccggcuacaaggacuggauccucuggaucuccuucgccaucuccugcuuccuccucugcgucgcccuccucggcuucaucaugugggccugccagaagggcaacauccgcugcaacaucugcaucuga

SEQ ID NO: 97864 - RNA, 1701 nt, Artificial Sequence
  derived and/or modified CDS sequence (opt2) from hemagglutinin__InfluenzaA__ABU92680
augaagaccaucaucgcccucuccuacauccucugccucgucuucgcccagaagcuccccggcaacgacaacuccaccgccacccucugccucggccaccacgccguccccaacggcaccaucgucaagaccaucaccaacgaccagaucgaggucaccaacgccaccgagcucguccaguccuccuccaccggcggcaucugcgacuccccccaccagauccucgacggcgagaacugcacccucaucgacgcccuccucggcgacccccagugcgacggcuuccagaacaagaagugggaccucuucgucgagcgcuccaaggccuacuccaacugcuaccccuacgacguccccgacuacgccucccuccgcucccucgucgccuccuccggcacccucgaguucaacaacgaguccuucaacuggaccggcgucacccagaacggcaccuccuccgccugcaagcgccgcuccaacaacuccuucuucucccgccucaacuggcucacccaccucaaguucaaguaccccgcccucaacgucaccaugcccaacaacgagaaguucgacaagcucuacaucuggggcguccaccaccccggcaccgacaacgaccagaucuuccucuacgcccaggccuccggccgcaucaccgucuccaccaagcgcucccagcagaccgucauccccaacaucggcucccgcccccgcguccgcaacauccccucccgcaucuccaucuacuggaccaucgucaagcccggcgacauccuccucaucaacuccaccggcaaccucaucgccccccgcggcuacuucaagauccgcuccggcaaguccuccaucaugcgcuccgacgcccccaucggcaagugcaacuccgagugcaucacccccaacggcuccauccccaacgacaagcccuuccagaacgucaaccgcaucaccuacggcgccugcccccgcuacgucaagcagaacacccucaagcucgccaccggcaugcgcaacguccccgagaagcagacccgcggcaucuucggcgccaucgccggcuucaucgagaacggcugggagggcauggucgacggcugguacggcuuccgccaccagaacuccgagggcaucggccaggccgccgaccucaaguccacccaggccgccaucgaccagaucaacggcaagcucaaccgccucaucggcaagaccaacgagaaguuccaccagaucgagaaggaguucuccgaggucgagggccgcauccaggaccucgagaaguacgucgaggacaccaagaucgaccucugguccuacaacgccgagcuccucgucgcccucgagaaccagcacaccaucgaccucaccgacuccgagaugaacaagcucuucgagaagaccaagaagcagcuccgcgagaacgccgaggacaugggcaacggcugcuucaagaucuaccacaagugcgacaacgccugcaucggcuccauccgcaacggcaccuacgaccacgacgucuaccgcgacgaggcccucaacaaccgcuuccagaucaagggcgucgagcucaaguccggcuacaaggacuggauccucuggaucuccuucgccaucuccugcuuccuccucugcgucgcccuccucggcuucaucaugugggccugccagaagggcaacauccgcugcaacaucugcaucuga

SEQ ID NO: 97865 - RNA, 1701 nt, Artificial Sequence; identical to SEQ ID NO: 97793
  derived and/or modified CDS sequence (opt2) from hemagglutinin__InfluenzaA__ABU92681

SEQ ID NO: 97866 - RNA, 1701 nt, Artificial Sequence; identical to SEQ ID NO: 96109
  derived and/or modified CDS sequence (opt2) from hemagglutinin__InfluenzaA__ABU92682

SEQ ID NO: 97867 - RNA, 1701 nt, Artificial Sequence; identical to SEQ ID NO: 97798
  derived and/or modified CDS sequence (opt2) from hemagglutinin__InfluenzaA__ABU92683

SEQ ID NO: 97868 - RNA, 1701 nt, Artificial Sequence
  derived and/or modified CDS sequence (opt2) from hemagglutinin__InfluenzaA__ABU92684
augaagaccaucaucgcccucuccuacauccucugccucgucuucgcccagaagcuccccggcaacgacaacuccaccgccacccucugccucggccaccacgccguccccaacggcaccaucgucaagaccaucaccaacgaccagaucgaggucaccaacgccaccgagcucguccagaucuccuccaccggcggcaucugcgacuccccccaccagauccucgacggcgagaacugcacccucaucgacgcccuccucggcgacccccagugcgacggcuuccagaacaagaagugggaccucuucaucgagcgcuccaaggccuacuccaacugcuaccccuacgacguccccgacuacgccucccuccgcucccucgucgccuccuccggcacccucgaguucaacaacgaguccuucgacuggaccggcgucacccagaacggcaccuccuccgccugcaagcgccgcuccaacaaguccuucuucucccgccucaacuggcucacccaccucaaguacaaguaccccgcccucaacgucaccaugcccaacaacgagaaguucgacaagcucuacaucuggggcguccaccaccccggcaccgacuccgaccagaucucccucuacgcccaggcccccggccgcaucaccgucuccaccaagcgcucccagcagaccgucauccccaacaucggcucccgcccccgcguccgcgacgucuccucccgcaucuccaucuacuggaccaucgucaagcccggcgacauccuccucaucaacuccaccggcaaccucaucgccccccgcggcuacuucaagauccgcuccggcaaguccuccaucaugcgcuccgacgcccccaucggcaagugcaacuccgagugcaucacccccaacggcuccauccccaacgacaagcccuuccagaacgucaaccgcaucaccuacggcgccugcccccgcuacgucaagcagaacacccucaagcucgccaccggcaugcgcaacguccccgagaagcagacccgcggcaucuucggcgccaucgccggcuucaucgagaacggcugggagggcauggucgacggcugguacggcuuccgccaccagaacuccgagggcaccggccaggccgccgaccucaaguccacccaggccgccaucaaccagaucaacggcaagcucaaccgccucaucggcaagaccaacgagaaguuccaccagaucgagaaggaguucuccgaggucgagggccgcauccaggaccucgagaaguacgucgaggacaccaagaucgaccucugguccuacaacgccgagcuccucgucgcccucgagaaccagcacaccaucgaccucaccgacuccgagaugaacaagcucuucgagcgcaccaagaagcagcuccgcgagaacgccgaggacaugggcaacggcugcuucaagaucuaccacaagugcgacaacgccugcaucggcuccauccgcaacggcaccuacgaccacgacgucuaccgcgacgaggcccucaacaaccgcuuccagaucaagggcgucgagcucaaguccggcuacaaggacuggauccucuggaucuccuucgccaucuccugcuuccuccucugcgucgcccuccucggcuucaucaugugggccugccagaagggcaacauccgcugcaacaucugcaucuga

SEQ ID NO: 97869 - RNA, 1701 nt, Artificial Sequence
  derived and/or modified CDS sequence (opt2) from hemagglutinin__InfluenzaA__ABU92685
augaagaccaucaucgcccucuccuacauccucugccucgucuucgcccagaagcuccccggcaacgacaacuccaccgccacccucugccucggccaccacgccguccccaacggcaccaucgucaagaccaucaccaacgaccagaucgaggucaccaacgccaccgagcucguccagaucuccuccaccggcggcaucugcgacuccccccaccagauccucgacggcgagaacugcacccucaucgacgcccuccucggcgacccccagugcgacggcuuccagaacaagaagugggaccucuucgucgagcgcuccaaggccuacuccaacugcuaccccuacgacguccccgacuacgccucccuccgcucccucgucgccuccuccggcacccucgaguucaacaacgaguccuucgacuggaccggcgucacccagaacggcaccuccuccgccugcaagcgccgcuccaacaaguccuucuucucccgccucaacuggcucacccaccucaaguacaaguaccccgcccucaacgucaccaugcccaacaacgagaaguucgacaagcucuacaucuggggcguccaccaccccggcaccgacuccgaccagaucucccucuacgcccaggccuccggccgcaucaccgucuccaccaagcgcucccagcagaccgucauccccaacaucggcucccgcccccgcguccgcgacgucuccucccgcaucuccaucuacuggaccaucgucaagcccggcgacauccuccucaucaacuccaccggcaaccucaucgccccccgcggcuacuucaagauccgcuccggcaaguccuccaucaugaaguccgacgcccccaucggcaagugcaacuccgagugcaucacccccaacggcuccauccccaacgacaagcccuuccagaacgucaaccgcaucaccuacggcgccugcccccgcuacgucaagcagaacacccucaagcucgccaccggcaugcgcaacguccccgagaagcagacccgcggcaucuucggcgccaucgccggcuucaucgagaacggcugggagggcauggucgacggcugguacggcuuccgccaccagaacuccgagggcaccggccaggccgccgaccucaaguccacccaggccgccaucaaccagaucaacggcaagcucaaccgccucaucggcaagaccaacgagaaguuccaccagaucgagaaggaguucuccgaggucgagggccgcauccaggaccucgagaaguacgucgaggacaccaagaucgaccucugguccuacaacgccgagcuccucgucgcccucgagaaccagcacaccaucgaccucaccgacuccgagaugaacaagcucuucgagcgcaccaagaagcagcuccgcgagaacgccgaggacaugggcaacggcugcuucaagaucuaccacaagugcgacaacgccugcaucggcuccauccgcaacggcaccuacgaccacgacgucuaccgcgacgaggcccucaacaaccgcuuccagaucaagggcgucgagcucaaguccggcuacaaggacuggauccucuggaucuccuucgccaucuccugcuuccuccucugcgucgcccuccucggcuucaucaugugggccugccagaagggcaacauccgcugcaacaucugcaucuga

SEQ ID NO: 97870 - RNA, 1701 nt, Artificial Sequence; identical to SEQ ID NO: 97798
  derived and/or modified CDS sequence (opt2) from hemagglutinin__InfluenzaA__ABU92686

SEQ ID NO: 97871 - RNA, 1701 nt, Artificial Sequence; identical to SEQ ID NO: 97798
  derived and/or modified CDS sequence (opt2) from hemagglutinin__InfluenzaA__ABU92687

SEQ ID NO: 97872 - RNA, 1701 nt, Artificial Sequence; identical to SEQ ID NO: 97831
  derived and/or modified CDS sequence (opt2) from hemagglutinin__InfluenzaA__ABU92688

SEQ ID NO: 97873 - RNA, 1701 nt, Artificial Sequence; identical to SEQ ID NO: 97798
  derived and/or modified CDS sequence (opt2) from hemagglutinin__InfluenzaA__ABU92689

SEQ ID NO: 97874 - RNA, 1701 nt, Artificial Sequence
  derived and/or modified CDS sequence (opt2) from hemagglutinin__InfluenzaA__ABU92691
augaagaccaucaucgcccucuccuacauccucugccucgucuucgcccagaagcuccccggcaacgacaacuccaccgccacccucugccucggccaccacgccguccccaacggcaccaucgucaagaccaucaccaacgaccagaucgaggucaccaacgccaccgagcucguccagaucuccuccaccggcggcaucugcgacuccccccaccagauccucgacggcgagaacugcacccucaucgacgcccuccucggcgacccccagugcgacggcuuccagaacaagaagugggaccucuucgucgagcgcuccaaggccuacuccaacugcuaccccuacgacguccccgacuacgccucccuccgcucccucgucgccuccuccggcacccucgaguucaacaacgaguccuucgacuggaccggcgucacccagaacggcaccuccuccgccugcaagcgccgcuccaacaaguccuucuucucccgccucaacuggcucacccaccucaaguacaaguaccccgcccucaacgucaccaugcccaacaacgagaaguucgacaagcucuacaucuggggcguccaccaccccggcaccgacuccgaccagaucucccucuacgcccaggccuccggccgcaucaccgucuccaccaagcgcucccagcagaccgucauccccaacaucggcucccgcccccgcguccgcgacgucuccucccgcaucuccaucuacuggaccaucgucaagcccggcgacauccuccucaucaacuccaccggcaaccucaucgccccccgcggcuacuucaagauccgcuccggcaaguccuccgucaugcgcuccgacgcccccaucggcaagugcaacuccgagugcaucacccccaacggcuccauccccaacgacaagcccuuccagaacgucaaccgcaucaccuacggcgccugcccccgcuacgucaagcagaacacccucaagcucgccaccggcaugcgcaacguccccgagaagcagacccgcggcaucuucggcgccaucgccggcuucaucgagaacggcugggagggcauggucgacggcugguacggcuuccgccaccagaacuccgagggcaccggccaggccgccgaccucaaguccacccaggccgccaucaaccagaucaacggcaagcucaaccgccucaucggcaagaccaacgagaaguuccaccagaucgagaaggaguucuccgaggucgagggccgcauccaggaccucgagaaguacgucgaggacaccaagaucgaccucugguccuacaacgccgagcuccucgucgcccucgagaaccagcacaccaucgaccucaccgacuccgagaugaacaagcucuucgagcgcaccaagaagcagcuccgcgagaacgccgaggacaucggcaacggcugcuucaagaucuaccacaagugcgacaacgccugcaucggcuccauccgcaacggcaccuacgaccacaacgucuaccgcgacgaggcccucaacaaccgcuuccagaucaagggcgucgagcucaaguccggcuacaaggacuggauccucuggaucuccuucgccaucuccugcuuccuccucugcgucgcccuccucggcuucaucaugugggccugccagaagggcaacauccgcugcaacaucugcaucuga

SEQ ID NO: 97875 - RNA, 1701 nt, Artificial Sequence; identical to SEQ ID NO: 96726
  derived and/or modified CDS sequence (opt2) from hemagglutinin__InfluenzaA__ABU92692

SEQ ID NO: 97876 - RNA, 1701 nt, Artificial Sequence
  derived and/or modified CDS sequence (opt2) from hemagglutinin__InfluenzaA__ABU92693
augaaggccaucaucgcccucuccuacauccucugccucgucuucgcccagaagcuccccggcaacgacaacuccaccgccacccucugccucggccaccacgccguccccaacggcaccaucgucaagaccaucaccaacgaccagaucgaggucaccaacgccaccgagcucguccagaucuccuccaccggcgagaucugcgacuccccccaccagauccucgacggcgagaacugcacccucaucgacgcccuccucggcgacccccagugcgacggcuuccagaacaagaagugggaccucuucgucgagcgcuccaaggccuacuccaacugcuaccccuacgacguccccgacuacgccucccuccgcucccucgucgccuccuccggcacccucgaguucaacaacgaguccuucgacuggaccggcgucacccagaacggcaccuccuccgccugcaagcgccgcuccgacaaguccuucuucucccgccucaacuggcucacccaccucaaguacaaguaccccgcccucaacgucaccaugcccaacaacgagaaguucgacaagcucuacaucuggggcguccaccaccccggcaccgacuccgaccagaucucccucuacgcccaggccuccggccgcaucaccgucuccaccaagcgcucccagcagaccgucauccccaacaucggcucccgcccccgcguccgcgacgucuccucccgcaucuccaucuacuggaccaucgucaagcccggcgacauccuccucaucaacuccaccggcaaccucaucgccccccgcggcuacuucaagauccgcuccggcaaguccuccaucaugcgcuccgacgcccccaucggcaagugcaacuccgagugcaucacccccaacggcuccauccccaacgacaagcccuuccagaacgucaaccgcaucaccuacggcgccugcccccgcuacgucaagcagaacacccucaagcucgccaccggcaugcgcaacguccccgagaagcagacccgcggcaucuucggcgccaucgccggcuucaucgagaacggcugggagggcauggucgacggcugguacggcuuccgccaccagaacuccgagggcaccggccaggccgccgaccucaaguccacccaggccgccaucaaccagaucaacggcaagcucaaccgccucaucggcaagaccaacgagaaguuccaccagaucgagaaggaguucuccgaggucgagggccgcauccaggaccucgagaaguacgucgaggacaccaagaucgaccucugguccuacaacgccgagcuccucgucgcccucgagaaccagcacaccaucgaccucaccgacuccgagaugaacaagcucuucgagcgcaccaagaagcagcuccgcgagaacgccgaggacaugggcaacggcugcuucaagaucuaccacaagugcgacaacgccugcaucggcuccauccgcaacggcaccuacgaccacgacgucuaccgcgacgaggcccucaacaaccgcuuccagaucaagggcgucgagcucaaguccggcuacaaggacuggauccucuggaucuccuucgccaucuccugcuuccuccucugcgucgcccuccucggcuucaucaugugggccugccagaagggcaacauccgcugcaacaucugcaucuga

SEQ ID NO: 97877 - RNA, 1701 nt, Artificial Sequence
  derived and/or modified CDS sequence (opt2) from hemagglutinin__InfluenzaA__ABU92694
augaagaccaucaucgcccucuccuacauccucugccucgucuucgcccagaagcuccccggcaacgacaacuccaccgccacccucugccucggccaccacgccguccccaacggcaccaucgucaagaccaucaccaacgaccagaucgaggucaccaacgccaccgagcucguccaguccuccuccaccggcggcaucugcgacuccccccaccagauccucgacggcgagaacugcacccucaucgacgcccuccucggcgacccccagugcgacggcuuccagaacaagaagugggaccucuucgucgagcgcuccaaggccuacuccaacugcuaccccuacgacguccccgacuacgccucccuccgcucccucgucgccuccuccggcacccucgaguucaacaacgaguccuucaacuggaccggcgucacccagaacggcaccuccuccgccugcaagcgccgcuccaacaacuccuucuucucccgccucaacuggcucacccaccucaaguucaaguaccccgcccucaacgucaccaugcccaacaacgagaaguucgacaagcucuacaucuggggcguccaccaccccggcaccgacaacgaccagaucucccucuacgcccaggccuccggccgcaucaccgucuccaccaagcgcucccagcagaccgucauccccaacaucggcucccgcccccgcguccgcgacauccccucccgcaucuccaucuacuggaccaucgucaagcccggcgacauccuccucaucaacuccaccggcaaccucaucgccccccgcggcuacuucaagauccgcuccggcaaguccuccaucaugcgcuccgacgcccccaucggcaagugcaacuccgagugcaucacccccaacggcuccauccccaacgacaagcccuuccagaacgucaaccgcaucaccuacggcgccugcccccgcuacgucaagcagaacacccucaagcucgccaccggcaugcgcaacguccccgagaagcagacccgcggcaucuucggcgccaucgccggcuucaucgagaacggcugggagggcauggucgacggcugguacggcuuccgccaccagaacuccgagggcaucggccaggccgccgaccucaaguccacccaggccgccaucaaccagaucaacggcaagcucaaccgccucaucggcaagaccaacgagaaguuccaccagaucgagaaggaguucuccgaggucgagggccgcauccaggaccucgagaaguacgucgaggacaccaaggucgaccucugguccuacaacgccgagcuccucgucgcccucgagaaccagcacaccaucgaccucaccgacuccgagaugaacaagcucuucgagcgcaccaagaagcagcuccgcgagaacgccgaggacaugggcaacggcugcuucaagaucuaccacaagugcgacaacgccugcaucggcuccauccgcaacggcaccuacgaccacgacgucuaccgcgacgaggcccucaacaaccgcuuccagaucaagggcgucgagcucaaguccggcuacaaggacuggauccucuggaucuccuucgccaucuccugcuuccuccucugcgucgcccuccucggcuucaucaugugggccugccagaagggcaacauccgcugcaacaucugcaucuga

SEQ ID NO: 97878 - RNA, 1701 nt, Artificial Sequence; identical to SEQ ID NO: 97789
  derived and/or modified CDS sequence (opt2) from hemagglutinin__InfluenzaA__ABU92695

SEQ ID NO: 97879 - RNA, 1701 nt, Artificial Sequence
  derived and/or modified CDS sequence (opt2) from hemagglutinin__InfluenzaA__ABU92696
augaagaccaucaucgcccucggcuacauccucugccucgucuucgcccagaagcuccccggcaacgacaacuccaccgccacccucugccucggccaccacgccguccccaacggcaccaucgucaagaccaucaccaacgaccagaucgaggucaccaacgccaccgagcucguccaguccuccuccaccggcggcaucugcgacuccccccaccagauccucgacggcgagaacugcacccucaucgacgcccuccucggcgacccccagugcgacggcuuccagaacaagaagugggaccucuucgucgagcgcuccaaggccuacuccaacugcuaccccuacgacguccccgacuacgccucccuccgcucccucaucgccuccuccggcacccucgaguucaacaacgaguccuucaacuggaccggcgucacccagaacggcaccuccuccgccugcaagcgccgcuccaacuccuccuucuucucccgccucaacuggcucacccaccucaaguucaaguaccccgcccucaacgucaccaugcccaacaacgaggaguucgacaagcucuacaucuggggcguccaccaccccggcaccgacaacgaccagaucucccucuacgcccaggccuccggccgcaucaccgucuccaccaagcgcucccagcagaccgucauccccaacaucggcucccgcccccgcguccgcgacauccccucccgcaucuccaucuacuggaccaucgucaagcccggcgacauccuccucaucaacuccaccggcaaccucaucgccccccgcggcuacuucaagauccgcuccggcaaguccuccaucaugcgcuccgacgcccccaucggcaagugcaacuccgagugcaucacccccaacggcuccauccccaacgacaagcccuuccagaacgucaaccgcaucaccuacggcgccugcccccgcuacgucaagcagaacacccucaagcucgccaccggcaugcgcaacguccccgagaagcagacccgcggcaucuucggcgccaucgccggcuucaucgagaacggcugggagggcauggucgacggcugguacggcuuccgccaccagaacuccgagggcaucggccaggccgccgaccucaaguccacccaggccgccaucgaccagaucaacggcaagcucaaccgccucaucggcaagaccaacgagaaguuccaccagaucgagaaggaguucuccgaggucgagggccgcauccaggaccucgagaaguacgucgaggacaccaagaucgaccucugguccuacaacgccgagcuccucgucgcccucgagaaccagcacaccaucgaccucaccgacuccgagaugaacaagcucuucgagcgcaccaagaagcagcuccgcgagaacgccgaggacaugggcaacggcugcuucaagaucuaccacaagugcgacaacgccugcaucggcuccauccgcaacggcaccuacgaccacgacgucuaccgcgacgaggcccucaacaaccgcuuccagaucaagggcgucgagcucaaguccggcuacaaggacuggauccucuggaucuccuucgccaucuccugcuuccuccucugcgucgcccuccucggcuucaucaugugggccugccagaagggcaacauccgcugcaacaucugcaucuga

SEQ ID NO: 97880 - RNA, 1701 nt, Artificial Sequence; identical to SEQ ID NO: 96669
  derived and/or modified CDS sequence (opt2) from hemagglutinin__InfluenzaA__ABU92697

SEQ ID NO: 97881 - RNA, 1701 nt, Artificial Sequence; identical to SEQ ID NO: 96279
  derived and/or modified CDS sequence (opt2) from hemagglutinin__InfluenzaA__ABU92698

SEQ ID NO: 97882 - RNA, 1701 nt, Artificial Sequence
  derived and/or modified CDS sequence (opt2) from hemagglutinin__InfluenzaA__ABU92699
augaagaccaucaucgcccucuccuacauccucugccucgucuucgcccagaagcuccccggcaacgacaacuccaccgccacccucugccucggccaccacgccguccccaacggcaccaucgucaagaccaucaccaacgaccagaucgaggucaccaacgccaccgagcucguccaguccuccuccaccggcggcaucugcgacuccccccaccagauccucgacggcgagaacugcacccucaucgacgcccuccucggcgacccccagugcgacggcuuccagaacaagaagugggaccucuucgucgagcgcuccaaggccuacuccaacugcuaccccuacgacguccccgacuacgccucccuccgcucccucgucgccuccuccggcacccucgaguucaacaacgaguccuucaacugggccggcgucacccagaacggcaccuccuccgccugcaagcgccgcuccaacaacuccuucuucucccgccucaacuggcucacccaccucaaguucaaguaccccgcccucaacgucaccaugcccaacaacgagaaguucgacaagcucuacaucuggggcguccaccaccccggcaccgacaacgaccagaucuuccucuacgcccaggccuccggccgcaucaccgucuccaccaagcgcucccagcagaccgucauccccaacaucggcucccgcccccgcguccgcaacauccccucccgcaucuccaucuacuggaccaucgucaagcccggcgacauccuccucaucaacuccaccggcaaccucaucgccccccgcggcuacuucaagauccgcuccggcaaguccuccaucaugcgcuccgacgcccccaucggcaagugcaacuccgagugcaucacccccaacggcuccauccccaacgacaagcccuuccagaacgucaaccgcaucaccuacggcgccugcccccgcuacgucaagcagaacacccucaagcucgccaccggcaugcgcaacguccccgagaagcagacccgcggcaucuucggcgccaucgccggcuucaucgagaacggcugggagggcauggucgacggcugguacggcuuccgccaccagaacuccgagggcaucggccaggccgccgaccucaaguccacccaggccgccaucgaccagaucaacggcaagcucaaccgccucaucggcaagaccaacgagaaguuccaccagaucgagaaggaguucuccgaggucgagggccgcauccaggaccucgagaaguacgucgaggacaccaagaucgaccucugguccuacaacgccgagcuccucgucgcccucgagaaccagcacaccaucgaccucaccgacuccgagaugaacaagcucuucgagaagaccaagaagcagcuccgcgagaacgccgaggacaugggcaacggcugcuucaagaucuaccacaagugcgacaacgccugcaucggcuccauccgcaacggcaccuacgaccacgacgucuaccgcgacgaggcccucaacaaccgcuuccagaucaagggcgucgagcucaaguccggcuacaaggacuggauccucuggaucuccuucgccaucuccugcuuccuccucugcgucgcccuccucggcuucaucaugugggccugccagaagggcaacauccgcugcaacaucugcaucuga

SEQ ID NO: 97883 - RNA, 1701 nt, Artificial Sequence
  derived and/or modified CDS sequence (opt2) from hemagglutinin__InfluenzaA__ABU92700
augaagaccaucaucgcccucuccuacauccucugccucgucuucgcccagaagcuccccgagaacgacaacuccaccgccacccucugccucggccaccacgccguccccaacggcaccaucgucaagaccaucaccaacgaccagaucgaggucaccaacgccaccgagcucguccaguccuccuccaccggcggcaucugcgacuccccccaccagauccucgacggcgagaacugcacccucaucgacgcccuccucggcgacccccagugcgacggcuuccagaacaagaagugggaccucuucgucgagcgcuccaaggccuacuccaacugcuaccccuacgacguccccgacuacgccucccuccgcucccucgucgccuccuccggcacccucgaguucaacaacgaguccuucaacuggaccggcgucacccagaacggcaccuccuccgccugcaagcgccgcuccaacaacuccuucuucucccgccucaacuggcucacccaccucaaguucaaguaccccgcccucaacgucaccaugcccaacaacgagcgcuucgacaagcucuacaucuggggcguccaccaccccggcaccgacaacgaccagaucuuccucuacgcccaggccuccggccgcaucaccgucuccaccaagcgcucccagcagaccgucauccccaacaucggcucccgcccccgcguccgcaacauccccucccgcaucuccaucuacuggaccaucgucaagcccggcgacauccuccucaucaacuccaccggcaaccucaucgccccccgcggcuacuucaagauccgcuccggcaaguccuccaucaugcgcuccgacgcccccaucggcaagugcaacuccgagugcaucacccccaacggcuccauccccaacgacaagcccuuccagaacgucaaccgcaucaccuacggcgccugcccccgcuacgucaagcagaacacccucaagcucgccaccggcaugcgcaacguccccgagaagcagacccgcggcaucuucggcgccaucgccggcuucaucgagaacggcugggagggcauggucgacggcugguacggcuuccgccaccagaacuccgagggcaucggccaggccgccgaccucaaguccacccaggccgccaucgaccagaucaacggcaagcucaaccgccucaucggcaagaccaacgagaaguuccaccagaucgagaaggaguucuccgaggucgagggccgcauccaggaccucgagaaguacgucgaggacaccaagaucgaccucugguccuacaacgccgagcuccucgucgcccucgagaaccagcacaccaucgaccucaccgacuccgagaugaacaagcucuucgagaagaccaagaagcagcuccgcgagaacgccgaggacaugggcaacggcugcuucaagaucuaccacaagugcgacaacgccugcaucggcuccauccgcaacggcaccuacgaccacgacgucuaccgcgacgaggcccucaacaaccgcuuccagaucaagggcgucgagcucaaguccggcuacaaggacuggauccucuggaucuccuucgccaucuccugcuuccuccucugcgucgcccuccucggcuucaucaugugggccugccagaagggcaacauccgcugcaacaucugcaucuga

SEQ ID NO: 97884 - RNA, 1701 nt, Artificial Sequence
  derived and/or modified CDS sequence (opt2) from hemagglutinin__InfluenzaA__ABU92701
augaagaccaucaucgcccucuccuacauccucugccucgucuucgcccagaagcuccccgagaacgacaacuccaccgccacccucugccucggccaccacgccguccccaacggcaccaucgucaagaccaucaccaacgaccagaucgaggucaccaacgccaccgagcucguccaguccuccuccaccggcggcaucugcgacuccccccaccagauccucgacggcgagaacugcacccucaucgacgcccuccucggcgacccccagugcgacggcuuccagaacaagaagugggaccucuucgucgagcgcuccaaggccuacuccaacugcuaccccuacgacguccccgacuacgccucccuccgcucccucgucgccuccuccggcacccucgaguucaacaacgaguccuucaacuggaccggcgucacccagaacggcaccuccuccgccugcaagcgccgcuccaacaacuccuucuucucccgccucaacuggcucacccaccucaaguucaaguaccccgcccucaacgucaccaugcccaacaacgagcgcuucgacaagcucuacaucuggggcguccaccaccccggcaccgacaacgaccagaucuuccucuacgcccaggccuccggccgcaucaccgucuccaccaagcgcucccagcagaccgucauccccaacaucggcucccgcccccgcguccgcaacauccccucccgcaucuccaucuacuggaccaucgucaagcccggcgacauccuccucaucaacuccaccggcaaccucaucgccccccgcggcuacuucaagauccgcuccggcaaguccuccaucaugcgcuccgacgcccccaucggcaagugcaacuccgagugcaucacccccaacggcuccauccccaacgacaagcccuuccagaacgucaaccgcaucaccuacggcgccugcccccgcuacgucaagcagaacacccucaagcucgccaccggcaugcgcaacguccccgagaagcagacccgcggcaucuucggcgccaucgccggcuucaucgagaacggcugggagggcauggucgacggcugguacggcuuccgccaccagaacuccgagggcaucggccaggccgccgaccucaaguccacccaggccgccaucgaccagaucaacggcaagcucaaccgccucaucggcaagaccaacgagaaguuccaccagaucgagaaggaguucuccgaggucgagggccgcauccaggaccucgagaaguacgucgaggacaccaagaucgaccucugguccuacaacgccgagcuccucgucgcccucgagaaccagcacaccaucgaccucaccgacuccgagaugaacaagcucuucgagaagaccaagaagcagcuccgcgagaacgccgaggacaugggcaacggcugcuucaagaucuaccacaagugcgacaacgccugcaucggcuccauccgcaacggcaccuacgaccacgacgucuaccgcgacgaggcccucaacaaccgccuccagaucaagggcgucgagcucaaguccggcuacaaggacuggauccucuggaucuccuucgccaucuccugcuuccuccucugcgucgcccuccucggcuucaucaugugggccugccagaagggcaacauccgcugcaacaucugcaucuga

SEQ ID NO: 97885 - RNA, 1701 nt, Artificial Sequence; identical to SEQ ID NO: 96648
  derived and/or modified CDS sequence (opt2) from hemagglutinin__InfluenzaA__ABU92702

SEQ ID NO: 97886 - RNA, 1701 nt, Artificial Sequence; identical to SEQ ID NO: 97864
  derived and/or modified CDS sequence (opt2) from hemagglutinin__InfluenzaA__ABU92703

SEQ ID NO: 97887 - RNA, 1701 nt, Artificial Sequence
  derived and/or modified CDS sequence (opt2) from hemagglutinin__InfluenzaA__ABU92704
augaagaccaucaucgcccucuccuacauccucugccucgucuucgcccagaagcuccccggcaacgacaacuccaccgccacccucugccucggccaccacgccguccccaacggcaccaucgucaagaccaucaccaacgaccagaucgaggucaccaacgccaccgagcucguccaguccuccuccaccggcggcaucugcgacuccccccaccagauccucgacggcgagaacugcacccucaucgacgcccuccucggcgacccccagugcgacggcuuccagaacaagaagugggaccucuucgucgagcgcaacaaggccuacuccaacugcuaccccuacgacguccccgacuacgccucccuccgcucccucgucgccuccuccggcacccucgaguucaacaacgaguccuucaacuggaccggcgucacccagaacggcaccuccuccgccugcaagcgccgcuccaacaacuccuucuucucccgccucaacuggcucacccaccucaaguucaaguaccccgcccucaacgucaccaugcccaacaacgagaaguucgacaagcucuacaucuggggcguccaccaccccggcaccgacaacgaccagaucuuccucuacgcccaggccuccggccgcaucaccgucuccaccaagcgcucccagcagaccgucauccccaacaucggcucccgcccccgcguccgcaacauccccucccgcaucuccaucuacuggaccaucgucaagcccggcgacauccuccucaucaacuccaccggcaaccucaucgccccccgcggcuacuucaagauccgcuccggcaaguccuccaucaugcgcuccgacgcccccaucggcaagugcaacuccgagugcaucacccccaacggcuccauccccaacgacaagcccuuccagaacgucaaccgcaucaccuacggcgccugcccccgcuacgucaagcagaacacccucaagcucgccaccggcaugcgcaacguccccgagaagcagacccgcggcaucuucggcgccaucgccggcuucaucgagaacggcugggagggcauggucgacggcugguacggcuuccgccaccagaacuccgagggcaucggccaggccgccgaccucaaguccacccaggccgccaucgaccagaucaacggcaagcucaaccgccucaucggcaagaccaacgagaaguuccaccagaucgagaaggaguucuccgaggucgagggccgcauccaggaccucgagaaguacgucgaggacaccaagaucgaccucugguccuacaacgccgagcuccucgucgcccucgagaaccagcacaccaucgaccucaccgacuccgagaugaacaagcucuucgagaagaccaagaagcagcuccgcgagaacgccgaggacaugggcaacggcugcuucaagaucuaccacaagugcgacaacgccugcaucggcuccauccgcaacggcaccuacgaccacgacgucuaccgcgacgaggcccucaacaaccgcuuccagaucaagggcgucgagcucaaguccggcuacaaggacuggauccucuggaucuccuucgccaucuccugcuuccuccucugcgucgcccuccucggcuucaucaugugggccugccagaagggcaacauccgcugcaacaucugcaucuga

SEQ ID NO: 97888 - RNA, 1701 nt, Artificial Sequence
  derived and/or modified CDS sequence (opt2) from hemagglutinin__InfluenzaA__ABU92705
augaagaccaucaucgcccucuccuacauccucugccucgucuucgcccagaagcuccccggcaacgacaacuccaccgccacccucugccucggccaccacgccguccccaacggcaccaucgucaagaccaucaccaacgaccagaucgaggucaccaacgccaccgagcucguccaguccuccuccaccggcggcaucugcgacuccccccaccagauccucgacggcgagaacugcacccucaucgacgcccuccucggcgacccccagugcgacggcuuccagaacaagaagugggaccucuucgucgagcgcuccaaggccuacuccaacugcuaccccuacgacguccccgacuacgccucccuccgcucccucaucgccuccuccggcacccucgaguucaacaacgaguccuucaacuggaccggcgucacccagaacggcaccuccuccgccugcaagcgccgcuccaacaacuccuucuucucccgccucaacuggcucacccaccucaaguucaaguaccccgcccucaacgucaccaugcccaacaacgaggaguucgacaagcucuacaucuggggcguccaccaccccggcaccgacaacgaccagaucucccucuacgcccaggcccccggccgcaucaccgucuccaccaagcgcucccagcagaccgucauccccaacaucggcucccgcccccgcguccgcgacauccccucccgcaucuccaucuacuggaccaucgucaagcccggcgacauccuccucaucaacuccaccggcaaccucaucgccccccgcggcuacuucaagauccgcuccggcaaguccuccaucaugcgcuccgacgcccccaucggcaagugcaaguccgagugcaucacccccaacggcuccauccccaacgacaagcccuuccagaacgucaaccgcaucaccuacggcgccugcccccgcuacgucaagcagaacacccucaagcucgccaccggcaugcgcaacguccccgagaagcagacccgcggcaucuucggcgccaucgccggcuucaucgagaacggcugggagggcauggucgacggcugguacggcuuccgccaccagaacuccgagggcaucggccaggccgccgaccucaaguccacccaggccgccaucgaccagaucaacggcaagcucaaccgccucaucggcaagaccaacgagaaguuccaccagaucgagaaggaguucuccgaggucgagggccgcauccaggaccucgagaaguacgucgaggacaccaagaucgaccucugguccuacaacgccgagcuccucgucgcccucgagaaccagcacaccaucgaccucaccgacuccgagaugaacaagcucuucgagcgcaccaagaagcagcuccgcgagaacgccgaggacaugggcaacggcugcuucaagaucuaccacaagugcgacaacgccugcaucggcuccauccgcaacggcaccuacgaccacgacgucuaccgcgacgaggcccucaacaaccgcuuccgcaucaaguccgucgagcucaaguccggcuacaaggacuggauccucuggaucuccuucgccaucuccugcuuccuccucugcgucgcccuccucggcuucaucaugugggccugccagaagggcaacauccgcugcaacaucugcaucuga

SEQ ID NO: 97889 - RNA, 1701 nt, Artificial Sequence; identical to SEQ ID NO: 96109
  derived and/or modified CDS sequence (opt2) from hemagglutinin__InfluenzaA__ABU92706

SEQ ID NO: 97890 - RNA, 1701 nt, Artificial Sequence; identical to SEQ ID NO: 97798
  derived and/or modified CDS sequence (opt2) from hemagglutinin__InfluenzaA__ABU92707

SEQ ID NO: 97891 - RNA, 1701 nt, Artificial Sequence; identical to SEQ ID NO: 97798
  derived and/or modified CDS sequence (opt2) from hemagglutinin__InfluenzaA__ABU92708

SEQ ID NO: 97892 - RNA, 1701 nt, Artificial Sequence
  derived and/or modified CDS sequence (opt2) from hemagglutinin__InfluenzaA__ABU92709
augaagaccaucaucgcccucuccuacauccucugccucgucuucgcccagaagcuccccggcaacgacaacuccaccgccacccucugccucggccaccacgccguccccaacggcaccaucgucaagaccaucaccaacgaccagaucgaggucaccaacgccaccgagcucguccaguccuccuccaccggcggcaucugcgacuccccccaccagauccucgacggcgagaacugcacccucaucgacgcccuccucggcgacccccagugcgacggcuuccagaacaagaagugggaccucuucgucgagcgcuccaaggccuacuccaacugcuaccccuacgacguccccgacuacgccucccuccgcucccucgucgccuccuccggcacccucgaguucaacaacgaguccuucaacugggccggcgucacccagaacggcaccuccuccgccugcaagcgccgcuccaacaaguccuucuucucccgccucaacuggcucacccaccucaaguacaaguaccccgcccucaacgucaccaugcccaacaacgagaaguucgacaagcucuacaucuggggcguccaccaccccggcaccgacuccgaccagaucucccucuacgcccaggccuccggccgcaucaccgucuccaccaagcgcucccagcagaccgucauccccaacaucggcucccgcccccgcguccgcgacgucuccucccgcaucuccaucuacuggaccaucgucaagcccggcgacauccuccucaucaacuccaccggcaaccucaucgccccccgcggcuacuucaagauccgcuccggcaaguccuccaucaugcgcuccgacgcccccaucggcaagugcaacuccgagugcaucacccccaacggcuccauccccaacgacaagcccuuccagaacgucaaccgcaucaccuacggcgccugcccccgcuacgucaagcagaacacccucaagcucgccaccggcaugcgcaacguccccgagaagcagacccgcggcaucuucggcgccaucgccggcuucaucgagaacggcugggagggcauggucgacggcugguacggcuuccgccaccagaacuccgagggcaccggccaggccgccgaccucaaguccacccaggccgccaucaaccagaucaacggcaagcucaaccgccucaucggcaagaccaacgagaaguuccaccagaucgagaaggaguucuccgaggucgagggccgcauccaggaccucgagaaguacgucgaggacaccaagaucgaccucugguccuacaacgccgagcuccucgucgcccucgagaaccagcacaccaucgaccucaccgacuccgagaugaacaagcucuucgagcgcaccaagaagcagcuccgcgagaacgccgaggacaugggcaacggcugcuucaagaucuaccacaagugcgacaacgccugcaucgaguccauccgcaacggcaccuacgaccacgacgucuaccgcgacgaggcccucaacaaccgcuuccagaucaagggcgucgagcucaaguccggcuacaaggacuggauccucuggaucuccuucgccaucuccugcuuccuccucugcgucgcccuccucggcuucaucaugugggccugccagaagggcaacauccgcugcaacaucugcaucuga

SEQ ID NO: 97893 - RNA, 1701 nt, Artificial Sequence; identical to SEQ ID NO: 96087
  derived and/or modified CDS sequence (opt2) from hemagglutinin__InfluenzaA__ABU92710

SEQ ID NO: 97894 - RNA, 1701 nt, Artificial Sequence; identical to SEQ ID NO: 96109
  derived and/or modified CDS sequence (opt2) from hemagglutinin__InfluenzaA__ABU92711

SEQ ID NO: 97895 - RNA, 1701 nt, Artificial Sequence; identical to SEQ ID NO: 96109
  derived and/or modified CDS sequence (opt2) from hemagglutinin__InfluenzaA__ABU92712

SEQ ID NO: 97896 - RNA, 1701 nt, Artificial Sequence; identical to SEQ ID NO: 97798
  derived and/or modified CDS sequence (opt2) from hemagglutinin__InfluenzaA__ABU92713

SEQ ID NO: 97897 - RNA, 1701 nt, Artificial Sequence; identical to SEQ ID NO: 97798
  derived and/or modified CDS sequence (opt2) from hemagglutinin__InfluenzaA__ABU92714

SEQ ID NO: 97898 - RNA, 1701 nt, Artificial Sequence
  derived and/or modified CDS sequence (opt2) from hemagglutinin__InfluenzaA__ABU92715
augaagaccaucaucgcccucuccuacauccucugccucgucuucgcccagaagcuccccggcaacgacaacuccaccgccacccucugccucggccaccacgccguccccaacggcaccaucgucaagaccaucaccaacgaccagaucgaggucaccaacgccaccgagcucguccagaucuccuccaccggcgagaucugcgacuccccccaccagauccucgacggcgagaacugcacccucaucgacgcccuccucggcgacccccagugcgacggcuuccagaacaagaagugggaccucuucgucgagcgcuccaaggccuacuccaacugcuaccccuacgacguccccgacuacgccucccuccgcucccucgucgccuccuccggcacccucgaguucaacaacgaguccuucgacuggaccggcgucacccagaacggcaccuccuccgccugcaagcgccgcuccaacaaguccuucuucucccgccucaacuggcucacccaccucaaguacaaguaccccgcccucaacgucaccaugcccaacaacgagaaguucgagaagcucuacaucuggggcguccaccaccccggcaccgacuccgaccagaucaaccucuacgcccaggccuccggccgcaucaccgucuccaccaagcgcucccagcagaccgucauccccaacaucggcucccgcccccgcguccgcgacgucuccucccgcaucuccaucuacuggaccaucgucaagcccggcgacauccuccucaucaacuccaccggcaaccucaucgccccccgcggcuacuucaagauccgcuccggcaaguccuccaucaugcgcuccgacgcccccaucggcaagugcaacuccgagugcaucacccccaacggcuccauccccaacgacaagcccuuccagaacgucaaccgcaucaccuacggcgccugcccccgcuacgucaagcagaacacccucaagcucgccaccggcaugcgcaacguccccgagaagcagacccgcggcaucuucggcgccaucgccggcuucaucgagaacggcugggagggcauggucgacggcugguacggcuuccgccaccagaacuccgagggcaccggccaggccgccgaccucaaguccacccaggccgccaucaaccagaucaacggcaagcucaaccgccucaucggcaagaccaacgagaaguuccaccagaucgagaaggaguucuccgaggucgagggccgcauccaggaccucgagaaguacgucgaggacaccaagaucgaccucugguccuacaacgccgagcuccucgucgcccucgagaaccagcacaccaucgaccucaccgacuccgagaugaacaagcucuucgagcgcaccaagaagcagcuccgcgagaacgccgaggacaugggcaacggcugcuucaagaucuaccacaagugcgacaacgccugcaucggcuccauccgcaacggcaccuacgaccacgacgucuaccgcgacgaggcccucaacaaccgcuuccagaucaagggcgucgagcucaaguccggcuacaaggacuggauccucuggaucuccuucgccaucuccugcuuccuccucugcgucgcccuccucggcuucaucaugugggccugccagaagggcaacauccgcugcaacaucugcaucuga

SEQ ID NO: 97899 - RNA, 1701 nt, Artificial Sequence; identical to SEQ ID NO: 97798
  derived and/or modified CDS sequence (opt2) from hemagglutinin__InfluenzaA__ABU92716

SEQ ID NO: 97900 - RNA, 1701 nt, Artificial Sequence; identical to SEQ ID NO: 97798
  derived and/or modified CDS sequence (opt2) from hemagglutinin__InfluenzaA__ABU92717

SEQ ID NO: 97901 - RNA, 1701 nt, Artificial Sequence; identical to SEQ ID NO: 96109
  derived and/or modified CDS sequence (opt2) from hemagglutinin__InfluenzaA__ABU92718

SEQ ID NO: 97902 - RNA, 1701 nt, Artificial Sequence; identical to SEQ ID NO: 96109
  derived and/or modified CDS sequence (opt2) from hemagglutinin__InfluenzaA__ABU92719

SEQ ID NO: 97903 - RNA, 1701 nt, Artificial Sequence
  derived and/or modified CDS sequence (opt2) from hemagglutinin__InfluenzaA__ABU92720
augaagaccaucaucgcccucuccuacauccucugccucgucuucgcccagaagcuccccggcaacgacaacuccaccgccacccucugccucggccaccacgccguccccaacggcaccaucgucaagaccaucaccaacgaccagaucgaggucaccaacgccaccgagcucguccagaucuccuccaccggcgagaucugcgacuccccccaccagauccucgacggcgagaacugcacccucaucgacgcccuccucggcgacccccagugcgacggcuuccagaacaagaagugggaccucuucgucgagcgcuccaaggccuacuccaacugcuaccccuacgacguccccgacuacuccucccuccgcucccucgucgccuccuccggcacccucgaguucaacaacgaguccuucgacuggaccggcgucacccagaacggcaccuccuccgccugcaagcgccgcuccgacaaguccuucuucucccgccucaacuggcucacccaccucaaguacaaguaccccgcccucaacgucaccaugcccaacaacgagaaguucgacaagcucuacaucuggggcguccaccaccccggcaccgacuccgaccagaucucccucuacgcccaggccuccggccgcaucaccgucuccaccaagcgcucccagcagaccgucauccccaacaucggcucccgcccccgcguccgcgacgucuccucccgcaucuccaucuacuggaccaucgucaagcccggcgacauccuccucaucaacuccaccggcaaccucaucgccccccgcggcuacuucaagauccgcuccggcaaguccuccaucaugcgcuccgacgcccccaucggcaagugcaacuccgagugcaucacccccaacggcuccauccccaacgacaagcccuuccagaacgucaaccgcaucaccuacggcgccugcccccgcuacgucaagcagaacacccucaagcucgccaccggcaugcgcaacguccccgagaagcagacccgcggcaucuucggcgccaucgccggcuucaucgagaacggcugggagggcauggucgacggcugguacggcuuccgccaccagaacuccgagggcaccggccaggccgccgaccucaaguccacccaggccgccaucaaccagaucaacggcaagcucaaccgccucaucggcaagaccaacgagaaguuccaccagaucgagaaggaguucuccgaggucgagggccgcauccaggaccucgagaaguacgucgaggacaccaagaucgaccucugguccuacaacgccgagcuccucgucgcccucgagaaccagcacaccaucgaccucaccgacuccgagaugaacaagcucuucgagcgcaccaagaagcagcuccgcgagaacgccgaggacaugggcaacggcugcuucaagaucuaccacaagugcgacaacgccugcaucggcuccauccgcaacggcaccuacgaccacgacgucuaccgcgacgaggcccucaacaaccgcuuccagaucaagggcgucgagcucaaguccggcuacaaggacuggauccucuggaucuccuucgccaucuccugcuuccuccucugcgucgcccuccucggcuucaucaugugggccugccagaagggcaacauccgcugcaacaucugcaucuga

SEQ ID NO: 97904 - RNA, 1701 nt, Artificial Sequence
  derived and/or modified CDS sequence (opt2) from hemagglutinin__InfluenzaA__ABU92721
augaagaccaucaucgcccucuccuacauccucugccucgucuucgcccagaagcuccccggcaacgacaacuccaccgccacccucugccucggccaccacgccguccccaacggcaccaucgucaagaccaucaccaacgaccagaucgaggucaccaacgccaccgagcucguccagaucuccuccaccggcgagaucugcgacuccccccaccagauccucgacggcgagaacugcacccucaucgacgcccuccucggcgacccccagugcgacggcuuccagaacaagaagugggaccucuucgucgagcgcuccaaggccuacuccaacugcuaccccuacgacguccccgacuacgccucccuccgcucccucgucgccuccuccggcacccucgaguucaacaacgaguccuucgacuggaccggcgucacccagaacggcaccuccuccgccugcaagcgccgcuccgacaaguccuucuucucccgccucaacuggcucacccaccucaaguacaaguaccccgcccucaacgucaccaugcccaacaacgagaaguucgacaagcucuacaucuggggcguccaccaccccggcaccgacuccgaccagaucucccucuacgcccaggccuccggccgcaucaccgucuccaccaagcgcucccagcagaccgucacccccaacaucggcucccgcccccgcguccgcgacgucuccucccgcaucuccaucuacuggaccaucgucaagcccggcgacauccuccucaucaacuccaccggcaaccucaucgccccccgcggcuacuucaagauccgcuccggcaaguccuccaucaugcgcuccgacgcccccaucggcaagugcaacuccgagugcaucacccccaacggcuccauccccaacgacaagcccuuccagaacgucaaccgcaucaccuacggcgccugcccccgcuacgucaagcagaacacccucaagcucgccaccggcaugcgcaacguccccgagaagcagacccgcggcaucuucggcgccaucgccggcuucaucgagaacggcugggagggcauggucgacggcugguacggcuuccgccaccagaacuccgagggcaccggccaggccgccgaccucaaguccacccaggccgccaucaaccagaucaacggcaagcucaaccgccucaucggcaagaccaacgagaaguuccaccagaucgagaaggaguucuccgaggucgagggccgcauccaggaccucgagaaguacgucgaggacaccaagaucgaccucugguccuacaacgccgagcuccucgucgcccucgagaaccagcacaccaucgaccucaccgacuccgagaugaacaagcucuucgagcgcaccaagaagcagcuccgcgagaacgccgaggacaugggcaacggcugcuucaagaucuaccacaagugcgacaacgccugcaucggcuccauccgcaacggcaccuacgaccacgacgucuaccgcgacgaggcccucaacaaccgcuuccagaucaagggcgucgagcucaaguccggcuacaaggacuggauccucuggaucuccuucgccaucuccugcuuccuccucugcgucgcccuccucggcuucaucaugugggccugccagaagggcaacauccgcugcaacaucugcaucuga

SEQ ID NO: 97905 - RNA, 1701 nt, Artificial Sequence; identical to SEQ ID NO: 97789
  derived and/or modified CDS sequence (opt2) from hemagglutinin__InfluenzaA__ABU92722

SEQ ID NO: 97906 - RNA, 1701 nt, Artificial Sequence; identical to SEQ ID NO: 96109
  derived and/or modified CDS sequence (opt2) from hemagglutinin__InfluenzaA__ABU92723

SEQ ID NO: 97907 - RNA, 1701 nt, Artificial Sequence; identical to SEQ ID NO: 97892
  derived and/or modified CDS sequence (opt2) from hemagglutinin__InfluenzaA__ABU92724

SEQ ID NO: 97908 - RNA, 1701 nt, Artificial Sequence
  derived and/or modified CDS sequence (opt2) from hemagglutinin__InfluenzaA__ABU92725
augaagaccaucaucgcccucuccuacauccucugccucgucuucgcccagaagcuccccggcaacgacaacuccaccgccacccucugccucggccaccacgccguccccaacggcaccaucgucaagaccaucaccaacgaccagaucgaggucaccaacgccaccgagcucguccaguccuccuccaccggcggcaucugcgacuccccccaccagauccucgacggcgagaacugcacccucaucgacgcccuccucggcgacccccagugcgacggcuuccagaacaagaagugggaccucuucgucgagcgcuccaaggccuacuccaacugcuaccccuacgacguccccgacuacgccucccuccgcucccucgucgccuccuccggcacccucgaguucaacaacgaguccuucaacuggaccggcgucacccagaacggcaccuccuccgccugcaagcgccgcuccaacaaguccuucuucucccgccucaacuggcucacccaccucaaguacaaguaccccgcccucaacgucaccaugcccaacaacgagaaguucgacaagcucuacaucuggggcguccaccaccccggcaccgacuccgaccagaucaaccucuacgcccaggccuccggccgcaucaccgucuccaccaagcgcucccagcagaccgucauccccaacaucggcucccgcccccgcguccgcgacguccccucccgcaucuccaucuacuggaccaucgucaagcccggcgaccuccuccucaucaacuccaccggcaaccucaucgccccccgcggcuacuucaagauccgcuccggcaaguccuccaucaugcgcuccgacgcccccaucggcaagugcaacuccgagugcaucacccccaacggcuccauccccaacgacaagcccuuccagaacgucaaccgcaucaccuacggcgccugcccccgcuacgucaagcagaacacccucaagcucgccaccggcaugcgcaacguccccgagaagcagacccgcggcaucuucggcgccaucgccggcuucaucgagaacggcugggagggcauggucgacggcugguacggcuuccgccaccagaacuccgagggcaccggccaggccgccgaccucaaguccacccaggccgccaucaaccagaucaacggcaagcucaaccgccucaucggcaagaccaacgagaaguuccaccagaucgagaaggaguucuccgaggucgagggccgcauccaggaccucgagaaguacgucgaggacaccaagaucgaccucugguccuacaacgccgagcuccucgucgcccucgagaaccagcacaccaucgaccucaccgacuccgagaugaacaagcucuucgagcgcaccaagaagcagcuccgcgagaacgccgaggacaugggcaacggcugcuucaagaucuaccacaagugcgacaacgccugcaucggcuccauccgcaacggcaccuacgaccacgacgucuaccgcgacgaggcccucaacaaccgcuuccagaucaagggcgucgagcucaaguccggcuacaaggacuggauccucuggaucuccuucgccaucuccugcuuccuccucugcgucgcccuccucggcuucaucaugugggccugccagaagggcaacauccgcugcaacaucugcaucuga

SEQ ID NO: 97909 - RNA, 1701 nt, Artificial Sequence; identical to SEQ ID NO: 97892
  derived and/or modified CDS sequence (opt2) from hemagglutinin__InfluenzaA__ABU92726

SEQ ID NO: 97910 - RNA, 1701 nt, Artificial Sequence
  derived and/or modified CDS sequence (opt2) from hemagglutinin__InfluenzaA__ABU92727
augaagaccaucaucgcccucuccuacauccucugccucgucuucgcccagaagcuccccggcaacgacaacuccaccgccacccucugccucggccaccacgccguccccaacggcaccaucgucaagaccaucaccaacgaccagaucgaggucaccaacgccaccgagcucguccaguccuccuccaccggcggcaucugcgacuccccccaccagauccucgacggcgagaacugcacccucaucgacgcccuccucggcgacccccagugcgacggcuuccagaacaagaagugggaccucuucgucgagcgcuccaaggccuacuccaacugcuaccccuacgacguccccgacuacgccucccuccgcucccucaucgccuccuccggcacccucgaguucaacaacgaguccuucaacuggaccggcgucacccagaacggcaccuccuccgccugcaagcgccgcuccaacuccuccuucuucucccgccucaacuggcucacccaccucaaguucaaguaccccgcccucaacgucaccaugcccaacaacgaggacuucgacaagcucuacaucuggggcguccaccaccccggcaccgacaacgaccagaucucccucuacgcccaggccuccggccgcaucaccgucuccaccaagcgcucccagcagaccgucauccccaacaucggcucccgcccccgcguccgcgacauccccucccgcaucuccaucuacuggaccaucgucaagcccggcgacauccuccucaucaacuccaccggcaaccucaucgccccccgcggcuacuucaagauccgcuccggcaaguccuccaucaugcgcuccgacgcccccaucggcaagugcaacuccgagugcaucacccccaacggcuccauccccaacgacaagcccuuccagaacgucaaccgcaucaccuacggcgccugcccccgcuacgucaagcagaacacccucaagcucgccaccggcaugcgcaacguccccgagaagcagacccgcggcaucuucggcgccaucgccggcuucaucgagaacggcugggagggcauggucgacggcugguacggcuuccgccaccagaacuccgagggcaucggccaggccgccgaccucaaguccacccaggccgccaucgaccagaucaacggcaagcucaaccgccucaucggcaagaccaacgagaaguuccaccagaucgagaaggaguucuccgaggucgagggccgcauccaggaccucgagaaguacgucgaggacaccaagaucgaccucugguccuacaacgccgagcuccucgucgcccucgagaaccagcacaccaucgaccucaccgacuccgagaugaacaagcucuucgagcgcaccaagaagcagcuccgcgagaacgccgaggacaugggcaacggcugcuucaagaucuaccacaagugcgacaacgccugcaucggcuccauccgcaacggcaccuacgaccacgacgucuaccgcgacgaggcccucaacaaccgcuuccagaucaagggcgucgagcucaaguccggcuacaaggacuggauccucuggaucuccuucgccaucuccugcuuccuccucugcgucgcccuccucggcuucaucaugugggccugccagaagggcaacauccgcugcaacaucugcaucuga

SEQ ID NO: 97911 - RNA, 1701 nt, Artificial Sequence
  derived and/or modified CDS sequence (opt2) from hemagglutinin__InfluenzaA__ABU92728
augaagaccaucaucgcccucuccuacauccucugccaggucuucgcccagaagcuccccggcaacgacaacuccaccgccacccucugccucggccaccacgccguccccaacggcaccaucgucaagaccaucaccaacgaccagaucgaggucaccaacgccaccgagcucguccagaucuccuccaccggcgagaucugcgacuccccccaccagauccucgacggcgagaacugcacccucaucgacgcccuccucggcgacccccagugcgacggcuuccagaacaagaagugggaccucuucgucgagcgcuccaaggccuacuccaacugcuaccccuacgacguccccgacuacgccucccuccgcucccucgucgccuccuccggcacccucgaguucaacaacgaguccuucgacuggaccggcgucacccagaacggcaccuccuccgccugcaagcgccgcuccgacaaguccuucuucucccgccucaacuggcucacccaccucaaguacaaguaccccgcccucaacgucaccaugcccaacaacgagaaguucgacaagcucuacaucuggggcguccaccaccccggcaccgacaacgaccagaucucccucuacgcccaggccuccggccgcaucaccgucuccaccaagcgcucccagcagaccgucauccccaacaucggcucccgcccccgcguccgcgacgucuccucccgcaucuccaucuacuggaccaucgucaagcccggcgacauccuccucaucaacuccaccggcaaccucaucgccccccgcggcuacuucaagauccgcuccggcaaguccuccaucaugcgcuccgacgcccccaucggcaagugcaacuccgagugcaucacccccaacggcuccauccccaacgacaagcccuuccagaacgucaaccgcaucaccuacggcgccugcccccgcuacgucaagcagaacacccucaagcucgccaccggcaugcgcaacguccccgagaagcagacccgcggcaucuucggcgccaucgccggcuucaucgagaacggcugggagggcauggucgacggcugguacggcuuccgccaccagaacuccgagggcaccggccaggccgccgaccucaaguccacccaggccgccaucaaccagaucaacggcaagcucaaccgccucaucggcaagaccaacgagaaguuccaccagaucgagaaggaguucuccgaggucgagggccgcauccaggaccucgagaaguacgucgaggacaccaagaucgaccucugguccuacaacgccgagcuccucgucgcccucgagaaccagcacaccaucgaccucaccgacuccgagaugaacaagcucuucgagcgcaccaagaagcagcuccgcgagaacgccgaggacaugggcaacggcugcuucaagaucuaccacaagugcgacaacgccugcaucggcuccauccgcaacggcaccuacgaccacgacgucuaccgcgacgaggcccucaacaaccgcuuccagaucaagggcgucgagcucaaguccggcuacaaggacuggauccucuggaucuccuucgccaucuccugcuuccuccucugcgucgcccuccucggcuucaucaugugggccugccagaagggcaacauccgcugcaacaucugcaucuga

SEQ ID NO: 97912 - RNA, 1701 nt, Artificial Sequence; identical to SEQ ID NO: 97911
  derived and/or modified CDS sequence (opt2) from hemagglutinin__InfluenzaA__ABU92729

SEQ ID NO: 97913 - RNA, 1701 nt, Artificial Sequence; identical to SEQ ID NO: 97789
  derived and/or modified CDS sequence (opt2) from hemagglutinin__InfluenzaA__ABU92730

SEQ ID NO: 97914 - RNA, 1701 nt, Artificial Sequence
  derived and/or modified CDS sequence (opt2) from hemagglutinin__InfluenzaA__ABU92731
augaagaccaucaucgcccucuccuacauccucugccucgucuucgcccagaagcuccccggcaacgacaacuccaccgccacccucugccucggccaccacgccguccccaacggcaccaucgucaagaccaucaccaacgaccagaucgaggucaccaacgccaccgagcucguccaguccuccuccaccggcggcaucugcgacuccccccaccagauccucgacggcgagaacugcacccucaucgacgcccuccucggcgacccccagugcgacggcuuccagaacaagaagugggaccucuucgucgagcgcuccaaggccuacuccaacugcuaccccuacgacguccccgacuacgccucccuccgcucccucaucgccuccuccggcacccucgaguucaacaacgaguccuucaacuggaccggcgucacccagaacggcaccuccuccgccugcaagcgccgcuccaacuccuccuucuucucccgccucaacuggcucacccaccucaaguucaaguaccccgcccucaacgucaccaugcccaacaacgaggaguucgacaagcucuacgucuggggcguccaccaccccggcaccuacaacgaccagaucucccucuacgcccaggccuccggccgcaucaccgucuccaccaagcgcucccagcagaccgucauccccaacaucggcucccgcccccgcguccgcgacauccccucccgcaucuccaucuacuggaccaucgucaagcccggcgacauccuccucaucaacuccaccggcaaccucaucgccccccgcggcuacuucaagauccgcuccggcaaguccuccaucaugcgcuccgacgcccccaucggcaagugcaacuccgagugcaucacccccaacggcuccauccccaacgacaagcccuuccagaacgucaaccgcaucaccuacggcgccugcccccgcuacgucaagcagaacacccucaagcucgccaccggcaugcgcaacguccccgagaagcagacccgcggcaucuucggcgccaucgccggcuucaucgagaacggcugggagggcauggucgacggcugguacggcuuccgccaccagaacuccgagggcaucggccaggccgccgaccucaaguccacccaggccgccaucgaccagaucaacggcaagcucaaccgccucaucggcaagaccaacgagaaguuccaccagaucgagaaggaguucuccgaggucgagggccgcauccaggaccucgagaaguacgucgaggacaccaagaucgaccucugguccuacaacgccgagcuccucgucgcccucgagaaccagcacaccaucgaccucaccgacuccgagaugaacaagcucuucgagcgcaccaagaagcagcuccgcgagaacgccgaggacaugggcaacggcugcuucaagaucuaccacaagugcgacaacgccugcaucggcuccauccgcaacggcaccuacgaccacgacgucuaccgcgacgaggcccucaacaaccgcuuccagaucaagggcgucgagcucaaguccggcuacaaggacuggauccucuggaucuccuucgccaucuccugcuuccuccucugcgucgcccuccucggcuucaucaugugggccugccagaagggcaacauccgcugcaacaucugcaucuga

SEQ ID NO: 97915 - RNA, 1701 nt, Artificial Sequence
  derived and/or modified CDS sequence (opt2) from hemagglutinin__InfluenzaA__ABU92732
augaagaccaucaucgcccucuccuacauccucugccucgucuucgcccagaagcuccccggcaacgacaacuccaccgccacccucugccucggccaccacgccguccccaacggcaccaucgucaagaccaucaccaacgaccagaucgaggucaccaacgccaccgagcucguccaguccuccuccaccggcggcaucugcgacuccccccaccagauccucgacggcgagaacugcacccucaucgacgcccuccucggcgacccccagugcgacggcuuccagaacaagaagugggaccucuucgucgagcgcuccaaggccuacuccaacugcuaccccuacgacguccccgacuacgccucccuccgcucccucaucgccuccuccggcacccucgaguucaacaacgaguccuucaacuggaccggcgucacccagaacggcaccuccuccgccugcaagcgccgcuccaacuccuccuucuucucccgccucaacuggcucacccaccucaaguucaaguaccccgcccucaacgucaccaugcccaacaacgaggaguucgacaagcucuacaucuggggcguccaccaccccggcaccuacaacgaccagaucucccucuacgcccaggccuccggccgcaucaccgucuccaccaagcgcucccagcagaccgucauccccaacaucggcucccgcccccgcguccgcgacauccccucccgcaucuccaucuacuggaccaucgucaagcccggcgacauccuccucaucaacuccaccggcaaccucaucgccccccgcggcuacuucaagauccgcuccggcaaguccuccaucaugcgcuccgacgcccccaucggcaagugcaacuccgagugcaucacccccaacggcuccauccccaacgacaagcccuuccagaacgucaaccgcaucaccuacggcgccugcccccgcuacgucaagcagaacacccucaagcucgccaccggcaugcgcaacguccccgagaagcagacccgcggcaucuucggcgccaucgccggcuucaucgagaacggcugggagggcauggucgacggcugguacggcuuccgccaccagaacuccgagggcaucggccaggccgccgaccucaaguccacccaggccgccaucgaccagaucaacggcaagcucaaccgccucaucggcaagaccaacgagaaguuccaccagaucgagaaggaguucuccgaggucgagggccgcauccaggaccucgagaaguacgucgaggacaccaagaucgaccucugguccuacaacgccgagcuccucgucgcccucgagaaccagcacaccaucgaccucaccgacuccgagaugaacaagcucuucgagcgcaccaagaagcagcuccgcgagaacgccgaggacaugggcaacggcugcuucaagaucuaccacaagugcgacaacgccugcaucggcuccauccgcaacggcaccuacgaccacgacgucuaccgcgacgaggcccucaacaaccgcuuccagaucaagggcgucgagcucaaguccggcuacaaggacuggauccucuggaucuccuucgccaucuccugcuuccuccucugcgucguccuccucggcuucaucaugugggccugccagaagggcaacauccgcugcaacaucugcaucuga

SEQ ID NO: 97916 - RNA, 1701 nt, Artificial Sequence
  derived and/or modified CDS sequence (opt2) from hemagglutinin__InfluenzaA__ABU92733
augaagaccaucaucgcccucuccuacauccucugccucgucuucgcccagaagcuccccggcaacgacaacuccaccgccacccucugccucggccaccacgccguccccaacggcaccaucgucaagaccaucaccaacgaccagaucgaggucaccaacgccaccgagcucguccaguccuccuccaccggcggcaucugcgacuccccccaccagauccucgacggcgagaacugcacccucaucgacgcccuccucggcgacccccagugcgacggcuuccagaacaagaagugggaccucuucaucgagcgcuccaaggccuacuccaacugcuaccccuacgacguccccgacuacgccucccuccgcucccucgucgccuccuccggcacccucgaguucaacaacgaguccuucaacuggaccggcgucacccagaacggcaccuccuccgccugcaagcgccgcuccaacaacuccuucuucucccgccucaacuggcucacccaccucaaguucaaguaccccgcccucaacgucaccaugcccaacaacgagaaguucgacaagcucuacaucuggggcguccaccaccccggcaccgacaacgaccagaucucccucuacgcccaggccuccggccgcaucaccgucuccaccaagcgcucccagcagaccgucauccccaacaucggcucccgcccccgcguccgcgacauccccucccgcaucuccaucuacuggaccaucgucaagcccggcgacauccuccucaucaacuccaccggcaaccucaucgccccccgcggcuacuucaagauccgcuccggcaaguccuccaucaugcgcuccgacgcccccaucggcaagugcaacuccgagugcaucacccccaacggcuccauccccaacgacaagcccuuccagaacgucaaccgcaucaccuacggcgccugcccccgcuacgucaagcagaacacccucaagcucgccaccggcaugcgcaacguccccgagaagcagacccgcggcaucuucggcgccaucgccggcuucaucgagaacggcugggagggcauggucgacggcugguacggcuuccgccaccagaacuccgagggcaucggccaggccgccgaccucaaguccacccaggccgccaucaaccagaucaacggcaagcucaaccgccucaucggcaagaccaacgagaaguuccaccagaucgagaaggaguucuccgaggucgagggccgcauccaggaccucgagaaguacgucgaggacaccaaggucgaccucugguccuacaacgccgagcuccucgucgcccucgagaaccagcacaccaucgaccucaccgacuccgagaugaacaagcucuucgagcgcaccaagaagcagcuccgcgagaacgccgaggacaugggcaacggcugcuucaagaucuaccacaagugcgacaacgccugcaucggcuccauccgcaacggcaccuacaaccacgacgucuaccgcgacgaggcccucaacaaccgcuuccagaucaagggcgucgagcucaaguccggcuacaaggacuggauccucuggaucuccuucgccaucuccugcuuccuccucugcgucgcccuccucggcuucaucaugugggccugccagaagggcaacauccgcugcaacaucugcaucuga

SEQ ID NO: 97917 - RNA, 1701 nt, Artificial Sequence; identical to SEQ ID NO: 97789
  derived and/or modified CDS sequence (opt2) from hemagglutinin__InfluenzaA__ABU92734

SEQ ID NO: 97918 - RNA, 1701 nt, Artificial Sequence
  derived and/or modified CDS sequence (opt2) from hemagglutinin__InfluenzaA__ABU92735
augaagaccaucaucgcccucuccuacauccucugccucgucuucgcccagaagcuccccggcaacgacaacuccaccgccacccucugccucggccaccacgccguccccaacggcaccaucgucaagaccaucaccaacgaccagaucgaggucaccaacgccaccgagcucguccaguccuccuccaccggcggcaucugcggcuccccccaccagauccucgacggcgagaacugcacccucaucgacgcccuccucggcgacccccagugcgacggcuuccagaacaagaagugggaccucuucgucgagcgcuccaaggccuacuccaacugcuaccccuacgacguccccgacuacgccucccuccgcucccucgucgccuccuccggcacccucgaguucaacaacgaguccuucaacuggaccggcgucacccagaacggcaccuccuccgccugcaagcgccgcuccaacaacuccuucuucucccgccucaacuggcucacccaccucaaguucaaguaccccgcccucaacgucaccaugcccaacaacgagaaguucgacaagcucuacaucuggggcguccaccaccccggcaccgacaacgaccagaucucccucuacgcccaggcccccgcccgcaucaccgucuccaccaagcgcucccagcagaccgucauccccaacaucggcucccgcccccgcguccgcgacauccccucccgcaucuccaucuacuggaccaucgucaagcccggcgacauccuccucaucaacuccaccggcaaccucaucgccccccgcggcuacuucaagauccucuccggcaaguccuccaucaugcgcuccgacgcccccaucggcaagugcaacuccgagugcaucacccccaacggcuccauccccaacgacaagcccuuccagaacgucaaccgcaucaccuacggcgccugcccccgcuacgucaagcagaacacccucaagcucgccaccggcaugcgcaacguccccgagaagcagacccgcggcaucuucggcgccaucgccggcuucaucgagaacggcugggagggcauggucgacggcugguacggcuuccgccaccagaacuccgagggcaucggccaggccgccgaccucaaguccacccaggccgccaucaaccagaucaacggcaagcucaaccgccucaucggcaagaccaacgagaaguuccaccagaucgagaaggaguucuccgaggucgagggccgcauccaggaccucgagaaguacgucgaggacaccaagaucgaccucugguccuacaacgccgagcuccucgucgcccucgagaaccagcacaccaucgaccucaccgacuccgagaugaacaagcucuucgagcgcaccaagaagcagcuccgcgagaacgccgaggacaugggcaacggcugcuucaagaucuaccacaagugcgacaacgccugcaucggcuccauccgcaacggcaccuacgaccacgacgucuaccgcgacgaggcccucaacaaccgcuuccagaucaagggcgucgagcucaaguccggcuacaaggacuggauccucuggaucuccuucgccauguccugcuuccuccucugcgucgcccuccucggcuucaucaugugggccugccagaagggcaacauccgcugcaacaucugcaucuga

SEQ ID NO: 97919 - RNA, 1701 nt, Artificial Sequence; identical to SEQ ID NO: 97864
  derived and/or modified CDS sequence (opt2) from hemagglutinin__InfluenzaA__ABU92737

SEQ ID NO: 97920 - RNA, 1701 nt, Artificial Sequence
  derived and/or modified CDS sequence (opt2) from hemagglutinin__InfluenzaA__ABU92738
augaagaccaucaucgcccucuccuacauccucugccucgucuucgcccagaagcuccccggcaacgacaacuccaccgccacccucugccucggccaccacgccguccccaacggcaccaucgucaagaccaucaccaacgaccagaucgaggucaccaacgccaccgagcucguccaguccuccuccaccggcggcaucugcgacuccccccaccagauccucgacggcgagaacugcacccucaucgacgcccuccucggcgacccccagugcgacggcuuccagaacaagaagugggaccucuucgucgagcgcuccaaggccuacuccaacugcuaccccuacgacguccccgacuacgccucccuccgcucccucaucgccuccuccggcacccucgaguucaacaacgaguccuucaacuggaccggcgucacccagaacggcaccuccuccgccugcaagcgccgcuccaacaacuccuucuucucccgccucaacuggcucacccaccucaaguucaaguaccccgcccucaacgucaccaugcccaacaacgagaaguucgacaagcucuacaucuggggcguccaccaccccggcaccgacaacgaccagaucucccucuacgcccaggcccccggccgcaucaccgucuccaccaagcgcucccagcagaccgucauccccaacaucggcucccgcccccgcguccgcgacauccccucccgcaucuccaucuacuggaccaucgucaagcccggcgacauccuccucaucaacuccaccggcaaccucaucgccccccgcggcuacuucaagauccgcuccggcaaguccuccaucaugcgcuccgacgcccccaucggcaagugcaacuccgagugcaucacccccaacggcuccauccccaacgacaagcccuuccagaacgucaaccgcaucaccuacggcgccugcccccgcuacgucaagcagaacacccucaagcucgccaccggcaugcgcaacguccccgagaagcagacccgcggcaucuucggcgccaucgccggcuucaucgagaacggcugggagggcauggucgacggcugguacggcuuccgccaccagaacuccgagggcaucggccaggccgccgaccucaaguccacccaggccgccaucgaccagaucaacggcaagcucaaccgccucaucggcaagaccaacgagaaguuccaccagaucgagaaggaguucuccgaggucgagggccgcauccaggaccucgagaaguacgucgaggacaccaagaucgaccucugguccuacaacgccgagcuccucgucgcccucgagaaccagcacaccaucgaccucaccgacuccgagaugaacaagcucuucgagcgcaccaagaagcagcuccgcgagaacgccgaggacaugggcaacggcugcuucaagaucuaccacaagugcgacaacgccugcaucggcuccauccgcaacggcaccuacgaccacgacgucuaccgcgacgaggcccucaacaaccgcuuccagaucaagggcgucgagcucaaguccggcuacaaggacuggauccucuggaucuccuucgccaucuccugcuuccuccucugcgucguccuccucggcuucaucaugugggccugccagaagggcaacauccgcugcaacaucugcaucuga

SEQ ID NO: 97921 - RNA, 1701 nt, Artificial Sequence; identical to SEQ ID NO: 97798
  derived and/or modified CDS sequence (opt2) from hemagglutinin__InfluenzaA__ABU92739

SEQ ID NO: 97922 - RNA, 1701 nt, Artificial Sequence
  derived and/or modified CDS sequence (opt2) from hemagglutinin__InfluenzaA__ABU92740
augaagaccaucaucgcccucuccuacauccucugccucgucuucgcccagaagcuccccggcaacgacaacuccaccgccacccucugccucggccaccacgccguccccaacggcaccaucgucaagaccaucaccaacgaccagaucgaggucaccaacgccaccgagcucguccaguccuccuccaccggcgagaucugcgacuccccccaccagauccucgacggcgagaacugcacccucaucgacacccuccucggcgacccccagugcgacggcuuccagaacaagaagugggaccucuucgucgagcgcuccaaggccuacuccaacugcuaccccuacgacguccccgacuacgccucccuccgcucccucgucgccuccuccggcacccucgaguucaacaacgaguccuucaacuggaccggcgucacccagaacggcaccuccuccgccugcaagcgccgcuccaacaacuccuucuucucccgccucaacuggcucacccaccucaaguucaaguaccccgcccucaacgucaccaugcccaacaacgagaaguucgacaagcucuacaucuggggcguccaccaccccggcaccgacaacgaccagaucuuccucuacgcccaggccuccggccgcaucaccgucuccaccaagcgcucccagcagaccgucauccccaacaucggcucccgcccccgcguccgcaacauccccucccgcaucuccaucuacuggaccaucgucaagcccggcgacauccuccucaucaacuccaccggcaaccucaucgccccccgcggcuacuucaagauccgcuccggcaaguccuccaucaugcgcuccgacgcccccaucggcaagugcaacuccgagugcaucacccccaacggcuccauccccaacgacaagcccuuccagaacgucaaccgcaucaccuacggcgccugcccccgcuacgucaagcagaacacccucaagcucgccaccggcaugcgcaacguccccgagaagcagacccgcggcaucuucggcgccaucgccggcuucaucgagaacggcugggagggcauggucgacggcugguacggcuuccgccaccagaacuccgagggcaucggccaggccgccgaccucaaguccacccaggccgccaucaaccagaucaacggcaagcucaaccgccucaucggcaagaccaacgagaaguuccaccagaucgagaaggaguucuccgaggucgagggccgcauccaggaccucgagaaguacgucgaggacaccaagaucgaccucugguccuacaacgccgagcuccucgucgcccucgagaaccagcacaccaucgaccucaccgacuccgagaugaacaagcucuucgagcgcaccaagaagcagcuccgcgagaacgccgaggacaugggcaacggcugcuucaagaucuaccacaagugcgacaacgccugcaucggcuccauccgcaacggcaccuacgaccacgacgucuaccgcgacgaggcccucaacaaccgcuuccagaucaagggcgucgagcucaaguccggcuacaaggacuggauccucuggaucuccuucgccaucuccugcuuccuccucugcgucgcccuccucggcuucaucaugugggccugccagaagggcaacauccgcugcaacaucugcaucuga

SEQ ID NO: 97923 - RNA, 1701 nt, Artificial Sequence
  derived and/or modified CDS sequence (opt2) from hemagglutinin__InfluenzaA__ABU92741
augaagaccaucaucgcccucuccuacauccucugccucgucuucgcccagaagcuccccggcaacgacaacuccaccgccacccucugccucggccaccacgccguccccaacggcaccaucgucaagaccaucaccaacgaccagaucgaggucaccaacgccaccgagcucguccaguccuccuccaccggcggcaucugcgacuccccccaccagauccucgacggcgagaacugcacccucaucgacgcccuccucggcgacccccagugcgacggcuuccagaacaagaagugggaccucuucgucgagcgcuccaaggccuacuccaacugcuaccccuacgacguccccgacuacgccucccuccgcucccucaucgccuccuccggcacccucgaguucaacaacgaguccuucaacuggaccggcgucacccagaacggcaccuccuccgccugcaagcgccgcuccaacaacuccuucuucucccgccucaacuggcucacccaccucaaguucaaguaccccgcccucaacgucaccaugcccaacaacgaggaguucgacaagcucuacaucuggggcguccaccaccccggcaccgacaacgaccagaucucccucuacgcccaggcccccggccgcaucaccgucuccaccaagcgcucccagcagaccgucauccccaacaucggcucccgcccccgcguccgcgacauccccucccgcaucuccaucuacuggaccaucgucaagcccggcgacauccuccucaucaacuccaccggcaaccucaucgccccccgcggcuacuucaagauccgcuccggcaaguccuccaucaugcgcuccgacgcccccaucggcaagugcaacuccgagugcaucacccccaacggcuccauccccaacgacaagcccuuccagaacgucaaccgcaucaccuacggcgccugcccccgcuacgucaagcagaacacccucaagcucgccaccggcaugcgcaacguccccgagaagcagacccgcggcaucuucggcgccaucgccggcuucaucgagaacggcugggagggcauggucgacggcugguacggcuuccgccaccagaacuccgagggcaucggccaggccgccgaccucaaguccacccaggccgccaucgaccagaucaacggcaagcucaaccgccucaucggcaagaccaacgagaaguuccaccagaucgagaaggaguucuccgaggucgagggccgcauccaggaccucgagaaguacgucgaggacaccaagaucgaccucugguccuacaacgccgagcuccucgucgcccucgagaaccagcacaccaucgaccucaccgacuccgagaugaacaagcucuucgagcgcaccaagaagcagcuccgcgagaacgccgaggacaugggcaacggcugcuucaagaucuaccacaagugcgacaacgccugcaucggcuccauccgcaacggcaccuacgaccacgacaucuaccgcgacgaggcccucaacaaccgcuuccagaucaagggcgucgagcucaaguccggcuacaaggacuggauccucuggaucuccuucgccaucuccugcuuccuccucugcgucguccuccucggcuucaucaugugggccugccagaagggcaacauccgcugcaacaucugcaucuga

SEQ ID NO: 97924 - RNA, 1701 nt, Artificial Sequence; identical to SEQ ID NO: 97864
  derived and/or modified CDS sequence (opt2) from hemagglutinin__InfluenzaA__ABU92742

SEQ ID NO: 97925 - RNA, 1701 nt, Artificial Sequence
  derived and/or modified CDS sequence (opt2) from hemagglutinin__InfluenzaA__ABU92743
augaagaccaucaucgcccucuccuacauccucuaccucgucuucgcccagaagcuccccgagaacgacaacuccaccgccacccucugccucggccaccacgccguccccaacggcaccaucgucaagaccaucaccaacgaccagaucgaggucaccaacgccaccgagcucguccaguccuccuccaccggcggcaucugcgacuccccccaccagauccucgacggcgagaacugcacccucaucgacgcccuccucggcgacccccagugcgacggcuuccagaacaagaagugggaccucuucgucgagcgcuccaaggccuacuccaacugcuaccccuacgacguccccgacuacgccucccuccgcucccucgucgccuccuccggcacccucgaguucaacaacgaguccuucaacuggaccggcgucacccagaacggcaccuccuccgccugcaagcgccgcuccaacaacuccuucuucucccgccucaacuggcucacccaccucaaguucaaguaccccgcccucaacgucaccaugcccaacaacgagaaguucgacaagcucuacaucuggggcguccaccaccccggcaccgacaacgaccagaucuuccucuacgcccaggccuccggccgcaucaccgucuccaccaagcgcucccagcagaccgucauccccaacaucggcucccgcccccgcguccgcaacauccccucccgcaucuccaucuacuggaccaucgucaagcccggcgacauccuccucaucaacuccaccggcaaccucaucgccccccgcggcuacuucaagauccgcuccggcaaguccuccaucaugcgcuccgacgcccccaucggcaagugcaacuccgagugcaucacccccaacggcuccauccccaacgacaagcccuuccagaacgucaaccgcaucaccuacggcgccugcccccgcuacgucaagcagaacacccucaagcucgccaccggcaugcgcaacguccccgagaagcagacccgcggcaucuucggcgccaucgccggcuucaucgagaacggcugggagggcauggucgacggcugguacggcuuccgccaccagaacuccgagggcaucggccaggccgccgaccucaaguccacccaggccgccaucgaccagaucaacggcaagcucaaccgccucaucggcaagaccaacgagaaguuccaccagaucgagaaggaguucuccgaggucgagggccgcauccaggaccucgagaaguacgucgaggacaccaagaucgaccucugguccuacaacgccgagcuccucgucgcccucgagaaccagcacaccaucgaccucaccgacuccgagaugaacaagcucuucgagaagaccaagaagcagcuccgcgagaacgccgaggacaugggcaacggcugcuucaagaucuaccacaagugcgacaacgccugcaucggcuccauccgcaacggcaccuacgaccacgacgucuaccgcgacgaggcccucaacaaccgcuuccagaucaagggcgucgagcucaaguccggcuacaaggacuggauccucuggaucuccuucgccaucuccugcuuccuccucugcgucgcccuccucggcuucaucaugugggccugccagaagggcaacauccgcugcaacaucugcaucuga

SEQ ID NO: 97926 - RNA, 1701 nt, Artificial Sequence; identical to SEQ ID NO: 97864
  derived and/or modified CDS sequence (opt2) from hemagglutinin__InfluenzaA__ABU92744

SEQ ID NO: 97927 - RNA, 1701 nt, Artificial Sequence
  derived and/or modified CDS sequence (opt2) from hemagglutinin__InfluenzaA__ABU92745
augaagaccaucaucgcccucuccuacauccucugccucgucuucgcccagaagcuccccggcaacgacaacuccaccgccacccucugccucggccaccacgccguccccaacggcaccaucgucaagaccaucaccaacgaccagaucgaggucaccaacgccaccgagcucguccaguccuccuccaccggcggcaucugcgacuccccccaccagauccucgacggcgagaacugcacccucaucgacgcccuccucggcgacccccagugcgacggcuuccagaacaagaagugggaccucuucgucgagcgcuccaaggccuacuccaacugcuaccccuacgacguccccgacuacgccucccuccgcucccucaucgccuccuccggcacccucgaguucaacaacgaguccuucaacuggaccggcgucacccagaacggcaccuccuccgccugcaagcgccgcuccaacaacuccuucuucucccgccucaacuggcucacccaccucaaguucaaguaccccgcccucaacgucaccaugcccaacaacgaggaguucgacaagcucuacaucuggggcguccaccaccccggcaccgacaacgaccagaucucccucuacgcccaggcccccggccgcaucaccgucuccaccaagcgcucccagcagaccgucauccccaacaucggcucccgcccccgcguccgcgacauccccucccgcaucuccaucuacuggaccaucgucaagcccggcgacauccuccucaucaacuccaccggcaaccucaucgccccccgcggcuacuucaagauccgcaucggcaaguccuccaucaugcgcuccgacgcccccaucggcaagugcaacuccgagugcaucacccccaacggcuccauccccaacgacaagcccuuccagaacgucaaccgcaucaccuacggcgccugcccccgcuacgucaagcagaacacccucaagcucgccaccggcaugcgcaacguccccgagaagcagacccgcggcaucuucggcgccaucgccggcuucaucgagaacggcugggagggcauggucgacggcugguacggcuuccgccaccagaacuccgagggcaucggccaggccgccgaccucaaguccacccaggccgccaucgaccagaucaacggcaagcucaaccgccucaucggcaagaccaacgagaaguuccaccagaucgagaaggaguucuccgaggucgagggccgcauccaggaccucgagaaguacgucgaggacaccaagaucgaccucugguccuacaacgccgagcuccucgucgcccucgagaaccagcacaccaucgaccucaccgacuccgagaugaacaagcucuucgagcgcaccaagaagcagcuccgcgagaacgccgaggacaugggcaacggcugcuucaagaucuaccacaagugcgacaacgccugcaucggcuccauccgcaacggcaccuacgaccacgacgucuaccgcgacgaggcccucaacaaccgcuuccagaucaagggcgucgagcucaaguccggcuacaaggacuggauccucuggaucuccuucgccaucuccugcuuccuccucugcgucguccuccucggcuucaucaugugggccugccagaagggcaacauccgcugcaacaucugcaucuga

SEQ ID NO: 97928 - RNA, 1701 nt, Artificial Sequence; identical to SEQ ID NO: 97864
  derived and/or modified CDS sequence (opt2) from hemagglutinin__InfluenzaA__ABU92746

SEQ ID NO: 97929 - RNA, 1701 nt, Artificial Sequence; identical to SEQ ID NO: 96109
  derived and/or modified CDS sequence (opt2) from hemagglutinin__InfluenzaA__ABU92747

SEQ ID NO: 97930 - RNA, 1701 nt, Artificial Sequence
  derived and/or modified CDS sequence (opt2) from hemagglutinin__InfluenzaA__ABU92748
augaagaccaucaucgcccucuccuacauccucugccucgucuucgcccagaagcuccccggcaacgacaacuccaccgccacccucugccucggccaccacgccguccccaacggcaccaucgucaagaccaucaccaacgaccagaucgaggucaccaacgccaccgagcucguccaguccuccuccaccggcgagaucugcgacuccccccaccagauccucgacggcgagaacugcacccucaucgacgcccuccucggcgacccccagugcgacggcuuccagaacaagaagugggaccucuucgucgagcgcuccaaggccuacuccaacugcuaccccuacgacguccccgacuacgccucccuccgcucccucgucgccuccuccggcacccucgaguucaacaacgaguccuucaacuggaccggcgucacccagaacggcaccuccuccgccugcaagcgccgcuccaacaacuccuucuucucccgccucaacuggcucacccacuccaaguucaaguaccccgcccucaacgucaccaugcccaacaacgagaaguucgacaagcucuacaucuggggcguccaccaccccggcaccgacaacgaccagaccuuccucuacgcccaggccuccggccgcaucaccgucuccaccaagcgcucccagcagaccgucauccccaacaucggcucccgcccccgcguccgcaacauccccucccgcaucuccaucuacuggaccaucgucaagcccggcgacauccuccucaucaacuccaccggcaaccucaucgccccccgcggcuacuucaagauccgcuccggcaaguccuccaucaugcgcuccgacgcccccaucggcaagugcaacuccgagugcaucacccccaacggcuccauccccaacgacaagcccuuccagaacgucaaccgcaucaccuacggcgccugcccccgcuacgucaagcagaacacccucaagcucgccaccggcaugcgcaacguccccgagaagcagacccgcggcaucuucggcgccaucgccggcuucaucgagaacggcugggagggcauggucgacggcugguacggcuuccgccaccagaacuccgagggcaucggccaggccgccgaccucaaguccacccaggccgccaucaaccagaucaacggcaagcucaaccgccucaucggcaagaccaacgagaaguuccaccagaucgagaaggaguucuccgaggucgagggccgcauccaggaccucgagaaguacgucgaggacaccaagaucgaccucugguccuacaacgccgagcuccucgucgcccucgagaaccagcacaccaucgaccucaccgacuccgagaugaacaagcucuucgagcgcaccaagaagcagcuccgcgagaacgccgaggacaugggcaacggcugcuucaagaucuaccacaagugcgacaacgccugcaucggcuccauccgcaacggcaccuacgaccacgacgucuaccgcgacgaggcccucaacaaccgcuuccagaucaagggcgucgagcucaaguccggcuacaaggacuggauccucuggaucuccuucgccaucuccugcuuccuccucugcgucguccuccucggcuucaucaugugggccugccagaagggcaacauccgcugcaacaucugcaucuga

SEQ ID NO: 97931 - RNA, 1701 nt, Artificial Sequence; identical to SEQ ID NO: 96109
  derived and/or modified CDS sequence (opt2) from hemagglutinin__InfluenzaA__ABU92749

SEQ ID NO: 97932 - RNA, 1701 nt, Artificial Sequence
  derived and/or modified CDS sequence (opt2) from hemagglutinin__InfluenzaA__ABU92750
augaagaccaucaucgcccucuccuacauccucugccucgucuucgcccagaagcuccccggcaacgacaaccgcaccgccacccucugccucggccaccacgccguccccaacggcaccaucgucaagaccaucaccaacgaccagaucgaggucaccaacgccaccgagcucguccagaucuccuccaccggcggcaucugcgacuccccccaccagauccucgacggcgagaacugcacccucaucgacgcccuccucggcgacccccagugcgacggcuuccagaacaagaagugggaccucuucgucgagcgcuccaaggccuacuccaacugcuaccccuacgacguccccgacuacgccucccuccgcucccucgucgccuccuccggcacccucgaguucaacaacgaguccuucgacuggaccggcgucacccagaacggcaccuccuccgccugcaagcgccgcuccaacaaguccuucuucucccgccucaacuggcucacccaccucaaguacaaguaccccgcccucaacgucaccaugcccaacaacgagaaguucgacaagcucuacaucuggggcguccaccaccccggcaccgacuccgaccagaucucccucuacgcccaggccuccggccgcaucaccgucuccaccaagcgcucccagcagaccgucauccccaacaucggcucccgcccccgcguccgcgacgucuccucccgcaucuccaucuacuggaccaucgucaagcccggcgacauccuccucaucaacuccaccggcaaccucaucgccccccgcggcuacuucaagauccgcuccggcaaguccuccaucaugcgcuccgacgcccccaucggcaagugcaacuccgagugcaucacccccaacggcuccauccccaacgacaagcccuuccagaacgucaaccgcaucaccuacggcgccugcccccgcuacgucaagcagaacacccucaagcucgccaccggcaugcgcaacguccccgagaagcagacccgcggcaucuucggcgccaucgccggcuucaucgagaacggcugggagggcauggucgacggcugguacggcuuccgccaccagaacuccgagggcaccggccaggccgccgaccucaaguccacccaggccgccaucaaccagaucaacggcaagcucaaccgccucaucggcaagaccaacgagaaguuccaccagaucgagaaggaguucuccgaggucgagggccgcauccaggaccucgagaaguacgucgaggacaccaagaucgaccucugguccuacaacgccgagcuccucgucgcccucgagaaccagcacaccaucgaccucaccgacuccgagaugaacaagcucuucgagcgcaccaagaagcagcuccgcgagaacgccgaggacaugggcaacggcugcuucaagaucuaccacaagugcgacaacgccugcaucggcuccauccgcaacggcaccuacgaccacgacgucuaccgcgacgaggcccucaacaaccgcuuccagaucaagggcgucgagcucaaguccggcuacaaggacuggauccucuggaucuccuucgccaucuccugcuuccuccucugcgucgcccuccucggcuucaucaugugggccugccagaagggcaacauccgcugcaacaucugcaucuga

SEQ ID NO: 97933 - RNA, 1701 nt, Artificial Sequence
  derived and/or modified CDS sequence (opt2) from hemagglutinin__InfluenzaA__ABU92751
augaagaccaucaucgcccucuccuacauccucugccucgucuucgcccagaagcuccccggcaacgacaacuccaccgccacccucugccucggccaccacgccguccccaacggcaccaucgucaagaccaucaccaacgaccagaucgaggucaccaacgccaccgagcucguccaguccuccuccaccggcggcaucugcgacuccccccaccagauccucgacggcgagaacugcacccucaucgacgcccuccucggcgacccccagugcgacggcuuccagaacaagaagugggaccucuucgucgagcgcuccaaggccuacuccaacugcuaccccuacgacguccccgacuacgccucccuccgcucccucgucgccuccuccggcacccucgaguucaacaacgaguccuucaacuggaccggcgucacccagaacggcaccuccuccgccugcaagcgccgcuccaacaaguccuucuucucccgccucaacuggcucacccaccucaaguacaaguaccccgcccucaacgucaccaugcccaacaacgagaaguucgacaagcucuacaucuggggcguccaccaccccggcaccgacuccgaccagaucucccucuacgcccaggccuccggccgcaucaccgucuccaccaagcgcucccagcagaccgucauccccaacaucggcucccgcccccgcguccgcgacgucuccucccgcaucuccaucuacuggaccaucgucaagcccggcgacauccuccucaucaacuccaccggcaaccucaucgccccccgcggcuacuucaagauccgcuccggcaaguccuccaucaugcgcuccgacgcccccaucggcaagugcaacuccgagugcaucacccccaacggcuccauccccaacgacaagcccuuccagaacgucaaccgcaucaccuacggcgccugcccccgcuacgucaagcagaacacccucaagcucgccaccggcaugcgcaacguccccgagaagcagacccgcggcaucuucggcgccaucgccggcuucaucgagaacggcugggagggcauggucgacggcugguacggcuuccgccaccagaacuccgagggcaccggccaggccgccgaccucaaguccacccaggccgccaucaaccagaucaacggcaagcucaaccgccucaucggcaagaccaacgagaaguuccaccagaucgagaaggaguucuccgaggucgagggccgcauccaggaccucgagaaguacgucgaggacaccaagaucgaccucugguccuacaacgccgagcuccucgucgcccucgagaaccagcacaccaucgaccucaccgacuccgagaugaacaagcucuucgagcgcaccaagaagcagcuccgcgagaacgccgaggacaugggcaacggcugcuucaagaucuaccacaagugcgacaacgccugcaucggcuccauccgcaacggcaccuacgaccacgacgucuaccgcgacgaggcccucaacaaccgcuuccagaucaagggcgucgagcucaaguccggcuacaaggacuggauccucuggaucuccuucgccaucuccugcuuccuccucugcgucgcccuccucggcuucaucaugugggccugccagaagggcaacauccgcugcaacaucugcaucuga

SEQ ID NO: 97934 - RNA, 1701 nt, Artificial Sequence; identical to SEQ ID NO: 97798
  derived and/or modified CDS sequence (opt2) from hemagglutinin__InfluenzaA__ABU92752

SEQ ID NO: 97935 - RNA, 1701 nt, Artificial Sequence; identical to SEQ ID NO: 96109
  derived and/or modified CDS sequence (opt2) from hemagglutinin__InfluenzaA__ABU92753

SEQ ID NO: 97936 - RNA, 1701 nt, Artificial Sequence; identical to SEQ ID NO: 97798
  derived and/or modified CDS sequence (opt2) from hemagglutinin__InfluenzaA__ABU92754

SEQ ID NO: 97937 - RNA, 1701 nt, Artificial Sequence
  derived and/or modified CDS sequence (opt2) from hemagglutinin__InfluenzaA__ABU92755
augaagaccaucaucgcccucuccuacauccucugccucgucuucgcccagaagcuccccggcaacgacaacggcaccgccacccucugccucggccaccacgccguccccaacggcaccaucgucaagaccaucaccaacgaccagaucgaggucaccaacgccaccgagcucguccaguccuccuccaccggcggcaucugcgacuccccccaccagauccucgacggcgagaacugcacccucaucgacgcccuccucggcgacccccagugcgacggcuuccagaacaagaagugggaccucuucgucgagcgcuccaaggccuacuccaacugcuaccccuacgacguccccgacuacgccucccuccgcucccucgucgccuccuccggcacccucgaguucaacaacgaguccuucaacuggaccggcgucacccagaacggcaccuccuccgccugcaagcgccgcuccaacaaguccuucuucucccgccucaacuggcucacccaccucaaguucaaguaccccgcccucaacgucaccaugcccaacaacgagaaguucgacaagcucuacaucuggggcguccaccaccccggcaccgacaacgaccagaucucccucuacgcccaggccuccggccgcaucaccgucuccaccaagcgcucccagcagaccgucauccccaacaucggcucccgcccccgcguccgcgacguccccucccgcaucuccaucuacuggaccaucgucaagcccggcgacauccuccucaucaacuccaccggcaaccucaucgccccccgcggcuacuucaagauccgcuccggcaaguccuccaucaugcgcuccgacgcccccaucggcaagugcaacuccgagugcaucacccccaacggcuccauccccaacgacaagcccuuccagaacgucaaccgcaucaccuacggcgccugcccccgcuacgucaagcagaacacccucaagcucgccaccggcaugcgcaacguccccgagaagcagacccgcggcaucuucggcgccaucgccggcuucaucgagaacggcugggagggcauggucgacggcugguacggcuuccgccaccagaacgccgagggcaccggccaggccgccgaccucaaguccacccaggccgccaucaaccagaucaacggcaagcucaaccgccucaucggcaagaccaacgagaaguuccaccagaucgagaaggaguucuccgaggucgagggccgcauccaggaccucgagaaguacgucgaggacaccaagaucgaccucugguccuacaacgccgagcuccucgucgcccucgagaaccagcacaccaucgaccucaccgacuccgagaugaacaagcucuucgagcgcaccaagaagcagcuccgcgagaacgccgaggacaugggcaacggcugcuucaagaucuaccacaagugcgacaacgccugcaucggcuccauccgcaacggcaccuacgaccacaacgucuaccgcgacgaggcccucaacaaccgcuuccagaucaagggcgucgagcucaaguccggcuacaaggacuggauccucuggaucuccuucgccaucuccugcuuccuccucugcgucguccuccucggcuucaucaugugggccugccagaagggcaacauccgcugcaacaucugcaucuga

SEQ ID NO: 97938 - RNA, 1701 nt, Artificial Sequence
  derived and/or modified CDS sequence (opt2) from hemagglutinin__InfluenzaA__ABU92756
augaagaccaucaucgcccucuccuacauccucugccucgucuucgcccagaagcuccccggcaacgacaacuccaccgccacccucugccucggccaccacgccguccccaacggcaccaucgucaagaccaucaccaacgaccagaucgaggucaccaacgccaccgagcucguccagaucuccuccaccggcggcaucugcgacuccccccaccagauccucgacggcgagaacugcacccucaucgacgcccuccucggcgacccccagugcgacggcuuccagaacaagaagugggaccucuucgucgagcgcuccaaggcccacuccaacugcuaccccuacgacguccccgacuacgccucccuccgcucccucgucgccuccuccggcacccucgaguucaacaacgaguccuucgacuggaccggcgucacccagaacggcaccuccuccgccugcaagcgccgcuccaacaaguccuucuucucccgccucaacuggcucacccaccucaaguacaaguaccccgcccucaacgucaccaugcccaacaacgagaaguucgacaagcucuacaucuggggcguccaccaccccggcaccgacuccgaccagaucucccucuacgcccaggccuccggccgcaucaccgucuccaccaagcgcucccagcagaccgucauccccaacaucggcucccgcccccgcguccgcgacgucuccucccgcaucuccaucuacuggaccaucgucaagcccggcgacauccuccucaucaacuccaccggcaaccucaucgccccccgcggcuacuucaagauccgcuccggcaaguccuccaucaugcgcuccgacgcccccaucggcaagugcaacuccgagugcaucacccccaacggcuccauccccaacgacaagcccuuccagaacgucaaccgcaucaccuacggcgccugcccccgcuacgucaagcagaacacccucaagcucgccaccggcaugcgcaacguccccgagaagcagacccgcggcaucuucggcgccaucgccggcuucaucgagaacggcugggagggcauggucgacggcugguacggcuuccgccaccagaacuccgagggcaccggccaggccgccgaccucaaguccacccaggccgccaucaaccagaucaacggcaagcucaaccgccucaucggcaagaccaacgagaaguuccaccagaucgagaaggaguucuccgaggucgagggccgcauccaggaccucgagaaguacgucgaggacaccaagaucgaccucugguccuacaacgccgagcuccucgucgcccucgagaaccagcacaccaucgaccucaccgacuccgagaugaacaagcucuucgagcgcaccaagaagcagcuccgcgagaacgccgaggacaugggcaacggcugcuucaagaucuaccacaagugcgacaacgccugcaucggcuccauccgcaacggcaccuacgaccacgacgucuaccgcgacgaggcccucaacaaccgcuuccagaucaagggcgucgagcucaaguccggcuacaaggacuggauccucuggaucuccuucgccaucuccugcuuccuccucugcgucgcccuccucggcuucaucaugugggccugccagaagggcaacauccgcugcaacaucugcaucuga

SEQ ID NO: 97939 - RNA, 1701 nt, Artificial Sequence
  derived and/or modified CDS sequence (opt2) from hemagglutinin__InfluenzaA__ABU92757
augaagaccaucaucgcccucuccuacauccucugccucgucuucgcccagaagcuccccggcaacgacaacuccaccgccacccucugccucggccaccacgccguccccaacggcaccaucgucaagaccaucaccaacgaccagaucgaggucaccaacgccaccgagcucguccagaucuccuccaccggcgagaucugcgacuccccccaccagauccucgacggcgagaacugcacccucaucgacgcccuccucggcgacccccagugcgacggcuuccagaacaagaagugggaccucuucgucgagcgcuccaaggccuacuccaacugcuaccccuacgacguccccgacuacgccucccuccgcucccucgucgccuccuccggcacccucgaguucaacaacgaguccuucgacuggaccggcgucacccagaacggcaccuccuccgccugcaagcgccgcuccgacaaguccuucuucucccgccucaacuggcucacccaccucaaguacaaguaccccgcccucaacgucaccaugcccaacaacgagaaguucgacaagcucuacaucuggggcguccaccaccccggcaccgacuccgaccagaucucccucuacgcccaggccuccggccgcaucaccgucuccaccaagcgcucccagcagaccgucauccccaacaucggcucccgcccccgcguccgcgacgucuccucccgcaucuccaucuacuggaccaucgucaagcccggcgacauccuccucaucaacuccaccggcaaccucaucgccccccgcggcuacuucaagauccgccgcggcaaguccuccaucaugcgcuccgacgcccccaucggcaagugcaacuccgagugcaucacccccaacggcuccauccccaacgacaagcccuuccagaacgucaaccgcaucaccuacggcgccugcccccgcuacgucaagcagaacacccucaagcucgccaccggcaugcgcaacguccccgagaagcagacccgcggcaucuucggcgccaucgccggcuucaucgagaacggcugggagggcauggucgacggcugguacggcuuccgccaccagaacuccgagggcaccggccaggccgccgaccucaaguccacccaggccgccaucaaccagaucaacggcaagcucaaccgccucaucggcaagaccaacgagaaguuccaccagaucgagaaggaguucuccgaggucgagggccgcauccaggaccucgagaaguacgucgaggacaccaagaucgaccucugguccuacaacgccgagcuccucgucgcccucgagaaccagcacaccaucgaccucaccgacuccgagaugaacaagcucuucgagcgcaccaagaagcagcuccgcgagaacgccgaggacaugggcaacggcugcuucaagaucuaccacaagugcgacaacgccugcaucggcuccauccgcaacggcaccuacgaccacgacgucuaccgcgacgaggcccucaacaaccgcuuccagaucaagggcgucgagcucaaguccggcuacaaggacuggauccucuggaucuccuucgccaucuccugcuuccuccucugcgucgcccuccucggcuucaucaugugggccugccagaagggcaacauccgcugcaacaucugcaucuga

SEQ ID NO: 97940 - RNA, 1701 nt, Artificial Sequence; identical to SEQ ID NO: 97798
  derived and/or modified CDS sequence (opt2) from hemagglutinin__InfluenzaA__ABU92758

SEQ ID NO: 97941 - RNA, 1701 nt, Artificial Sequence; identical to SEQ ID NO: 97798
  derived and/or modified CDS sequence (opt2) from hemagglutinin__InfluenzaA__ABU92759

SEQ ID NO: 97942 - RNA, 1701 nt, Artificial Sequence
  derived and/or modified CDS sequence (opt2) from hemagglutinin__InfluenzaA__ABU92760
augaagaccaucaucgcccucuccuacauccucugccucgucuucgcccagaagcuccccggcaacgacaacuccaccgccacccucugccucggccaccacgccguccccaacggcaccaucgucaagaccaucaccaacgaccagaucgaggucaccaacgccaccgagcucguccagaucuccuccaccggcgagaucugcaacuccccccaccagauccucgacggcgagaacugcacccucaucgacgcccuccucggcgacccccagugcgacggcuuccagaacaagaagugggaccucuucgucgagcgcuccaaggccuacuccaacugcuaccccuacgacguccccgacuacgccucccuccgcucccucgucgccuccuccggcacccucgaguucaacaacgaguccuucgacuggaccggcgucacccagaacggcaccuccuccgccugcaagcgccgcuccgacaaguccuucuucucccgccucaacuggcucacccaccucaaguacaaguaccccgcccucaacgucaccaugcccaacaacgagaaguucgacaagcucuacaucuggggcguccaccaccccggcaccgacuccgaccagaucucccucuacgcccaggccuccggccgcaucaccgucuccaccaagcgcucccagcagaccgucauccccaacaucggcucccgcccccgcguccgcgacgucuccucccgcaucuccaucuacuggaccaucgucaagcccggcgacauccuccucaucaacuccaccggcaaccucaucgccccccgcggcuacuucaagauccgcuccggcaaguccuccaucaugcgcuccgacgcccccaucggcaagugcaacuccgagugcaucacccccaacggcuccauccccaacgacaagcccuuccagaacgucaaccgcaucaccuacggcgccugcccccgcuacgucaagcagaacacccucaagcucgccaccggcaugcgcaacguccccgagaagcagacccgcggcaucuucggcgccaucgccggcuucaucgagaacggcugggagggcauggucgacggcugguacggcuuccgccaccagaacuccgagggcaccggccaggccgccgaccucaaguccacccaggccgccaucaaccagaucaacggcaagcucaaccgccucaucggcaagaccaacgagaaguuccaccagaucgagaaggaguucuccgaggucgagggccgcauccaggaccucgagaaguacgucgaggacaccaagaucgaccucugguccuacaacgccgagcuccucgucgcccucgagaaccagcacaccaucgaccucaccgacuccgagaugaacaagcucuucgagcgcaccaagaagcagcuccgcgagaacgccgaggacaugggcaacggcugcuucaagaucuaccacaagugcgacaacgccugcaucggcuccauccgcaacggcaccuacgaccacgacgucuaccgcgacgaggcccucaacaaccgcuuccagaucaagggcgucgagcucaaguccggcuacaaggacuggauccucuggaucuccuucgccaucuccugcuuccuccucugcgucgcccuccucggcuucaucaugugggccugccagaagggcaacauccgcugcaacaucugcaucuga

SEQ ID NO: 97943 - RNA, 1698 nt, Artificial Sequence
  derived and/or modified CDS sequence (opt2) from hemagglutinin__InfluenzaA__ABV29579
augaaggucaagcuccucguccuccucugcaccuucaccgccaccuacgccgacaccaucugcaucggcuaccacgccaacaacuccaccgacaccgucgacaccguccucgagaagaacgucaccgucacccacuccgucaaccuccucgaggacucccacaacggcaagcucugccuccucaagggcaucgccccccuccagcucggcaacugcuccgucgccggcuggauccucggcaaccccgagugcgagcuccucaucuccaaggaguccugguccuacaucgucgagacccccaaccccgagaacggcaccugcuaccccggcuacuucgccgacuacgaggagcuccgcgagcagcucuccuccgucuccuccuucgagcgcuucgagaucuuccccaaggaguccuccuggcccaaccacaccgucaccggcgucuccgccuccugcucccacaacggcaaguccuccuucuaccgcaaccuccucuggcucaccggcaagaacggccucuaccccaaccucuccaaguccuacgccaacaacaaggagaaggagguccucguccucuggggcguccaccacccccccaacaucggcgaccagcgcgcccucuaccacaccgagaacgccuacgucuccgucgucuccucccacuacucccgccgcuucacccccgagaucgccaagcgccccaagguccgcgaccaggagggccgcaucaacuacuacuggacccuccucgagcccggcgacaccaucaucuucgaggccaacggcaaccucaucgccccccgcuucgccuucgcccucucccgcggcuucggcuccggcaucaucaccuccaacgcccccauggacgagugcgacgccaagugccagaccccccagggcgccaucaacuccucccuccccuuccagaacguccaccccgucaccaucggcgagugccccaaguacguccgcuccaccaagcuccgcauggucaccggccuccgcaacauccccuccauccagucccgcggccucuucggcgccaucgccggcuucaucgagggcggcuggaccggcauggucgacggcugguacggcuaccaccaccagaacgagcagggcuccggcuacgccgccgaccagaaguccacccagaacgccaucaacggcaucaccaacaaggucaacuccgucaucgagaagaugaacacccaguucaccgccgucggcaaggaguucaacaagcucgagaagcgcauggagaaccucaacaagaaggucgacgacggcuuccucgacaucuggaccuacaacgccgagcuccucguccuccucgagaacgagcgcacccucgacuuccacgacuccaacgucaagaaccucuacgagaaggucaagucccagcucaagaacaacgccaaggagaucggcaacggcugcuucgaguucuaccacaagugcaacgacgagugcauggaguccgucaagaacggcaccuacgacuaccccaaguacuccgaggaguccaagcucaaccgcgagaagaucgacggcgucaagcucgaguccaugggcgucuaccagauccucgccaucuacuccaccgucgccuccucccucguccuccucgucucccucggcgccaucuccuucuggaugugcuccaacggcucccuccagugccgcaucugcaucuga

SEQ ID NO: 97944 - RNA, 1698 nt, Artificial Sequence
  derived and/or modified CDS sequence (opt2) from hemagglutinin__InfluenzaA__ABV29612
augaaggucaagcuccucauccuccucugcaccuucaccgccaccuacgccgacaccaucugcaucggcuaccacgccaacaacuccaccgacaccgucgacaccguccucgagaagaacgucaccgucacccacuccgucaaccuccucgaggacucccacaacggcaagcucugccuccucaagggcaucgccccccuccagcucggcaacugcuccgucgccggcuggauccucggcaaccccgagugcgagcuccucaucuccaaggaguccugguccuacaucgucgagacccccaaccccgagaacggcaccugcuaccccggcuacuucgccgacuacgaggagcuccgcgagcagcucuccuccgucuccuccuucgagcgcuucgagaucuuccccaaggaguccuccuggcccaaccacaccgucaccggcgucuccgccuccugcucccacaacggcaaguccuccuucuaccgcaaccuccucuggcucaccggcaagaacggccucuaccccaaccucuccaaguccuacgccaacaacaaggagaaggagguccucguccucuggggcguccaccacccccccaacaucggcgaccagcgcgcccucuaccacaccgagaacgccuacgucuccgucgucuccucccacuacucccgccgcuucacccccgaggucgccaagcgccccaagguccgcgaccaggagggccgcaucaacuacuacuggacccuccucgagcccggcgacaccaucaucuucgaggccaacggcaaccucaucgccccccgcuucgccuucgcccucucccgcggcuucggcuccggcaucaucaccuccaacgcccccauggacgagugcgacgccaagugccagaccccccagggcgccaucaacuccucccuccccuuccagaacguccaccccgucaccaucggcgagugccccaaguacguccgcuccaccaagcuccgcauggucaccggccuccgcaacauccccuccauccagucccgcggccucuucggcgccaucgccggcuucaucgagggcggcuggaccggcauggucgacggcugguacggcuaccaccaccagaacgagcagggcuccggcuacgccgccgaccagaaguccacccagaacgccaucaacggcaucaccaacaaggucaacuccgucaucgagaagaugaacacccaguucaccgccgucggcaaggaguucaacaagcucgagcgccgcauggagaaccucaacaagaaggucgacgacggcuuccucgacaucuggaccuacaacgccgagcuccucguccuccucgagaacgagcgcacccucgacuuccacgacuccaacgucaagaaccucuacgagaaggucaagucccagcucaagaacaacgccaaggagaucggcaacggcugcuucgaguucuaccacaagugcaacgacgagugcauggaguccgucaagaacggcaccuacgacuaccccaaguacuccgaggaguccaagcucaaccgcgagaagaucgacggcgucaagcucgaguccaugggcgucuaccagauccucgccaucuacuccaccgucgccuccucccucguccuccucgucucccucggcgccaucuccuucuggaugugcuccaacggcucccuccagugccgcaucugcaucuga

SEQ ID NO: 97945 - RNA, 1698 nt, Artificial Sequence
  derived and/or modified CDS sequence (opt2) from hemagglutinin__InfluenzaA__ABV29634
augaaggucaagcuccucguccuccucugcaccuucaccgccaccuacgccgacaccaucugcaucggcuaccacgccaacaacuccaccgacaccgucgacaccguccucgagaagaacgucaccgucacccacuccgucaaccuccucgaggacucccacaacggcaagcucugccuccucaagggcaucgccccccuccagcucggcaacugcuccgucgccggcuggauccucggcaaccccgagugcgagcuccucaucuccaaggaguccugguccuacaucgucgaggcccccucccccgagaacggcaccugcuaccccggcuacuucgccgacuacgaggagcuccgcgagcagcucuccuccgucuccuccuucgagcgcuucgagaucuuccccaaggaguccuccuggcccaaccacaccgucaccggcgucuccgccuccugcucccacaacggcaaguccuccuucuaccgcaaccuccucuggcucaccggcaagaacggccucuaccccaaccucuccaaguccuacgccaacaacaaggagaaggagguccucguccucuggggcguccaccacccccccaacaucggcgaccagcgcgcccucuaccacaccgagaacgccuacgucuccgucgucuccucccacuacucccgccgcuucacccccgagaucgccaagcgccccaagguccgcgaccaggagggccgcaucaacuacuacuggacccuccucgagcccggcgacaccaucaucuucgaggccaacggcaaccucaucgccccccgcuucgccuucgcccucucccgcggcuucggcuccggcaucaucaccuccaacgcccccaugggcgagugcgacgccaagugccagaccccccagggcgccaucaacuccucccuccccuuccagaacguccaccccgucaccaucggcgagugccccaaguacguccgcuccgccaagcuccgcauggucaccggccuccgcaacauccccuccauccagucccgcggccucuucggcgccaucgccggcuucaucgagggcggcuggaccggcauggucgacggcugguacggcuaccaccaccagaacgagcagggcuccggcuacgccgccgaccagaaguccacccagaacgccaucaacggcaucaccaacaaggucaacuccgucaucgagaagaugaacacccaguucaccgccgucggcaaggaguucaacaagcucgagcgccgcauggagaaccucaacaagaaggucgacgacggcuuccucgacaucuggaccuacaacgccgagcuccucguccuccucgagaacgagcgcacccucgacuuccacgacuccaacgucaagaaccucuacgagaaggucaagucccagcucaagaacaacgccaaggagaucggcaacggcugcuucgaguucuaccacaagugcaacgacgagugcauggaguccgucaagaacggcaccuacgacuaccccaaguacuccgaggaguccaagcucaaccgcgagaagaucgacggcgucaagcucgaguccaugggcgucuaccagauccucgccaucuacuccaccgucgccuccucccucguccuccucgucucccucggcgccaucuccuucuggaugugcuccaacggcucccuccagugccgcaucugcaucuga

SEQ ID NO: 97946 - RNA, 1698 nt, Artificial Sequence
  derived and/or modified CDS sequence (opt2) from hemagglutinin__InfluenzaA__ABV29645
augaaggucaagcuccucauccuccucugcaccuucaccgccaccuacgccgacaccaucugcaucggcuaccacgccaacaacuccaccgacaccgucgacaccguccucgagaagaacgucaccgucacccacuccgucaaccuccucgaggacucccacaacggcaagcucugccuccucaagggcaucgccccccuccagcucggcaacugcuccgucgccggcuggauccucggcaaccccgagugcgagcuccucaucuccaaggaguccugguccuacaucgucgagacccccaaccccgagaacggcaccugcuaccccggcuacuucgccgacuacgaggagcuccgcgagcagcucuccuccgucuccuccuucgagcgcuucgagaucuuccccaaggaguccuccuggcccaaccacaccgucaccggcgucuccgccuccugcucccacaacggcaaguccuccuucuaccgcaaccuccucuggcucaccggcaagaacggccucuaccccaaccucuccaaguccuacgccaacaacaaggagaaggagguccucguccucuggggcguccaccacccccccaacaucggcgaccagcgcgcccucuaccacaccgagaacgccuacgucuccgucgucuccucccacuacucccgccgcuucacccccgagaucgccaagcgccccaagguccgcgaccaggagggccgcaucaacuacuacuggacccuccucgagcccggcgacaccaucaucuucgaggccaacggcaaccucaucgccccccgcuucgccuucgcccucucccgcggcuucggcuccggcaucaucaccuccaacgcccccauggacgagugcgacgccaagugccagaccccccagggcgccaucaacuccucccuccccuuccagaacguccaccccgucaccaucggcgagugccccaaguacguccgcuccaccaagcuccgcauggucaccggccuccgcaacauccccuccauccagucccgcggccucuucggcgccaucgccggcuucaucgagggcggcuggaccggcauggucgacggcugguacggcuaccaccaccagaacgagcagggcuccggcuacgccgccgaccagaaguccacccagaacgccaucaacggcaucaccaacaaggucaacuccgucaucgagaagaugaacacccaguucaccgccgucggcaaggaguucaacaagcucgagcgccgcauggagaaccucaacaagaaggucgacgacggcuuccucgacaucuggaccuacaacgccgagcuccucguccuccucgagaacgagcgcacccucgacuuccacgacuccaacgucaagaaccucuacgagaaggucaagucccagcucaagaacaacgccaaggagaucggcaacggcugcuucgaguucuaccacaagugcaacgacgagugcauggaguccgucaagaacggcaccuacgacuaccccaaguacuccgaggaguccaagcucaaccgcgagaagaucgacggcgucaagcucgaguccaugggcgucuaccagauccucgccaucuacuccaccgucgccuccucccucguccuccucgucucccucggcgccaucuccuucuggaugugcuccaacggcucccuccagugccgcaucugcaucuga

SEQ ID NO: 97947 - RNA, 1698 nt, Artificial Sequence; identical to SEQ ID NO: 97946
  derived and/or modified CDS sequence (opt2) from hemagglutinin__InfluenzaA__ABV29667

SEQ ID NO: 97948 - RNA, 1698 nt, Artificial Sequence
  derived and/or modified CDS sequence (opt2) from hemagglutinin__InfluenzaA__ABV29678
augaaggucaagcuccucauccuccucugcaccuucaccgccaccuacgccgacaccaucugcaucggcuaccacgccaacaacuccaccgacaccgucgacaccguccucgagaagaacgucaccgucacccacuccgucaaccuccucgaggacucccacaacggcaagcucugccuccucaagggcaucgccccccuccagcucggcaacugcuccgucgccggcuggauccucggcaaccccgagugcgagcuccucaucuccaaggaguccugguccuacaucgucgagacccccaaccccgagaacggcaccugcuaccccggcuacuucgccgacuacgaggagcuccgcgagcagcucuccuccgucuccuccuucgagcgcuucgagaucuuccccaaggaguccuccuggcccaaccacaccgucaccggcgucuccgccuccugcucccacaacggcaaguccuccuucuaccgcaaccuccucuggcucaccggcaagaacggccucuaccccaaccucuccaaguccuacgccaacaacaaggagaaggagguccucguccucuggggcguccaccacccccccaacaucggcgaccagcgcgcccucuaccacaccgagaacgccuacgucuccgucgucuccucccacuacucccgccgcuucacccccgagaucgccaagcgccccaagguccgcgaccaggagggccgcaucaacuacuacuggacccuccucgagcccggcgacaccaucaucuucgaggccaacggcaaccucaucgccccccgcuucgccuucgcccucucccgcggcuucggcuccggcaucaucaccuccaacgcccccgucgacgagugcgacgccaagugccagaccccccagggcgccaucaacuccucccuccccuuccagaacguccaccccgucaccaucggcgagugccccaaguacguccgcuccaccaagcuccgcauggucaccggccuccgcaacauccccuccauccagucccgcggccucuucggcgccaucgccggcuucaucgagggcggcuggaccggcauggucgacggcugguacggcuaccaccaccagaacgagcagggcuccggcuacgccgccgaccagaaguccacccagaacgccaucaacggcaucaccaacaaggucaacuccgucaucgagaagaugaacacccaguucaccgccgucggcaaggaguucaacaagcucgagcgccgcauggagaaccucaacaagaaggucgacgacggcuuccucgacaucuggaccuacaacgccgagcuccucguccuccucgagaacgagcgcacccucgacuuccacgacuccaacgucaagaaccucuacgagaaggucaagucccagcucaagaacaacgccaaggagaucggcaacggcugcuucgaguucuaccacaagugcaacgacgagugcauggaguccgucaagaacggcaccuacgacuaccccaaguacuccgaggaguccaagcucaaccgcgagaagaucgacggcgucaagcucgaguccaugggcgucuaccagauccucgccaucuacuccaccgucgccuccucccucguccuccucgucucccucggcgccaucuccuucuggaugugcuccaacggcucccuccagugccgcaucugcaucuga

SEQ ID NO: 97949 - RNA, 1698 nt, Artificial Sequence
  derived and/or modified CDS sequence (opt2) from hemagglutinin__InfluenzaA__ABV29689
augaaggucaagcuccucguccuccucugcaccuucaccgccaccuacgccgacaccaucugcaucggcuaccacgccaacaacuccaccgacaccgucgacaccguccucgagaagaacgucaccgucacccacuccgucaaccuccucgaggacucccacaacggcaagcucugccuccucaagggcaucgccccccuccagcucggcaacugcuccgucgccggcuggauccucggcaaccccgagugcgagcuccucaucuccaaggaguccugguccuacaucgucgagacccccaaccccgagaacggcaccugcuaccccggcuacuucgccgacuacgaggagcuccgcgagcagcucuccuccgucuccuccuucgagcgcuucgagaucuuccccaaggaguccuccuggcccaaccacaccgucaccggcgucuccgccuccugcucccacaacggcaaguccuccuucuaccgcaaccuccucuggcucaccggcaagaacggccucuaccccaaccucuccaaguccuacgccaacaacaaggagaaggagguccucguccucuggggcguccaccacccccccaacaucggcgaccagcgcgcccucuaccacaccgagaacgccuacgucuccgucgucuccucccacuacucccgccgcuucacccccgagaucgccaagcgccccaagguccgcgaccaggagggccgcaucaacuacuacuggacccuccucgagcccggcgacaccaucaucuucgaggccaacggcaaccucaucgccccccgcuucgccuucgcccucucccgcggcuucggcuccggcaucaucaccuccaacgcccccauggacgagugcgacgccaagugccagaccccccagggcgccaucaacuccucccuccccuuccagaacguccaccccgucaccaucggcgagugccccaaguacguccgcuccaccaagcuccgcauggucaccggccuccgcaacauccccuccauccagucccgcggccucuucggcgccaucgccggcuucaucgagggcggcuggaucggcauggucgacggcugguacggcuaccaccaccagaacgagcagggcuccggcuacgccgccgaccagaaguccacccagaacgccaucaacggcaucaccaacaaggucaacuccgucaucgagaagaugaacacccaguucaccgccgucggcaaggaguucaacaagcucgagcgccgcauggagaaccucaacaagaaggucgacgacggcuuccucgacaucuggaccuacaacgccgagcuccucguccuccucgagaacgagcgcacccucgacuuccacgacuccaacgucaagaaccucuacgagaaggucaagucccagcucaagaacaacgccaaggagaucggcaacggcugcuucgaguucuaccacaagugcaacgacgagugcauggaguccgucaagaacggcaccuacgacuaccccaaguacuccgaggaguccaagcucaaccgcgagaagaucgacggcgucaagcucgaguccaugggcgucuaccagauccucgccaucuacuccaccgucgccuccucccucguccuccucgucucccucggcgccaucuccuucuggaugugcuccaacggcucccuccagugccgcaucugcaucuga

SEQ ID NO: 97950 - RNA, 1698 nt, Artificial Sequence
  derived and/or modified CDS sequence (opt2) from hemagglutinin__InfluenzaA__ABV29700
augaaggucaagcuccucguccuccucugcaccuucaccgccaccuacgccgacaccaucugcaucggcuaccacgccaacaacuccaccgacaccgucgacaccguccucgagaagaacgucaccgucacccacuccgucaaccuccucgaggacucccacaacggcaagcucugccuccucaagggcaucgccccccuccagcucggcaacugcuccgucgccggcuggauccucggcaaccccgagugcgagcuccucaucuccaaggaguccugguccuacaucgucgagacccccaaccccgagaacggcaccugcuaccccggcuacuucgccgacuacgaggagcuccgcgagcagcucuccuccgucuccuccuucgagcgcuucgagaucuuccccaaggaguccuccuggcccaaccacaccgucaccggcgucuccgccuccugcucccacaacggcaaguccuccuucuaccgcaaccuccucuggcucaccggcaagaacggccucuaccccaaccucuccaaguccuacgccaacaacaaggagaaggagguccucguccucuggggcguccaccacccccccaacaucggcgaccagcgcgcccucuaccacaccgagaacgccuacgucuccgucgucuccucccacuacucccgccgcuucacccccgagaucgccaagcgccccaagguccgcgaccaggagggccgcaucaacuacuacuggacccuccucgagcccggcgacaccaucaucuucgaggccaacggcaaccucaucgccccccgcuucgccuucgcccucucccgcggcuucggcuccggcaucaucaccuccaacgcccccauggacgagugcgacgccaagugccagaccccccagggcgccaucaacuccucccuccccuuccagaacguccaccccgucaccaucggcgagugccccaaguacguccgcuccaccaagcuccgcauggucaccggccuccgcaacauccccuccauccagucccgcggccucuucggcgccaucgccggcuucaucgagggcggcuggaccggcauggucgacggcugguacggcuaccaccaccagaacgagcagggcuccggcuacgccgccgaccagaaguccacccagaacgccaucaacggcaucaccaacaaggucaacuccgucaucgagaagaugaacacccaguucaccgccgucggcaaggaguucaacaagcucgagcgccgcauggagaaccucaacaagaaggucgacgacggcuuccucgacaucuggaccuacaacgccgagcuccucguccuccucgagaacgagcgcacccucgacuuccacgacuccaacgucaagaaccucuacgagaaggucaagucccagcucaagaacaacgccaaggagaucggcaacggcugcuucgaguucuaccacaagugcaacgacgagugcauggaguccgucaagaacggcaccuacgacuaccccaaguacuccgaggaguccaagcucaaccgcgagaagaucgacggcgucaagcucgaguccaugggcgucuaccagauccucgccaucuacuccaccgucgccuccucccucguccuccucgucucccucggcgccaucuccuucuggaugugcuccaacggcucccuccagugccgcaucugcaucuga

SEQ ID NO: 97951 - RNA, 1701 nt, Artificial Sequence
  derived and/or modified CDS sequence (opt2) from hemagglutinin__InfluenzaA__ABV29711
augaagaccaucaucgcccucuccuacauccucugccucgucuucgcccagaagcuccccggcaacgacaacuccaccgccacccucugccucggccaccacgccguccccaacggcaccaucgucaagaccaucaccaacgaccagaucgaggucaccaacgccaccgagcucguccaguccuccuccaccggcgagaucugcgacuccccccaccagauccucgacggcgagaacugcacccucaucgacgcccuccucggcgacccccagugcgacggcuuccagaacaagaagugggaccucuucgucgagcgcuccaaggccuacuccaacugcuaccccuacgacguccccgacuacgccucccuccgcucccucgucgccuccuccggcacccucgaguucaacaacgaguccuucaacuggaccggcgucacccagaacggcaccuccuccgccugcauccgccgcuccaacaacuccuucuucucccgccucaacuggcucacccaccucaaguucaaguaccccgcccucaacgucaccaugcccaacaacgagaaguucgacaagcucuacaucuggggcguccaccaccccggcaccgacaacgaccagaucuuccucuacgcccaggccuccggccgcaucaccgucuccaccaagcgcucccagcagaccgucauccccaacaucggcucccgcccccgcguccgcaacauccccucccgcaucuccaucuacuggaccaucgucaagcccggcgacauccuccucaucaacuccaccggcaaccucaucgccccccgcggcuacuucaagauccaguccggcaaguccuccaucaugcgcuccgacgcccccaucggcaagugcaacuccgagugcaucacccccaacggcuccauccccaacgacaagcccuuccagaacgucaaccgcaucaccuacggcgccugcccccgcuacgucaagcagaacacccucaagcucgccaccggcaugcgcaacguccccgagaagcagacccgcggcaucuucggcgccaucgccggcuucaucgagaacggcugggagggcauggucgacggcugguacggcuuccgccaccagaacuccgagggcaucggccaggccgccgaccucaaguccacccaggccgccaucgaccagaucaacggcaagcucaaccgccucaucggcaagaccaacgagaaguuccaccagaucgagaaggaguucuccgaggucgagggccgcauccaggaccucgagaaguacgucgaggacaccaagaucgaccucugguccuacaacgccgagcuccucgucgcccucgagaaccagcacaccaucgaccucaccgacuccgagaugaacaagcucuucgagaagaccaagaagcagcuccgcgagaacgccgaggacaugggcaacggcugcuucaagaucuaccacaagugcgacaacgccugcaucggcuccauccgcaacggcaccuacgaccacgacgucuaccgcgacgaggcccucaacaaccgcuuccagaucaagggcgucgagcucaaguccggcuacaaggacuggauccucuggaucuccuucgccaucuccugcuuccuccucugcgucgcccuccucggcuucaucaugugggccugccagaagggcaacauccgcugcaacaucugcaucuga

SEQ ID NO: 97952 - RNA, 1701 nt, Artificial Sequence
  derived and/or modified CDS sequence (opt2) from hemagglutinin__InfluenzaA__ABV29722
augaagaccaucaucgcccucuccuacauccucugccucgucuucgcccagaagcuccccggcaacgacaacuccaccgccacccucugccucggccaccacgccguccccaacggcaccaucgucaagaccaucaccaacgaccagaucgaggucaccaacgccaccgagcucguccaguccuccuccaccggcgagaucugcgacuccccccaccagauccucgacggcgagaacugcacccucaucgacgcccuccucggcgacccccagugcgacggcuuccagaacaagaagugggaccucuucgucgagcgcuccaaggccuacuccaacugcuaccccuacgacguccccgacuacgccucccuccgcucccucgucgccuccuccggcacccucgaguucaacaacgaguccuucaacuggaccggcgucacccagaacggcaccuccuccgccugcauccgccgcuccaacaacuccuucuucucccgccucaacuggcucacccaccucaaguucaaguaccccgcccucaacgucaccaugcccaacaacgagaaguucgacaagcucuacaucuggggcguccaccaccccggcaccgacaacgaccagaucuuccucuacgcccaggccuccggccgcaucaccgucuccaccaagcgcucccagcagaccgucauccccaacaucggcucccgcccccgcguccgcaacauccccucccgcaucuccaucuacuggaccaucgucaagcccggcgacauccuccucaucaacuccaccggcaaccucaucgccccccgcggcuacuucaagauccgcuccggcaaguccuccaucaugcgcuccgacgcccccaucggcaagugcaacuccgagugcaucacccccaacggcuccauccccaacgacaagcccuuccagaacgucaaccgcaucaccuacggcgccugcccccgcuacgucaagcagaacacccucaagcucgccaccggcaugcgcaacguccccgagaagcagacccgcggcaucuucggcgccaucgccggcuucaucgagaacggcugggagggcauggucgacggcugguacggcuuccgccaccagaacuccgagggcaucggccaggccgccgaccucaaguccacccaggccgccaucgaccagaucaacggcaagcucaaccgccucaucggcaagaccaacgagaaguuccaccagaucgagaaggaguuccucgaggucgagggccgcauccaggaccucgagaaguacgucgaggacaccaagaucgaccucugguccuacaacgccgagcuccucgucgcccucgagaaccagcacaccaucgaccucaccgacuccgagaugaacaagcucuucgagaagaccaagaagcagcuccgcgagaacgccgaggacaugggcaacggcugcuucaagaucuaccacaagugcgacaacgccugcaucggcuccauccgcaacggcaccuacgaccacgacgucuaccgcgacgaggcccucaacaaccgcuuccagaucaagggcgucgagcucaaguccggcuacaaggacuggauccucuggaucuccuucgccaucuccugcuuccuccucugcgucgcccuccucggcuucaucaugugggccugccagaagggcaacauccgcugcaacaucugcaucuga

SEQ ID NO: 97953 - RNA, 1698 nt, Artificial Sequence
  derived and/or modified CDS sequence (opt2) from hemagglutinin__InfluenzaA__ABV29733
augaaggucaagcuccucguccuccucugcaccuucaccgccaccuacgccgacaccaucugcaucggcuaccacgccaacaacuccaccgacaccgucgacaccguccucgagaagaacgucaccgucacccacuccgucaaccuccucgaggacucccacaacggcaagcucugccuccucaagggcaucgccccccuccagcucggcaacugcuccgucgccggcuggauccucggcaaccccgagugcgagcuccucaucuccaaggaguccugguccuacaucgucgagacccccaaccccgagaacggcaccugcuaccccggcuacuucgccgacuacgaggagcuccgcgagcagcucuccuccgucuccuccuucgagcgcuucgagaucuuccccaaggaguccuccuggcccaaccacaccgucaccggcgucuccgccuccugcucccacaacggcgaguccuccuucuaccgcaaccuccucuggcucaccggcaagaacggccucuaccccaaccucuccaaguccuacgccaacaacaaggagaaggagguccucguccucuggggcguccaccacccccccaacaucggcgaccagcgcgcccucuaccacaccgagaacgccuacgucuccgucgucuccucccacuacucccgccgcuucacccccgagaucgccaagcgccccaagguccgcgaccaggagggccgcaucaacuacuacuggacccuccucgagcccggcgacaccaucaucuucgaggccaacggcaaccucaucgccccccgcuucgccuucgcccucucccgcggcuucggcuccggcaucaucaccuccaacgcccccauggacaagugcgacgccaagugccagaccccccagggcgccaucaacuccucccuccccuuccagaacguccaccccgucaccaucggcgagugccccaaguacguccgcuccaccaagcuccgcauggucaccggccuccgcaacauccccuccauccagucccgcggccucuucggcgccaucgccggcuucaucgagggcggcuggaccggcauggucgacggcugguacggcuaccaccaccagaacgagcagggcuccggcuacgccgccgaccagaaguccacccagaacgccaucaacggcaucaccaacaaggucaacuccgucaucgagaagaugaacacccaguucaccgccgucggcaaggaguucaacaagcucgagcgccgcauggagaaccucaacaagaaggucgacgacggcuuccucgacaucuggaccuacaacgccgagcuccucguccuccucgagaacgagcgcacccucgacuuccacgacuccaacgucaagaaccucuacgagaaggucaagucccagcucaagaacaacgccaaggagaucggcaacggcugcuucgaguucuaccacaagugcgacgacgagugcauggaguccgucaagaacggcaccuacgacuaccccaaguacuccgaggaguccaagcucaaccgcgagaagaucgacggcgucaagcucgaguccaugggcgucuaccagauccucgccaucuacuccaccgucgccuccucccucguccuccucgucucccucggcgccaucuccuucuggaugugcuccaacggcucccuccagugccgcaucugcaucuga

SEQ ID NO: 97954 - RNA, 1698 nt, Artificial Sequence; identical to SEQ ID NO: 97946
  derived and/or modified CDS sequence (opt2) from hemagglutinin__InfluenzaA__ABV29744

SEQ ID NO: 97955 - RNA, 1698 nt, Artificial Sequence
  derived and/or modified CDS sequence (opt2) from hemagglutinin__InfluenzaA__ABV29755
augaaggucaagcuccucguccuccucugcaccuucaccgccaccuacgccgacaccaucugcaucggcuaccacgccaacaacuccaccgacaccgucgacaccguccucgagaagaacgucaccgucacccacuccgucaaccuccucgaggacucccacaacggcaagcucugccuccucaagggcaucgccccccuccagcucggcaacugcuccgucgccggcuggauccucggcaaccccgagugcgagcuccucaucuccaaggaguccugguccuacaucgucgagacccccucccccgagaacggcaccugcuaccccggcuacuucgccgacuacgaggagcuccgcgagcagcucuccuccgucuccuccuucgagcgcuucgagaucuuccccaaggaguccuccuggcccaaccacaccgucaccggcgucuccgccuccugcucccacaacggcaaguccuccuucuaccgcaaccuccucuggcucaccggcaagaacggccucuaccccaaccucuccaaguccuacgccaacaacaaggagaaggagguccucguccucuggggcguccaccacccccccaacaucggcgaccagcgcgcccucuaccacaccgagaacgccuacgucuccgucgucuccucccacuacucccgccgcuucacccccgagaucgccaagcgccccaagguccgcgaccaggagggccgcaucaacuacuacuggacccuccucgagcccggcgacaccaucaucuucgaggccaacggcaaccucaucgccccccgcuucgccuucgcccucucccgcggcuucggcuccggcaucaucaccuccaacgcccccaugggcaagugcgacgccaagugccagaccccccagggcgccaucaacuccucccuccccuuccagaacguccaccccgucaccaucggcgagugccccaaguacguccgcuccgccaagcuccgcauggucaccggccuccgcaacauccccuccauccagucccgcggccucuucggcgccaucgccggcuucaucgagggcggcuggaccggcauggucgacggcugguacggcuaccaccaccagaacgagcagggcuccggcuacgccgccgaccagaaguccacccagaacgccaucaacggcaucaccaacaaggucaacuccgucaucgagaagaugaacacccaguucaccgccgucggcaaggaguucaacaagcucgagcgccgcauggagaaccucaacaagaaggucgacgacggcuuccucgacaucuggaccuacaacgccgagcuccucguccuccucgagaacgagcgcacccucgacuuccacgacuccaacgucaagaaccucuacgagaaggucaagucccagcucaagaacaacgccaaggagaucggcaacggcugcuucgaguucuaccacaagugcaacgacgagugcauggaguccgucaagaacggcaccuacgacuaccccaaguacuccgaggaguccaagcucaaccgcgagaagaucgacggcgucaagcucgaguccaugggcgucuaccagauccucgccaucuacuccaccgucgccuccucccucguccuccucgucucccucggcgccaucuccuucuggaugugcuccaacggcucccuccagugccgcaucugcaucuga

SEQ ID NO: 97956 - RNA, 1698 nt, Artificial Sequence; identical to SEQ ID NO: 97946
  derived and/or modified CDS sequence (opt2) from hemagglutinin__InfluenzaA__ABV29766

SEQ ID NO: 97957 - RNA, 1698 nt, Artificial Sequence
  derived and/or modified CDS sequence (opt2) from hemagglutinin__InfluenzaA__ABV29777
augaaggucaagcuccucguccuccucugcaccuucaccgccaccuacgccgacaccaucugcaucggcuaccacgccaacaacuccaccgacaccgucgacaccguccucgagaagaacgucaccgucacccacuccgucaaccuccucgaggacucccacaacggcaagcucugccuccucaagggcaucgccccccuccagcucggcaacugcuccgucgccggcuggauccucggcaaccccgagugcgagcuccucaucuccaaggaguccugguccuacaucgucgagacccccaaccccgagaacggcaccugcuaccccggcuacuucgccgacuacgaggagcuccgcgagcagcucuccuccgucuccuccuucgagcgcuucgagaucuuccccaaggaguccuccuggcccaaccacaccgucaccggcgucuccgccuccugcucccacaacggcgaguccuccuucuaccgcaaccuccucuggcucaccggcaagaacggccucuaccccaaccucuccaaguccuacgccaacaacaaggagaaggagguccucguccucuggggcguccaccacccccccaacaucggcgaccagcgcgcccucuaccacaccgagaacgccuacgucuccgucgucuccucccacuacucccgccgcuucacccccgagaucgccaagcgccccaagguccgcgaccaggagggccgcaucaacuacuacuggacccuccucgagcccggcgacaccaucaucuucgaggccaacggcaaccucaucgccccccgcuucgccuucgcccucucccgcggcuucggcuccggcaucaucaccuccaacgcccccauggacaagugcgacgccaagugccagaccccccagggcgccaucaacuccucccuccccuuccagaacguccaccccgucaccaucggcgagugccccaaguacguccgcuccaccaagcuccgcauggucaccggccuccgcaacauccccuccauccagucccgcggccucuucggcgccaucgccggcuucaucgagggcggcuggaccggcauggucgacggcugguacggcuaccaccaccagaacgagcagggcuccggcuacgccgccgaccagaaguccacccagaacgccaucaacggcaucaccaacaaggucaacuccgucaucgagaagaugaacacccaguucaccgccgucggcaaggaguucaacaagcucgagcgccgcauggagaaccucaacaagaaggucgacgacggcuuccucgacaucuggaccuacaacgccgagcuccucguccuccucgagaacgagcgcacccucgacuuccacgacuccaacgucaagaaccucuacgagaaggucaagucccagcucaagaacaacgccaaggagaucggcaacggcugcuucgaguucuaccacaagugcaacgacgagugcauggaguccgucaagaacggcaccuacgacuaccccaaguacuccgaggaguccaagcucaaccgcgagaagaucgacggcgucaagcucgaguccaugggcgucuaccagauccucgccaucuacuccaccgucgccuccucccucguccuccucgucucccucggcgccaucuccuucuggaugugcuccaacggcucccuccagugccgcaucugcaucuga

SEQ ID NO: 97958 - RNA, 1698 nt, Artificial Sequence; identical to SEQ ID NO: 97946
  derived and/or modified CDS sequence (opt2) from hemagglutinin__InfluenzaA__ABV29788

SEQ ID NO: 97959 - RNA, 1698 nt, Artificial Sequence; identical to SEQ ID NO: 97950
  derived and/or modified CDS sequence (opt2) from hemagglutinin__InfluenzaA__ABV29799

SEQ ID NO: 97960 - RNA, 1701 nt, Artificial Sequence
  derived and/or modified CDS sequence (opt2) from hemagglutinin__InfluenzaA__ABV29821
augaagaccaucaucgcccucuccuacauccucugccucgucuucgcccagaagcuccccggcaacgacaacuccaccgccacccucugccucggccaccacgccguccccaacggcaccaucgucaagaccaucaccaacgaccagaucgaggucaccaacgccaccgagcucguccaguccuccuccaccggcgagaucugcgacuccccccaccagauccucgacggcgagaacugcacccucaucgacgcccuccucggcgacccccagugcgacggcuuccagaacaagaagugggaccucuucgucgagcgcuccaaggccuacuccaacugcuaccccuacgacguccccgacuacgccucccuccgcucccucgucgccuccuccggcacccucgaguucaacaacgaguccuucaacuggaccggcgucacccagaacggcaccuccuccgccugcauccgccgcuccaacaacuccuucuucucccgccucaacuggcucacccaccucaaguucaaguaccccgcccucaacgucaccaugcccaacaacgagaaguucgacaagcucuacaucuggggcguccaccaccccggcaccgacaacgaccaggucuuccucuacgcccaggccuccggccgcaucaccgucuccaccaagcgcucccagcagaccgucauccccaacaucggcucccgcccccgcguccgcaacauccccucccgcaucuccaucuacuggaccaucgucaagcccggcgacauccuccucaucaacuccaccggcaaccucaucgccccccgcggcuacuucaagauccgcuccggcaaguccuccaucaugcgcuccgacgcccccaucggcaagugcaacuccgagugcaucacccccaacggcuccauccccaacgacaagcccuuccagaacgucaaccgcaucaccuacggcgccugcccccgcuacgucaagcagaacacccucaagcucgccaccggcaugcgcaacguccccgagaagcagacccgcggcaucuucggcgccaucgccggcuucaucgagaacggcugggagggcauggucgacggcugguacggcuuccgccaccagaacuccgagggcaucggccaggccgccgaccucaaguccacccaggccgccaucgaccagaucaacggcaagcucaaccgccucaucggcaagaccaacgagaaguuccaccagaucgagaaggaguucuccgaggucgagggccgcauccaggaccucgagaaguacgucgaggacaccaagaucgaccucugguccuacaacgccgagcuccucgucgcccucgagaaccagcacaccaucgaccucaccgacuccgagaugaacaagcucuucgagaagaccaagaagcagcuccgcgagaacgccgaggacaugggcaacggcugcuucaagaucuaccacaagugcgacaacgccugcaucggcuccauccgcaacggcaccuacgaccacgacgucuaccgcgacgaggcccucaacaaccgcuuccagaucaagggcgucgagcucaaguccggcuacaaggacuggauccucuggaucuccuucgccaucuccugcuuccuccucugcgucgcccuccucggcuucaucaugugggccugccagaagggcaacaucaagugcaacaucugcaucuga

SEQ ID NO: 97961 - RNA, 1698 nt, Artificial Sequence; identical to SEQ ID NO: 97950
  derived and/or modified CDS sequence (opt2) from hemagglutinin__InfluenzaA__ABV29832

SEQ ID NO: 97962 - RNA, 1698 nt, Artificial Sequence; identical to SEQ ID NO: 97946
  derived and/or modified CDS sequence (opt2) from hemagglutinin__InfluenzaA__ABV29865

SEQ ID NO: 97963 - RNA, 1698 nt, Artificial Sequence; identical to SEQ ID NO: 97946
  derived and/or modified CDS sequence (opt2) from hemagglutinin__InfluenzaA__ABV29876

SEQ ID NO: 97964 - RNA, 1701 nt, Artificial Sequence
  derived and/or modified CDS sequence (opt2) from hemagglutinin__InfluenzaA__ABV29898
augaagaccaucaucgcccucuccuacauccucugccucgucuucgcccagaagcuccccggcaacgacaacuccaccgccacccucugccucggccaccacgccguccccaacggcaccaucgucaagaccaucaccaacgaccagaucgaggucaccaacgccaccgagcucguccaguccuccuccaccggcgagaucugcgacuccccccaccagauccucgacggcgagaacugcacccucaucgacgcccuccucggcgacccccagugcgacggcuuccagaacaagaagugggaccucuucgucgagcgcuccaaggccuacuccaacugcuaccccuacgacguccccgacuacgccucccuccgcucccucgucgccuccuccggcacccucgaguucaacaacgaguccuucaacuggaccggcgucacccagaacggcaccuccuccgccugcauccgccgcuccaacaacuccuucuucucccgccucaacuggcucacccaccucaaguucaaguaccccgcccucaacgucaccaugcccaacaacgagaaguucgacaagcucuacaucuggggcguccaccaccccggcaccgacaacgaccagaucuuccucuacgcccaggccuccggccgcaucaccgucuccaccaagcgcucccagcagaccgucauccccaacaucggcucccgcccccgcguccgcaacauccccucccgcaucuccaucuacuggaccaucgucaagcccggcgacauccuccucaucaacuccaccggcaaccucaucgccccccgcggcuacuucaagauccgcuccggcaaguccuccaucaugcgcuccgacgcccccaucggcaagugcaacuccgagugcaucacccccaacggcuccauccccaacgacaagcccuuccagaacgucaaccgcaucaccuacggcgccugcccccgcuacgucaagcagaacacccucaagcucgccaccggcaugcgcaacguccccgagaagcagacccgcggcaucuucggcgccaucgccggcuucaucgagaacggcugggagggcauggucgacggcugguacggcuuccgccaccagaacuccgagggcaucggccaggccgccgaccucaaguccacccaggccgccaucgaccagaucaacggcaagcucaaccgccucaucggcaagaccaacgagaaguuccaccagaucgagaaggaguucuccgaggucgagggccgcauccaggaccucgagaaguacgucgaggacaccaagaucgaccucugguccuacaacgccgagcuccucgucgcccucgagaaccagcacaccaucgaccucaccgacuccgagaugaacaagcucuucgagaagaccaagaagcagcuccgcgagaacgccgaggacaugggcaacggcugcuucaagaucuaccacaagugcgacaacgccugcaucggcuccauccgcaacggcaccuacgaccacgacgucuaccgcgacgaggcccucaacaaccgcuuccagaucaagggcgucgagcucaaguccggcuacaaggacuggauccucuggaucuccuucgccaucuccugcuuccuccucugcgucgcccuccucggcuucaucaugugggccugccagaagggcaacauccgcugcaacaucugcaucuga

SEQ ID NO: 97965 - RNA, 1701 nt, Artificial Sequence
  derived and/or modified CDS sequence (opt2) from hemagglutinin__InfluenzaA__ABV29909
augaagaccaucaucgcccucuccuacauccucugccucgucuucgcccagaagcuccccggcaacgacaacuccaccgccacccucugccucggccaccacgccguccccaacggcaccaucgucaagaccaucaccuccgaccagaucgaggucaccaacgccaccgagcucguccagaacuccuccaucggcggcaucugcaacuccccccaccagauccucgacggcgagaacugcacccucaucgacgcccuccucggcgacccccagugcgacggcuuccagaacaagaagugggaccucuucgucgagcgcuccaaggccuacuccaacugcuaccccuacgacguccccgacuacgccucccuccgcucccucaucgccuccuccggcacccucgaguucaacaacgaguccuucaacuggaccggcgucacccagaacggcaccuccuccgccugcaagcgccgcuccaacaacuccuucuucucccgccucaacuggcucacccaccucaaguucaaguaccccgcccucaacgucaccaugcccaacaacgaggaguucgacaagcucuacaucuggggcguccaccaccccggcaccgacaacgaccagaucucccucuacgcccaggcccccggccgcaucaccgucuccaccaagcgcucccagcagaccgucauccccaacaucggcucccgcccccgcguccgcgacauccccucccgcaucuccaucuacuggaccaucgucaagcccggcgacauccuccucaucaacuccaccggcaaccucaucgccccccgcggcuacuucaagauccgcuccggcaaguccuccaucaugcgcuccgacgcccccaucgacaagugcaacuccgagugcaucacccccaacggcuccauccccaacgacaagcccuuccagaacgucaaccgcaucaccuacggcgccugcccccgcuacgucaagcagaacacccucaagcucgccaccggcaugcgcaacguccccgagaagcagacccgcggcaucuucggcgccaucgccggcuucaucgagaacggcugggagggcauggucgacggcugguacggcuuccgccaccagaacuccgagggcaucggccaggccgccgaccucaaguccacccaggccgccaucgaccagaucaacggcaagcucaaccgccucaucggcaagaccaacgagaaguuccaccagaucgagaaggaguucuccgaggucgagggccgcauccaggaccucgagaaguacgucgaggacaccaagaucgaccucugguccuacaacgccgagcuccucgucgcccucgagaaccagcacaccaucgaccucaccgacuccgagaugaacaagcucuucgagcgcaccaagaagcagcuccgcgagaacgccgaggacaugggcaacggcugcuucaagaucuaccacaagugcgacaacgccugcaucggcuccauccgcaacggcaccuacgaccacgacgucuaccgcgacgaggcccucaacaaccgcuuccagaucaagggcgucgagcucaaguccggcuacaaggacuggauccucuggaucuccuucgccaucuccugcuuccuccucugcgucgcccuccucggcuucaucaugugggccugccagaagggcaacauccgcugcaacaucugcaucuga

SEQ ID NO: 97966 - RNA, 1698 nt, Artificial Sequence
  derived and/or modified CDS sequence (opt2) from hemagglutinin__InfluenzaA__ABV29920
augaaggucaagcuccucguccuccucugcaccuucaccgccaccuacgccgacaccaucugcaucggcuaccacgccaacaacuccaccgacaccgucgacaccguccucgagaagaacgucaccgucacccacuccgucaaccuccucgaggacucccacaacggcaagcucugccuccucaagggcaucgccccccuccagcucggcaacugcuccgucgccggcuggauccucggcaaccccgagugcgagcuccucaucuccaaggaguccugguccuacaucgucgagacccccaaccccgagaacggcaccugcuaccccggcuacuucgccgacuacgaggagcuccgcgagcagcucuccuccgucuccuccuucgagcgcuucgagaucuuccccaaggaguccuccuggcccaaccacaccgucaccggcgucuccgccuccugcucccacaacggcaaguccuccuucuaccgcaaccuccucuggcucaccggcaagaacggccucuaccccaaccucuccaaguccuacgccaacaacaaggagaaggagguccucguccucuggggcguccaccacccccccaacaucggcgaccagcgcgcccucuaccacaccgagaacgccuacgucuccgucgucuccucccacuacucccgccgcuucacccccgagaucgccaagcgccccaagguccgcgaccaggagggccgcaucaacuacuacuggacccuccucgagcccggcgacaccaucaucuucgaggccaacggcaaccucaucgccccccgcuucgccuucgcccucucccgcggcuucggcuccggcaucaucaccuccaacgcccccaugggcgagugcgacgccaagugccagaccccccagggcgccaucaacuccucccuccccuuccagaacguccaccccgucaccaucggcgagugccccaaguacguccgcuccgccaagcuccgcauggucaccggccuccgcaacauccccuccauccagucccgcggccucuucggcgccaucgccggcuucaucgagggcggcuggaccggcauggucgacggcugguacggcuaccaccaccagaacgagcagggcuccggcuacgccgccgaccagaaguccacccagaacgccaucaacggcaucaccaacaaggucaacuccgucaucgagaagaugaacacccaguucaccgccgucggcaaggaguucaacaagcucgagcgccgcauggagaaccucaacaagaaggucgacgacggcuuccucgacaucuggaccuacaacgccgagcuccucguccuccucgagaacgagcgcacccucgacuuccacgacuccaacgucaagaaccucuacgagaaggucaagucccagcucaagaacaacgccaaggagaucggcaacggcugcuucgaguucuaccacaagugcaacgacgagugcauggaguccgucaagaacggcaccuacgacuaccccaaguacuccgaggaguccaagcucaaccgcgagaagaucgacggcgucaagcucgaguccaugggcgucuaccagauccucgccaucuacuccaccgucgccuccucccucguccuccucgucucccucggcgccaucuccuucuggaugugcuccaacggcucccuccagugccgcaucugcaucuga

SEQ ID NO: 97967 - RNA, 1698 nt, Artificial Sequence; identical to SEQ ID NO: 97957
  derived and/or modified CDS sequence (opt2) from hemagglutinin__InfluenzaA__ABV29942

SEQ ID NO: 97968 - RNA, 1698 nt, Artificial Sequence; identical to SEQ ID NO: 97950
  derived and/or modified CDS sequence (opt2) from hemagglutinin__InfluenzaA__ABV29953

SEQ ID NO: 97969 - RNA, 1698 nt, Artificial Sequence; identical to SEQ ID NO: 97950
  derived and/or modified CDS sequence (opt2) from hemagglutinin__InfluenzaA__ABV29964

SEQ ID NO: 97970 - RNA, 1698 nt, Artificial Sequence; identical to SEQ ID NO: 97946
  derived and/or modified CDS sequence (opt2) from hemagglutinin__InfluenzaA__ABV29986

SEQ ID NO: 97971 - RNA, 1698 nt, Artificial Sequence; identical to SEQ ID NO: 97950
  derived and/or modified CDS sequence (opt2) from hemagglutinin__InfluenzaA__ABV29997

SEQ ID NO: 97972 - RNA, 1698 nt, Artificial Sequence; identical to SEQ ID NO: 97946
  derived and/or modified CDS sequence (opt2) from hemagglutinin__InfluenzaA__ABV30008

SEQ ID NO: 97973 - RNA, 1698 nt, Artificial Sequence; identical to SEQ ID NO: 97950
  derived and/or modified CDS sequence (opt2) from hemagglutinin__InfluenzaA__ABV30019

SEQ ID NO: 97974 - RNA, 1698 nt, Artificial Sequence; identical to SEQ ID NO: 97950
  derived and/or modified CDS sequence (opt2) from hemagglutinin__InfluenzaA__ABV30030

SEQ ID NO: 97975 - RNA, 1698 nt, Artificial Sequence
  derived and/or modified CDS sequence (opt2) from hemagglutinin__InfluenzaA__ABV30041
augaaggucaagcuccucguccuccucugcaccuucaccgccaccuacgccgacaccaucugcaucggcuaccacgccaacaacuccaccgacaccgucgacaccguccucgagaagaacgucaccgucacccacuccgucaaccuccucgaggacucccacaacggcaagcucugccuccucaagggcaccgccccccuccagcucggcaacugcuccgucgccggcuggauccucggcaaccccgagugcgagcuccucaucuccaaggaguccugguccuacaucgucgagacccccaaccccgagaacggcaccugcuaccccggcuacuucgccgacuacgaggagcuccgcgagcagcucuccuccgucuccuccuucgagcgcuucgagaucuuccccaaggaguccuccuggcccaaccacaccgucaccggcgucuccgccuccugcucccacaacggcaaguccuccuucuaccgcaaccuccucuggcucaccggcaagaacggccucuaccccaaccucuccaaguccuacgccaacaacaaggagaaggagguccucguccucuggggcguccaccacccccccaacaucggcgaccagcgcgcccucuaccacaccgagaacgccuacgucuccgucgucuccucccacuacucccgccgcuucacccccgagaucgccaagcgccccaagguccgcgaccaggagggccgcaucaacuacuacuggacccuccucgagcccggcgacaccaucaucuucgaggccaacggcaaccucaucgccccccgcuucgccuucgcccucucccgcggcuucggcuccggcaucaucaccuccaacgcccccaugggcgagugcgacgccaagugccagaccccccagggcgccaucaacuccucccuccccuuccagaacguccaccccgucaccaucggcgagugccccaaguacguccgcuccgccaagcuccgcauggucaccggccuccgcaacauccccuccauccagucccgcggccucuucggcgccaucgccggcuucaucgagggcggcuggaccggcauggucgacggcugguacggcuaccaccaccagaacgagcagggcuccggcuacgccgccgaccagaaguccacccagaacgccaucaacggcaucaccaacaaggucaacuccgucaucgagaagaugaacacccaguucaccgccgucggcaaggaguucaacaagcucgagcgccgcauggagaaccucaacaagaaggucgacgacggcuuccucgacaucuggaccuacaacgccgagcuccucguccuccucgagaacgagcgcacccucgacuuccacgacuccaacgucaagaaccucuacgagaaggucaagaaccagcucaagaacaacgccaaggagaucggcaacggcugcuucgaguucuaccacaagugcaacgacgagugcauggaguccgucaagaacggcaccuacgacuaccccaaguacuccgaggaguccaagcucaaccgcgagaagaucgacggcgucaagcucgaguccaugggcgucuaccagauccucgccaucuacuccaccgucgccuccucccucguccuccucaucucccucggcgccaucuccuucuggaugugcuccaacggcucccuccagugccgcaucugcaucuga

SEQ ID NO: 97976 - RNA, 1701 nt, Artificial Sequence; identical to SEQ ID NO: 97964
  derived and/or modified CDS sequence (opt2) from hemagglutinin__InfluenzaA__ABV30063

SEQ ID NO: 97977 - RNA, 1701 nt, Artificial Sequence; identical to SEQ ID NO: 97964
  derived and/or modified CDS sequence (opt2) from hemagglutinin__InfluenzaA__ABV30074

SEQ ID NO: 97978 - RNA, 1698 nt, Artificial Sequence; identical to SEQ ID NO: 97950
  derived and/or modified CDS sequence (opt2) from hemagglutinin__InfluenzaA__ABV30085

SEQ ID NO: 97979 - RNA, 1698 nt, Artificial Sequence; identical to SEQ ID NO: 97950
  derived and/or modified CDS sequence (opt2) from hemagglutinin__InfluenzaA__ABV30096

SEQ ID NO: 97980 - RNA, 1698 nt, Artificial Sequence; identical to SEQ ID NO: 97946
  derived and/or modified CDS sequence (opt2) from hemagglutinin__InfluenzaA__ABV30107

SEQ ID NO: 97981 - RNA, 1698 nt, Artificial Sequence
  derived and/or modified CDS sequence (opt2) from hemagglutinin__InfluenzaA__ABV30129
augaaggucaagcuccucguccuccucugcaccuucaccgccaccuacgccgacaccaucugcaucggcuaccacgccaacaacuccaccgacaccgucgacaccguccucgagaagaacgucaccgucacccacuccgucaaccuccucgaggacucccacaacggcaagcucugccuccucaagggcaucgccccccuccagcucggcaacugcuccgucgccggcuggauccucggcaaccccgagugcgagcuccucaucuccaaggaguccugguccuacaucgucgagacccccaaccccgagaacggcaccugcuaccccggcaacuucgccgacuacgaggagcuccgcgagcagcucuccuccgucuccuccuucgagcgcuucgagaucuuccccaaggaguccuccuggcccaaccacaccgucaccggcgucuccgccuccugcucccacaacggcaaguccuccuucuaccgcaaccuccucuggcucaccggcaagaacggccucuaccccaaccucuccaaguccuacgccaacaacaaggagaaggagguccucguccucuggggcguccaccacccccccaacaucggcgaccagcgcgcccucuaccacaccgagaacgccuacgucuccgucgucuccucccacuacucccgccgcuucacccccgagaucgccaagcgccccaagguccgcgaccaggagggccgcaucaacuacuacuggacccuccucgagcccggcgacaccaucaucuucgaggccaacggcaaccucaucgccccccgcuucgccuucgcccucucccgcggcuucggcuccggcaucaucaccuccaacgcccccauggacgagugcgacgccaagugccagaccccccagggcgccaucaacuccucccuccccuuccagaacguccaccccgucaccaucggcgagugccccaaguacguccgcuccgccaagcuccgcauggucaccggccuccgcaacauccccuccauccagucccgcggccucuucggcgccaucgccggcuucaucgagggcggcuggaccggcauggucgacggcugguacggcuaccaccaccagaacgagcagggcuccggcuacgccgccgaccagaaguccacccagaacgccaucaacggcaucaccaacaaggucaacuccgucaucgagaagaugaacacccaguucaccgccgucggcaaggaguucaacaagcucgagcgccgcauggagaaccucaacaagaaggucgacgacggcuuccucgacaucuggaccuacaacgccgagcuccucguccuccucgagaacgagcgcacccucgacuuccacgacuccaacgucaagaaccucuacgagaaggucaagucccagcucaagaacaacgccaaggagaucggcaacggcugcuucgaguucuaccacaagugcaacgacgagugcauggaguccgucaagaacggcaccuacgacuaccccaaguacuccgaggaguccaagcucaaccgcgagaagaucgacggcgucaagcucgaguccaugggcgucuaccagauccucgccaucuacuccaccgucgccuccucccucguccuccucgucucccucggcgccaucuccuucuggaugugcuccaacggcucccuccagugccgcaucugcaucuga

SEQ ID NO: 97982 - RNA, 1698 nt, Artificial Sequence
  derived and/or modified CDS sequence (opt2) from hemagglutinin__InfluenzaA__ABV30140
augaaggucaagcuccucguccuccucugcaccuucaccgccaccuacgccgacaccaucugcaucggcuaccacgccaacaacuccaccgacaccgucgacaccguccucgagaagaacgucaccgucacccacuccgucaaccuccucgaggaccgccacaacggcaagcucugccuccucaagggcaucgccccccucaagcucggcaacugcuccgucgccggcuggauccucggcaaccccgagugcgagcuccucaucuccaaggaguccugguccuacaucgucgagacccccaaccccgagaacggcaccugcuaccccggcuacuucgccgacuacgaggagcuccgcgagcagcucuccuccgucuccuccuucgagcgcuucgagaucuuccccaaggaguccuccuggcccaaccacaccgucaccggcgucuccgccuccugcucccacaacggcaaguccuccuucuaccgcaaccuccucuggcucaccggcaagaacggccucuaccccaaccucucccgcuccuacgccaacaacaaggagaaggagguccucguccucuggggcguccaccacccccccaacaucggcgaccagcgcgcccucuaccacaccgagaacgccuacgucuccgucgucuccucccacuacucccgccgcuucacccccgagaucgccaagcgccccaagguccgcgaccaggagggccgcaucaacuacuacuggacccuccucgagcccggcgacaccaucaucuucgaggccaacggcaaccucaucgccccccgcuucgccuucgcccucucccgcggcuucggcuccggcaucaucaccuccaacgcccccauggacgagugcgacgccaagugccagaccccccagggcgccaucaacuccucccuccccuuccagaacguccaccccgucaccaucggcgagugccccaaguacguccgcuccgccaagcuccgcauggucaccggccuccgcaacauccccuccauccagucccgcggccucuucggcgccaucgccggcuucaucgagggcggcuggaccggcauggucgacggcugguacggcuaccaccaccagaacgagcagggcuccggcuacgccgccgaccagaaguccacccagaacgccaucaacggcaucaccaacaaggucaacuccgucaucgagaagaugaacacccaguucaccgccgucggcaaggaguucaacaagcucgagcgccgcauggagaaccucaacaagaaggucgacgacggcuuccucgacaucuggaccuacaacgccgagcuccucguccuccucgagaacgagcgcacccucgacuuccacgacuccaacgucaagaaccucuacgagaaggucaagucccagcucaagaacaacgccaaggagaucggcaacggcugcuucgaguucuaccacaagugcaacgacgagugcauggaguccgucaagaacggcaccuacgacuaccccaaguacuccgaggaguccaagcucaaccgcgagaagaucgacggcgucaagcucgaguccaugggcgucuaccagauccucgccaucuacuccaccgucgccuccucccucguccuccucgucucccucggcgccaucuccuucuggaugugcuccaacggcucccuccagugccgcaucugcaucuga

SEQ ID NO: 97983 - RNA, 1698 nt, Artificial Sequence
  derived and/or modified CDS sequence (opt2) from hemagglutinin__InfluenzaA__ABV30151
augaaggucaagcuccucguccuccucugcaccuucaccgccaccuacgccgacaccaucugcaucggcuaccacgccaacaacuccaccgacaccgucgacaccguccucgagaagaacgucaccgucacccacuccgucaaccuccucgaggacucccacaacggcaagcucugccuccucaagggcaucgccccccuccagcucggcaacugcuccgucgccggcuggauccucggcaaccccgagugcgagcuccucaucuccaaggaguccugguccuacaucgucgagacccccaaccccgagaacggcaccugcuaccccggcuacuucgccgacuacgaggagcuccgcgagcagcucuccuccgucuccuccuucgagcgcuucgagaucuuccccaaggaguccuccuggcccaaccacaccgucaccggcgucuccgccuccugcucccacuccggcaaguccuccuucuaccgcaaccuccucuggcucaccggcaagaacggccucuaccccaaccucuccaaguccuacgccaacaacaaggagaaggagguccucguccucuggggcguccaccacccccccaacaucggcgaccagcgcgcccucuaccacaccgagaacgccuacgucuccgucgucuccucccacuacucccgccgcuucacccccgagaucgccaagcgccccaagguccgcgaccaggagggccgcaucaacuacuacuggacccuccucgagcccggcgacaccaucaucuucgaggccaacggcaaccucaucgccccccgcuucgccuucgcccucucccgcggcuucggcuccggcaucaucaccuccaacgcccccaugggcgagugcgacgccaagugccagaccccccagggcgccaucaacuccucccuccccuuccagaacguccaccccgucaccaucggcgagugccccaaguacguccgcuccgccaagcuccgcauggucaccggccuccgcaacauccccuccauccagucccgcggccucuucggcgccaucgccggcuucaucgagggcggcuggaccggcauggucgacggcugguacggcuaccaccaccagaacgagcagggcuccggcuacgccgccgaccagaaguccacccagaacgccaucaacggcaucaccaacaaggucaacuccgucaucgagaagaugaacacccaguucaccgccgucggcaaggaguucaacaagcucgagcgccgcauggagaaccucaacaagaaggucgacgacggcuuccucgacaucuggaccuacaacgccgagcuccucguccuccucgagaacgagcgcacccucgacuuccacgacuccaacgucaagaaccucuacgagaaggucaagucccagcucaagaacaacgccaaggagaucggcaacggcugcuucgaguucuaccacaagugcaacgacgagugcauggaguccgucaagaacggcaccuacgacuaccccaaguacuccgaggaguccaagcucaaccgcgagaagaucgacggcgucaagcucgaguccaugggcgucuaccagauccucgccaucuacuccaccgucgccuccucccucguccuccucgucucccucggcgccaucuccuucuggaugugcuccaacggcucccuccagugccgcaucugcaucuga

SEQ ID NO: 97984 - RNA, 1698 nt, Artificial Sequence
  derived and/or modified CDS sequence (opt2) from hemagglutinin__InfluenzaA__ABV30162
augaaggucaagcuccucguccuccucugcaccuucaccgccaccuacgccgacaccaucugcaucggcuaccacgccaacaacuccaccgacaccgucgacaccguccucgagaagaacgucaccgucacccacuccgucaaccuccucgaggacucccacaacggcaagcucugccuccucaagggcaucgccccccuccagcucggcaacugcuccgucgccggcuggauccucggcaaccccgagugcgagcuccucaucucccgcgaguccugguccuacaucgucgagacccccaaccccgagaacggcaccugcuaccccggcuacuucgccgacuacgaggagcuccgcgagcagcucuccuccgucuccuccuucgagcgcuucgagaucuuccccaaggaguccuccuggcccaaccacaccgucaccggcgucuccgccuccugcucccacaacggcaaguccuccuucuaccgcaaccuccucuggcucaccggcaagaacggccucuaccccaaccucuccaaguccuacgccaacaacaaggagaaggagguccucguccucuggggcguccaccacccccccaacaucggcgaccagcgcgcccucuaccacaccgagaacgccuacgucuccgucgucuccucccacuacucccgccgcuucacccccgagaucgccaagcgccccaagguccgcgaccaggagggccgcaucaacuacuacuggacccuccucgagcccggcgacaccaucaucuucgaggccaacggcaaccucaucgccccccgcuucgccuucgcccucucccgcggcuucggcuccggcaucaucaccuccaacgcccccauggacgagugcgacgccaagugccagaccccccagggcgccaucaacuccucccuccccuuccagaacguccaccccgucaccaucggcgagugccccaaguacguccgcuccaccaagcuccgcauggucaccggccuccgcaacauccccuccauccagucccgcggccucuucggcgccaucgccggcuucaucgagggcggcuggaccggcauggucgacggcugguacggcuaccaccaccagaacgagcagggcuccggcuacgccgccgaccagaaguccacccagaacgccaucaacggcaucaccaacaaggucaacuccgucaucgagaagaugaacacccaguucaccgccgucggcaaggaguucaacaagcucgagcgccgcauggagaaccucaacaagaaggucgacgacggcuuccucgacaucuggaccuacaacgccgagcuccucguccuccucgagaacgagcgcacccucgacuuccacgacuccaacgucaagaaccucuacgagaaggucaagucccagcucaagaacaacgccaaggagaucggcaacggcugcuucgaguucuaccacaagugcaacgacgagugcauggaguccgucaagaacggcaccuacgacuaccccaaguacuccgaggaguccaagcucaaccgcgagaagaucgacggcgucaagcucgaguccaugggcgucuaccagauccucgccaucuacuccaccgucgccuccucccucguccuccucgucucccucggcgccaucuccuucuggaugugcuccaacggcucccuccagugccgcaucugcaucuga

SEQ ID NO: 97985 - RNA, 1698 nt, Artificial Sequence; identical to SEQ ID NO: 97950
  derived and/or modified CDS sequence (opt2) from hemagglutinin__InfluenzaA__ABV30173

SEQ ID NO: 97986 - RNA, 1698 nt, Artificial Sequence; identical to SEQ ID NO: 97950
  derived and/or modified CDS sequence (opt2) from hemagglutinin__InfluenzaA__ABV30184

SEQ ID NO: 97987 - RNA, 1701 nt, Artificial Sequence; identical to SEQ ID NO: 97964
  derived and/or modified CDS sequence (opt2) from hemagglutinin__InfluenzaA__ABV30217

SEQ ID NO: 97988 - RNA, 1701 nt, Artificial Sequence; identical to SEQ ID NO: 97964
  derived and/or modified CDS sequence (opt2) from hemagglutinin__InfluenzaA__ABV30228

SEQ ID NO: 97989 - RNA, 1701 nt, Artificial Sequence
  derived and/or modified CDS sequence (opt2) from hemagglutinin__InfluenzaA__ABV30261
augaagaccaucaucgcccucuccuacauccucugccucgucuucgcccagaagcuccccggcaucgacaacuccaccgccacccucugccucggccaccacgccguccccaacggcaccaucgucaagaccaucaccaacgaccaggucgaggucaccaacgccaccgagcucguccaguccuccuccaccggcggcaucugcgacuccccccaccagauccucgacggcgagaacugcacccucaucgacgcccuccucggcgacccccagugcgacggcuuccagaacaagaagugggaccucuucgucgagcgcuccaaggccuacuccaacugcuaccccuacgacguccccgacuacgccucccuccgcucccucgucgccuccuccggcacccucgaguucaacaacgaguccuucaacugggccggcgucacccagaacggcaccuccuccgccugcaagcgcggcuccaacaacuccuucuucucccgccucaacuggcucacccacuccaaguucaaguaccccgcccucaacgucaccaugcccaacaacgaggaguucgacaagcucuacaucuggggcguccaccaccccggcaccgacaacgaccagaucuuccucuacgcccaggccuccggccgcaucaccgucuccaccaagcgcucccagcagaccgucauccccaacaucggcucccgcccccgcguccgcaacauccccucccgcaucuccaucuacuggaccaucgucaagcccggcgacauccuccucaucaacuccaccggcaaccucaucgccccccgcggcuacuucaagauccgcuccggcaaguccuccaucaugcgcuccgacgcccccaucggcaagugcaacuccgagugcaucacccccaacggcuccauccccaacgacaagcccuuccagaacgucaaccgcaucaccuacggcgccugcccccgcuacgucaagcagaacacccucaagcucgccaccggcaugcgcaacguccccgagaagcagacccgcggcaucuucggcgccaucgccggcuucaucgagaacggcugggagggcauggucgacggcugguacggcuuccgccaccagaacuccgagggcaugggccaggccgccgaccucaaguccacccaggccgccaucgaccagaucaacggcaagcucaaccgccucaucggcaagaccaacgagaaguuccaccagaucgagaaggaguucuccgaggucgagggccgcauccaggaccucgagaaguacgucgaggacaccaagaucgaccucugguccuacaacgccgagcuccucgucgcccucgagaaccagcacaccaucgaccucaccgacuccgagaugaacaagcucuucgagaagaccaagaagcagcuccgcgagaacgccgaggacaugggcaacggcugcuucaagaucuaccacaagugcgacaacgccugcaucggcuccauccgcaacggcaccuacgaccacgacgucuaccgcgccgaggcccucaacaaccgcuuccagaucaagggcgucgagcucaaguccggcuacaaggacuggauccucuggaucuccuucgccaucuccugcuuccuccucugcgucgcccuccucggcuucaucaugugggccugccagaagggcaacauccgcugcaacaucugcaucuga

SEQ ID NO: 97990 - RNA, 1701 nt, Artificial Sequence
  derived and/or modified CDS sequence (opt2) from hemagglutinin__InfluenzaA__ABV30272
augaagaccaucaucgcccucuccuacauccucugccucgucuucgcccagaagcuccccggcaacgacaacuccaccgccacccucugccucggccaccacgccguccccaacggcaccaucgucaagaccaucaccaacgaccagaucgaggucaccaacgccaccgagcucguccaguccuccuccaccggcgagaucugcgacuccccccaccagauccucgacggcgagaacugcacccucaucgacgcccuccucggcgacccccagugcgacggcuuccagaacaagaagugggaccucuucgucgagcgcuccaaggccuacuccaacugcuaccccuacgacguccccgacuacgccucccuccgcucccucgucgccuccuccggcacccucgaguucaacaacgaguccuucaacuggaccggcgucacccagaacggcaccuccuccgccugcauccgccgcuccaacaacuccuucuucuccaagcucaacuggcucacccaccucaaguucaaguaccccgcccucaacgucaccaugcccaacaacgagaaguucgacaagcucuacaucuggggcguccaccaccccggcaccgacaacgaccagaucuuccucuacgcccaggccuccggccgcaucaccgucuccaccaagcgcucccagcagaccgucauccccaacaucggcucccgcccccgcguccgcaacauccccucccgcaucuccaucuacuggaccaucgucaagcccggcgacauccuccucaucaacuccaccggcaaccucaucgccccccgcggcuacuucaagauccgcuccggcaaguccuccaucaugcgcuccgacgcccccaucggcaagugcaacuccgagugcaucacccccaacggcuccauccccaacgacaagcccuuccagaacgucaaccgcaucaccuacggcgccugcccccgcuacgucaagcagaacacccucaagcucgccaccggcaugcgcaacguccccgagaagcagacccgcggcaucuucggcgccaucgccggcuucaucgagaacggcugggagggcauggucgacggcugguacggcuuccgccaccagaacuccgagggcaucggccaggccgccgaccucaaguccacccaggccgccaucgaccagaucaacggcaagcucaaccgccucaucggcaagaccaacgagaaguuccaccagaucgagaaggaguucuccgaggucgagggccgcauccaggaccucgagaaguacgucgaggacaccaagaucgaccucugguccuacaacgccgagcuccucgucgcccucgagaaccagcacaccaucgaccucaccgacuccgagaugaacaagcucuucgagaagaccaagaagcagcuccgcgagaacgccgaggacaugggcaacggcugcuucaagaucuaccacaagugcgacaacgccugcaucggcuccauccgcaacggcaccuacgaccacgacgucuaccgcgacgaggcccucaacaaccgcuuccagaucaagggcgucgagcucaaguccggcuacaaggacuggauccucuggaucuccuucgccaucuccugcuuccuccucugcgucgcccuccucggcuucaucaugugggccugccagaagggcaacauccgcugcaacaucugcaucuga

SEQ ID NO: 97991 - RNA, 1698 nt, Artificial Sequence
  derived and/or modified CDS sequence (opt2) from hemagglutinin__InfluenzaA__ABV30283
augaaggucaagcuccucguccuccucugcaccuucaccgccaccuacgccgacaccaucugcaucggcuaccacgccaacaacuccaccgacaccgucgacaccguccucgagaagaacgucaccgucacccacuccgucaaccuccucgaggacucccacaacggcaagcucugccuccucaagggcaucgccccccuccagcucggcaacugcuccgucgccggcuggauccucggcaaccccgagugcgagcuccucaucuccaaggaguccugguccuacaucgucgagacccccaaccccgagaacggcaccugcuaccccggcaacuucgccgacuacgaggagcuccgcgagcagcucuccuccgucuccuccuucgagcgcuucgagaucuuccccaaggaguccuccuggcccaaccacaccgucaccggcgucuccgccuccugcucccacaacggcaaguccuccuucuaccgcaaccuccucuggcucaccggcaagaacggccucuaccccaaccucuccaaguccuacgccaacaacaaggagaaggagguccucguccucuggggcguccaccacccccccaacaucggcgaccagcgcgcccucuaccacaccgagaacgccuacgucuccgucgucuccucccacuacucccgccgcuucacccccgagaucgccaagcgccccaagguccgcgaccaggagggccgcaucaacuacuacuggacccuccucgagcccggcgacaccaucaucuucgaggccaacggcaaccucaucgccccccgcuucgccuucgcccucucccgcggcuucggcuccggcaucaucaccuccaacgcccccauggacgagugcgacgccaagugccagaccccccagggcgccaucaacuccucccuccccuuccagaacguccaccccgucaccaucggcgagugccccaaguacguccgcuccgccaagcuccgcauggucaccggccuccgcaacauccccuccauccagucccgcggccucuucggcgccaucgccggcuucaucgagggcggcuggaccggcauggucgacggcugguacggcuaccaccaccagaacgagcagggcuccggcuacgccgccgaccagaaguccacccagaacgccaucgacggcaucaccaacaaggucaacuccgucaucgagaagaugaacacccaguucaccgccgucggcaaggaguucaacaagcucgagcgccgcauggagaaccucaacaagaaggucgacgacggcuuccucgacaucuggaccuacaacgccgagcuccucguccuccucgagaacgagcgcacccucgacuuccacgacuccaacgucaagaaccucuacgagaaggucaagucccagcucaagaacaacgccaaggagaucggcaacggcugcuucgaguucuaccacaagugcaacgacgagugcauggaguccgucaagaacggcaccuacgacuaccccaaguacuccgaggaguccaagcucaaccgcgagaagaucgacggcgucaagcucgaguccaugggcgucuaccagauccucgccaucuacuccaccgucgccuccucccucguccuccucgucucccucggcgccaucuccuucuggaugugcuccaacggcucccuccagugccgcaucugcaucuga

SEQ ID NO: 97992 - RNA, 1698 nt, Artificial Sequence
  derived and/or modified CDS sequence (opt2) from hemagglutinin__InfluenzaA__ABV30294
augaaggucaagcuccucguccuccucugcaccuucaccgccaccuacgccgacaccaucugcaucggcuaccacgccaacaacuccaccgacaccgucgacaccguccucgagaagaacgucaccgucacccacuccgucaaccuccucgaggaccgccacaacggcaagcucugccuccucaagggcaucgccccccuccagcucggcaacugcuccgucgccggcuggauccucggcaaccccgagugcgagcuccucaucuccaaggaguccugguccuacaucgucgagacccccaaccccgagaacggcaccugcuaccccggcuacuucgccgacuacgaggagcuccgcgagcagcucuccuccgucuccuccuucgagcgcuucgagaucuuccccaaggaguccuccuggcccaaccacaccgucaccggcgucuccgccuccugcucccacaacggcaaguccuccuucuaccgcaaccuccucuggcucaccggcaagaacggccucuaccccaaccucucccgcuccuacgccaacaacaaggagaaggagguccucguccucuggggcguccaccacccccccaacaucggcgaccagcgcgcccucuaccacaccgagaacgccuacgucuccgucgucuccucccacuacucccgccgcuucacccccgagaucgccaagcgccccaagguccgcgaccaggagggccgcaucaacuacuacuggacccuccucgagcccggcgacaccaucaucuucgaggccaacggcaaccucaucgccccccgcuucgccuucgcccucucccgcggcuucggcuccggcaucaucaccuccaacgcccccauggacgagugcgacgccaagugccagaccccccagggcgccaucaacuccucccuccccuuccagaacguccaccccgucaccaucggcgagugccccaaguacguccgcuccgccaagcuccgcauggucaccggccuccgcaacauccccuccauccagucccgcggccucuucggcgccaucgccggcuucaucgagggcggcuggaccggcauggucgacggcugguacggcuaccaccaccagaacgagcagggcuccggcuacgccgccgaccagaaguccacccagaacgccaucaacggcaucaccaacaaggucaacuccgucaucgagaagaugaacacccaguucaccgccgucggcaaggaguucaacaagcucgagcgccgcauggagaaccucaacaagaaggucgacgacggcuuccucgacaucuggaccuacaacgccgagcuccucguccuccucgagaacgagcgcacccucgacuuccacgacuccaacgucaagaaccucuacgagaaggucaagucccagcucaagaacaacgccaaggagaucggcaacggcugcuucgaguucuaccacaagugcaacgacgagugcauggaguccgucaagaacggcaccuacgacuaccccaaguacuccgaggaguccaagcucaaccgcgagaagaucgacggcgucaagcucgaguccaugggcgucuaccagauccucgccaucuacuccaccgucgccuccucccucguccuccucgucucccucggcgccaucuccuucuggaugugcuccaacggcucccuccagugccgcaucugcaucuga

SEQ ID NO: 97993 - RNA, 1698 nt, Artificial Sequence
  derived and/or modified CDS sequence (opt2) from hemagglutinin__InfluenzaA__ABV30305
augaaggucaagcuccucguccuccucugcaccuucaccgccaccuacgccgacaccaucugcaucggcuaccacgccaacaacuccaccgacaccgucgacaccguccucgagaagaacgucaccgucacccacuccgucaaccuccucgaggacucccacaacggcaagcucugccuccucaagggcaucgccccccuccagcucggcaacugcuccgucgccggcuggauccucggcaaccccgagugcgagcuccucaucuccaaggaguccugguccuacaucgucgagacccccaaccccgagaacggcaccugcuaccccggcuacuucgccgacuacgaggagcuccgcgagcagcucuccuccgucuccuccuucgagcgcuucgagaucuuccccaaggaguccuccuggcccaaccacaccgucaccggcggcuccgccuccugcucccacaacggcaaguccuccuucuaccgcaaccuccucuggcucaccggcaagaacggccucuaccccaaccucuccaaguccuacgccaacaacaaggagaaggagguccucguccucuggggcguccaccacccccccaacaucggcgaccagcgcgcccucuaccacaccgagaacgccuacgucuccgucgucuccucccacuacucccgccgcuucacccccgagaucgccaagcgccccaagguccgcgaccaggagggccgcaucaacuacuacuggacccuccucgagcccggcgacaccaucaucuucgaggccaacggcaaccucaucgccccccgcuucgccuucgcccucucccgcggcuucggcuccggcaucaucaccuccaacgcccccauggacgagugcgacgccaagugccagaccccccagggcgccaucaacuccucccuccccuuccagaacguccaccccgucaccaucggcgagugccccaaguacguccgcuccaccaagcuccgcauggucaccggccuccgcaacauccccuccauccagucccgcggccucuucggcgccaucgccggcuucaucgagggcggcuggaccggcauggucgacggcugguacggcuaccaccaccagaacgagcagggcuccggcuacgccgccgaccagaaguccacccagaacgccaucaacggcaucaccaacaaggucaacuccgucaucgagaagaugaacacccaguucaccgccgucggcaaggaguucaacaagcucgagcgccgcauggagaaccucaacaagaaggucgacgacggcuuccucgacaucuggaccuacaacgccgagcuccucguccuccucgagaacgagcgcacccucgacuuccacgacuccaacgucaagaaccucuacgagaaggucaagucccagcucaagaacaacgccaaggagaucggcaacggcugcuucgaguucuaccacaagugcaacaacgagugcauggaguccgucaagaacggcaccuacgacuaccccaaguacuccgaggaguccaagcucaaccgcgagaagaucgacggcgucaagcucgaguccaugggcgucuaccagauccucgccaucuacuccaccgucgccuccucccucguccuccucgucucccucggcgccaucuccuucuggaugugcuccaacggcucccuccagugccgcaucugcaucuga

SEQ ID NO: 97994 - RNA, 1698 nt, Artificial Sequence; identical to SEQ ID NO: 97946
  derived and/or modified CDS sequence (opt2) from hemagglutinin__InfluenzaA__ABV30316

SEQ ID NO: 97995 - RNA, 1698 nt, Artificial Sequence; identical to SEQ ID NO: 97992
  derived and/or modified CDS sequence (opt2) from hemagglutinin__InfluenzaA__ABV30327

SEQ ID NO: 97996 - RNA, 1698 nt, Artificial Sequence; identical to SEQ ID NO: 97946
  derived and/or modified CDS sequence (opt2) from hemagglutinin__InfluenzaA__ABV30338

SEQ ID NO: 97997 - RNA, 1698 nt, Artificial Sequence; identical to SEQ ID NO: 97950
  derived and/or modified CDS sequence (opt2) from hemagglutinin__InfluenzaA__ABV30349

SEQ ID NO: 97998 - RNA, 1698 nt, Artificial Sequence
  derived and/or modified CDS sequence (opt2) from hemagglutinin__InfluenzaA__ABV30360
augaaggucaagcuccucguccuccucugcaccuucaccgccaccuacgccgacaccaucugcaucggcuaccacgccaacaacuccaccgacaccgucgacaccguccucgagaagaacgucaccgucacccacuccgucaaccuccucgaggacucccacaacggcaagcucugccuccucaagggcaucgccccccuccagcucggcaacugcuccgucgccggcuggauccucggcaaccccgagugcgagcuccucaucuccaaggaguccugguccuacaucgucgagacccccaaccccgagaacggcaccugcuaccccggcaacuucgccgacuacgaggagcuccgcgagcagcucuccuccgucuccuccuucgagcgcuucgagaucuuccccaaggaguccuccuggcccaaccacaccgucaccggcgucuccgccuccugcucccacaacggcaaguccuccuucuaccgcaaccuccucuggcucaccggcaagaacggccucuaccccaaccucuccaaguccuacgccaacaacaaggagaaggagguccucguccucuggggcguccaccacccccccaacaucggcgaccagcgcgcccucuaccacaccgagaacgccuacgucuccgucgucuccucccacuacucccgccgcuucacccccgagaucgccaagcgccccaagguccgcgaccaggagggccgcaucaacuacuacuggacccuccucgagcccggcgacaccaucaucuucgaggccaacggcaaccucaucgccccccgcuucgccuucgcccucucccgcggcuucggcuccggcaucaucaccuccaacgcccccauggacgagugcgacgccaagugccagaccccccagggcgccaucaacuccucccuccccuuccagaacguccaccccgucaccaucggcgagugccccaaguacguccgcuccgccaagcuccgcauggucaccggccuccgcaacauccccuccauccagucccgcggccucuucggcgccaucgccggcuucaucgagggcggcuggaccggcauggucgacggcugguacggcuaccaccaccagaacgagcagggcuccggcuacgccgccgaccagaaguccacccagaacgccaucgacggcaucaccaacaaggucaacuccgucaucgagaagaugaacacccaguucaccgccgucggcaaggaguucaacaagcucgagcgccgcauggagaaccucaacaagaaggucgacgacggcuuccucgacaucuggaccuacaacgccgagcuccucguccuccucgagaacgagcgcacccucgacuuccacgacuccaacgucaagaaccucuacgagaaggucaagucccagcucaagaacaacgccaaggagaucggcaacggcugcuucgaguucuaccacaagugcaacgacgagugcauggaguccgucaagaacggcaccuacgacuaccccaaguacuccgaggaguccaagcucaaccgcgagaagaucgacggcaucaagcucgaguccaugggcgucuaccagauccucgccaucuacuccaccgucgccuccucccucguccuccucgucucccucggcgccaucuccuucuggaugugcuccaacggcucccuccagugccgcaucugcaucuga

SEQ ID NO: 97999 - RNA, 1698 nt, Artificial Sequence; identical to SEQ ID NO: 97950
  derived and/or modified CDS sequence (opt2) from hemagglutinin__InfluenzaA__ABV30371

SEQ ID NO: 98000 - RNA, 1701 nt, Artificial Sequence; identical to SEQ ID NO: 97765
  derived and/or modified CDS sequence (opt2) from hemagglutinin__InfluenzaA__ABV30382

SEQ ID NO: 98001 - RNA, 1701 nt, Artificial Sequence; identical to SEQ ID NO: 96666
  derived and/or modified CDS sequence (opt2) from hemagglutinin__InfluenzaA__ABV30393

SEQ ID NO: 98002 - RNA, 1701 nt, Artificial Sequence
  derived and/or modified CDS sequence (opt2) from hemagglutinin__InfluenzaA__ABV30404
augaagaccaucaucgcccucuccuacauccucugccucgucuucgcccagaagcuccccggcaacgacaacuccaccgccacccucugccucggccaccacgccguccccaacggcaccaucgucaagaccaucaccaacgaccagaucgaggucaccaacgccaccgagcucguccaguccuccuccaccggcgagaucugcgacuccccccaccagauccucgacggcgagaacugcacccucaucgacgcccuccucggcgacccccagugcgacggcuuccagaacaagaagugggaccucuucgucgagcgcuccaaggccuacuccaagugcuaccccuacgacguccccgacuacgccucccuccgcucccucgucgccuccuccggcacccucgaguucaacaacgaguccuucaacuggaccggcgucacccagaacggcaccuccuccgccugcauccgccgcuccaacaacuccuucuucucccgccucaacuggcucacccaccucaaguucaaguaccccgcccucaacgucaccaugcccaacaacgagaaguucgacaagcucuacaucuggggcguccaccaccccggcaccgacaacgaccagaucuuccucuacgcccaggccuccggccgcaucaccgucuccaccaagcgcucccagcagaccgucauccccaacaucggcucccgcccccgcguccgcaacauccccucccgcaucuccaucuacuggaccaucgucaagcccggcgacauccuccucaucaacuccaccggcaaccucaucgccccccgcggcuacuucaagauccgcuccggcaaguccuccaucaugcgcuccgacgcccccaucggcaagugcaacuccgagugcaucacccccaacggcuccauccccaacgacaagcccuuccagaacgucaaccgcaucaccuacggcgccugcccccgcuacgucaagcagaacacccucaagcucgccaccggcaugcgcaacguccccgagaagcagacccgcggcaucuucggcgccaucgccggcuucaucgagaacggcugggagggcauggucgacggcugguacggcuuccgccaccagaacuccgagggcaucggccaggccgccgaccucaaguccacccaggccgccaucgaccagaucaacggcaagcucaaccgccucaucggcaagaccaacgagaaguuccaccagaucgagaaggaguucuccgaggucgagggccgcauccaggaccucgagaaguacgucgaggacaccaagaucgaccucugguccuacaacgccgaccuccucgucgcccucgagaaccagcacaccaucgaccucaccgacuccgagaugaacaagcucuucgagaagaccaagaagcagcuccgcgagaacgccgaggacaugggcaacggcugcuucaagaucuaccacaagugcgacaacgccugcaucggcuccauccgcaacggcaccuacgaccacgacgucuaccgcgacgaggcccucaacaaccgcuuccagaucaagggcgucgagcucaaguccggcuacaaggacuggauccucuggaucuccuucgccaucuccugcuuccuccucugcgucgcccuccucggcuucaucaugugggccugccagaagggcaacauccgcugcaacaucugcaucuga

SEQ ID NO: 98003 - RNA, 1701 nt, Artificial Sequence
  derived and/or modified CDS sequence (opt2) from hemagglutinin__InfluenzaA__ABV30415
augaagaccaucaucgcccucuccuacauccucugccucgucuucgcccagaagcuccccggcaucgacaacuccaccgccacccucugccucggccaccacgccguccccaacggcaccaucgucaagaccaucaccaacgaccagaucgaggucaccaacgccaccgagcucguccaguccuccuccaccggcggcaucugcgacuccccccaccagauccucgacggcgagaacugcacccucaucgacgcccuccucggcgacccccagugcgacggcuuccagaacaagaagugggaccucuucgucgagcgcuccaaggccuacuccaacugcuaccccuacgacguccccgacuacgccucccuccgcucccucgucgccuccuccggcacccucgaguucaacaacgaguccuucaacugggccggcgucacccagaacggcaccuccuccgccugcaagcgcggcuccaacaacuccuucuucucccgccucaacuggcucacccacuccaaguucaaguaccccgcccucaacgucaccaugcccaacaacgaggaguucgacaagcucuacaucuggggcguccaccaccccggcaccgacaacgaccagaucuuccucuacgcccaggccuccggccgcaucaccgucuccaccaagcgcucccagcagaccgucauccccaacaucggcucccgcccccgcguccgcaacauccccucccgcaucuccaucuacuggaccaucgucaagcccggcgacauccuccucaucaacuccaccggcaaccucaucgccccccgcggcuacuucaagauccgcuccggcaaguccuccaucaugcgcuccgacgcccccaucggcaagugcaacuccgagugcaucacccccaacggcuccauccccaacgacaagcccuuccagaacgucaaccgcaucaccuacggcgccugcccccgcuacgucaagcagaacacccucaagcucgccaccggcaugcgcaacguccccgagaagcagacccgcggcaucuucggcgccaucgccggcuucaucgagaacggcugggagggcauggucgacggcugguacggcuuccgccaccagaacuccgagggcaucggccaggccgccgaccucaaguccacccaggccgccaucgaccagaucaacggcaagcucaaccgccucaucggcaagaccaacgagaaguuccaccagaucgagaaggaguucuccgaggucgagggccgcauccaggaccucgagaaguacgucgaggacaccaagaucgaccucugguccuacaacgccgagcuccucgucgcccucgagaaccagcacaccaucgaccucaccgacuccgagaugaacaagcucuucgagaagaccaagaagcagcuccgcgagaacgccgaggacaugggcaacggcugcuucaagaucuaccacaagugcgacaacgccugcaucggcuccauccgcaacggcaccuacgaccacgacgucuaccgcgacgaggcccucaacaaccgcuuccagaucaaguccgucgagcucaaguccggcuacaaggacuggauccucuggaucuccuucgccaucuccugcuuccuccucugcgucgcccuccucggcuucaucaugugggccugccagaagggcaacauccgcugcaacaucugcaucuga

SEQ ID NO: 98004 - RNA, 1701 nt, Artificial Sequence; identical to SEQ ID NO: 97964
  derived and/or modified CDS sequence (opt2) from hemagglutinin__InfluenzaA__ABV30426

SEQ ID NO: 98005 - RNA, 1701 nt, Artificial Sequence
  derived and/or modified CDS sequence (opt2) from hemagglutinin__InfluenzaA__ABV30437
augaagaccaucaucgcccucuccuacauccucugccucgucuucgcccagaagcuccccggcaacgacaacuccaccgccacccucugccucggccaccacgccguccccaacggcaccaucgucaagaccaucaccaacgaccagaucgaggucaccaacgccaccgagcucguccaguccuccuccaccggcgagaucugcgacuccccccaccagauccucgacggcgagaacugcacccucaucgacgcccuccucggcgacccccagugcgacggcuuccagaacaagaagugggaccucuucgucgagcgcuccaaggccuacuccaacugcuaccccuacgacguccccgacuacgccucccuccgcucccucgucgccuccuccggcacccucgaguucaacaacgaguccuucaacuggaccggcgucacccagaacggcaccuccuccgccugcauccgccgcuccaaccacuccuucuucucccgccucaacuggcucacccaccucaaguucaaguaccccgcccucaacgucaccaugcccaacaacgagaaguucgacaagcucuacaucuggggcguccaccaccccggcaccgacaacgaccagaucuuccucuacgcccaggccuccggccgcaucaccgucuccaccaagcgcucccagcagaccgucauccccaacaucggcucccgcccccgcguccgcaacauccccucccgcaucuccaucuacuggaccaucgucaagcccggcgacauccuccucaucaacuccaccggcaaccucaucgccccccgcggcuacuucaagauccgcuccggcaaguccuccaucaugcgcuccgacgcccccaucggcaagugcaacuccgagugcaucacccccaacggcuccauccccaacgacaagcccuuccagaacgucaaccgcaucaccuacggcgccugcccccgcuacgucaagcagaacacccucaagcucgccaccggcaugcgcaacguccccgagaagcagacccgcggcaucuucggcgccaucgccggcuucaucgagaacggcugggagggcauggucgacggcugguacggcuuccgccaccagaacuccgagggcaucggccaggccgccgaccucaaguccacccaggccgccaucgaccagaucaacggcaagcucaaccgccucaucggcaagaccaacgagaaguuccaccagaucgagaaggaguucuccgaggucgagggccgcauccaggaccucgagaaguacgucgaggacaccaagaucgaccucugguccuacaacgccgagcuccucgucgcccucgagaaccagcacaccaucgaccucaccgacuccgagaugaacaagcucuucgagaagaccaagaagcagcuccgcgagaacgccgaggacaugggcaacggcugcuucaagaucuaccacaagugcgacaacgccugcaucggcuccauccgcaacggcaccuacgaccacgacgucuaccgcgacgaggcccucaacaaccgcuuccagaucaagggcgucgagcucaaguccggcuacaaggacuggauccucuggaucuccuucgccaucuccugcuuccuccucugcgucgcccuccucggcuucaucaugugggccugccagaagggcaacauccgcugcaacaucugcaucuga

SEQ ID NO: 98006 - RNA, 1701 nt, Artificial Sequence; identical to SEQ ID NO: 97964
  derived and/or modified CDS sequence (opt2) from hemagglutinin__InfluenzaA__ABV30448

SEQ ID NO: 98007 - RNA, 1698 nt, Artificial Sequence
  derived and/or modified CDS sequence (opt2) from hemagglutinin__InfluenzaA__ABV30459
augaaggucaagcuccucauccuccucugcaccuucaccgccaccuacgccgacaccaucugcaucggcuaccacgccaacaacuccaccgacaccgucgacaccguccucgagaagaacgucaccgucacccacuccgucaaccuccucgaggacucccacaacggcaagcucugccuccucaagggcaucgccccccuccagcucggcaacugcuccgucgccggcuggauccucggcaaccccgagugcgagcuccucaucuccaaggaguccugguccuacaucgucgaggcccccaaccccgagaacggcaccugcuaccccggcuacuucgccgacuacgaggagcuccgcgagcagcucuccuccgucuccuccuucgagcgcuucgagaucuuccccaaggaguccuccuggcccaaccacaccgucaccggcgucuccgccuccugcucccacaacggcaaguccuccuucuaccgcaaccuccucuggcucaccggcaagaacggccucuaccccaaccucuccaaguccuacgccaacaacaaggagaaggagguccucguccucuggggcguccaccacccccccaacaucggcgaccagcgcgcccucuaccacaccgagaacgccuacgucuccgucgucuccucccacuacucccgccgcuucacccccgagaucgccaagcgccccaagguccgcgaccaggagggccgcaucaacuacuacuggacccuccucgagcccggcgacaccaucaucuucgaggccaacggcaaccucaucgccccccgcuucgccuucgcccucucccgcggcuucggcuccggcaucaucaccuccaacgcccccauggacgagugcgacgccaagugccagaccccccagggcgccaucaacuccucccuccccuuccagaacguccaccccgucaccaucggcgagugccccaaguacguccgcuccaccaagcuccgcauggucaccggccuccgcaacauccccuccauccagucccgcggccucuucggcgccaucgccggcuucaucgagggcggcuggaccggcauggucgacggcugguacggcuaccaccaccagaacgagcagggcuccggcuacgccgccgaccagaaguccacccagaacgccaucaacggcaucaccaacaaggucaacuccgucaucgagaagaugaacacccaguucaccgccgucggcaaggaguucaacaagcucgagcgccgcauggagaaccucaacaagaaggucgacgacggcuuccucgacaucuggaccuacaacgccgagcuccucguccuccucgagaacgagcgcacccucgacuuccacgacuccaacgucaagaaccucuacgagaaggucaagucccagcucaagaacaacgccaaggagaucggcaacggcugcuucgaguucuaccacaagugcaacgacgagugcauggaguccgucaagaacggcaccuacgacuaccccaaguacuccgaggaguccaagcucaaccgcgagaagaucgacggcgucaagcucgaguccaugggcgucuaccagauccucgccaucuacuccaccgucgccuccucccucguccuccucgucucccucggcgccaucuccuucuggaugugcuccaacggcucccuccagugccgcaucugcaucuga

SEQ ID NO: 98008 - RNA, 1701 nt, Artificial Sequence; identical to SEQ ID NO: 97964
  derived and/or modified CDS sequence (opt2) from hemagglutinin__InfluenzaA__ABV30470

SEQ ID NO: 98009 - RNA, 1698 nt, Artificial Sequence; identical to SEQ ID NO: 97946
  derived and/or modified CDS sequence (opt2) from hemagglutinin__InfluenzaA__ABV30492

SEQ ID NO: 98010 - RNA, 1698 nt, Artificial Sequence
  derived and/or modified CDS sequence (opt2) from hemagglutinin__InfluenzaA__ABV30503
augaaggucaagcuccucauccuccucugcaccuucaccgccaccuacgccgacaccaucugcaucggcuaccacgccaacaacuccaccgacaccgucgacaccguccucgagaagaacgucaccgucacccacuccgucaaccuccucgaggacucccacaacggcaagcucugccuccucaagggcaucgccccccuccagcucggcaacugcuccgucgccggcuggauccucggcaaccccgagugcgagcuccucaucuccaaggaguccugguccuacaucgucgagacccccaaccccgagaacggcaccugcuaccccggcuacuucgccgacuacgaggagcuccgcgagcagcucuccuccgucuccuccuucgagcgcuucgagaucuuccccaaggaguccuccuggcccaaccacaccaucaccggcgucuccgccuccugcucccacaacggcaaguccuccuucuaccgcaaccuccucuggcucaccggcaagaacggccucuaccccaaccucuccaaguccuacgccaacaacaaggagaaggagguccucguccucuggggcguccaccacccccccaacaucggcgaccagcgcgcccucuaccacaccgagaacgccuacgucuccgucgucuccucccacuacucccgccgcuucacccccgagaucgccaagcgccccaagguccgcgaccaggagggccgcaucaacuacuacuggacccuccucgagcccggcgacaccaucaucuucgaggccaacggcaaccucaucgccccccgcuucgccuucgcccucucccgcggcuucggcuccggcaucaucaccuccaacgcccccauggacgagugcgacgccaagugccagaccccccagggcgccaucaacuccucccuccccuuccagaacguccaccccgucaccaucggcgagugccccaaguacguccgcuccaccaagcuccgcauggucaccggccuccgcaacauccccuccauccagucccgcggccucuucggcgccaucgccggcuucaucgagggcggcuggaccggcauggucgacggcugguacggcuaccaccaccagaacgagcagggcuccggcuacgccgccgaccagaaguccacccagaacgccaucaacggcaucaccaacaaggucaacuccgucaucgagaagaugaacacccaguucaccgccgucggcaaggaguucaacaagcucgagcgccgcauggagaaccucaacaagaaggucgacgacggcuuccucgacaucuggaccuacaacgccgagcuccucguccuccucgagaacgagcgcacccucgacuuccacgacuccaacgucaagaaccucuacgagaaggucaagucccagcucaagaacaacgccaaggagaucggcaacggcugcuucgaguucuaccacaagugcaacgacgagugcauggaguccgucaagaacggcaccuacgacuaccccaaguacuccgaggaguccaagcucaaccgcgagaagaucgacggcgucaagcucgaguccaugggcgucuaccagauccucgccaucuacuccaccgucgccuccucccucguccuccucgucucccucggcgccaucuccuucuggaugugcuccaacggcucccuccagugccgcaucugcaucuga

SEQ ID NO: 98011 - RNA, 1701 nt, Artificial Sequence; identical to SEQ ID NO: 97964
  derived and/or modified CDS sequence (opt2) from hemagglutinin__InfluenzaA__ABV30514

SEQ ID NO: 98012 - RNA, 1698 nt, Artificial Sequence
  derived and/or modified CDS sequence (opt2) from hemagglutinin__InfluenzaA__ABV30525
augaaggucaagcuccucguccuccucugcaccuucaccgccaccuacgccgacaccaucugcaucggcuaccacgccaacaacuccaccgacaccgucgacaccguccucgagaagaacgucaccgucacccacuccgucaaccuccucgaggacucccacaacggcaagcucugccuccucaagggcaucgccccccuccagcucggcaacugcuccgucgccggcuggauccucggcaaccccgagugcgagcuccucaucuccaaggaguccugguccuacaucgucgagacccccaaccccgagaacggcaccugcuaccccggcuacuucgccgacuacgaggagcuccgcgagcagcucuccuccgucuccuccuucgagcgcuucgagaucuuccccaaggaguccuccuggcccaaccacaccgucaccggcgucuccgccuccugcucccacuccggcaaguccuccuucuaccgcaaccuccucuggcucaccggcaagaacggccucuaccccaaccucuccaaguccuacgccaacaacaaggagaaggagguccucguccucuggggcguccaccacccccccaacaucggcgaccagcgcgcccucuaccacaccgagaacgccuacgucuccgucgucuccucccacuacucccgccgcuucacccccgagaucgccaagcgccccaagguccgcgaccaggagggccgcaucaacuacuacuggacccuccucgagcccggcgacaccaucaucuucgaggccaacggcaaccucaucgccccccgcuucgccuucgcccucucccgcggcuucggcuccggcaucaucaccuccaacacccccaugggcgagugcgacgccaagugccagaccccccagggcgccaucaacuccucccuccccuuccagaacguccaccccgucaccaucggcgagugccccaaguacguccgcuccgccaagcuccgcauggucaccggccuccgcaacauccccuccauccagucccgcggccucuucggcgccaucgccggcuucaucgagggcggcuggaccggcauggucgacggcugguacggcuaccaccaccagaacgagcagggcuccggcuacgccgccgaccagaaguccacccagaacgccaucaacggcaucaccaacaaggucaacuccgucaucgagaagaugaacacccaguucaccgccgucggcaaggaguucaacaagcucgagcgccgcauggagaaccucaacaagaaggucgacgacggcuuccucgacaucuggaccuacaacgccgagcuccucguccuccucgagaacgagcgcacccucgacuuccacgacuccaacgucaagaaccucuacgagaaggucaagucccagcucaagaacaacgccaaggagaucggcaacggcugcuucgaguucuaccacaagugcaacgacgagugcauggaguccgucaagaacggcaccuacgacuaccccaaguacuccgaggaguccaagcucaaccgcgagaagaucgacggcgucaagcucgaguccaugggcgucuaccagauccucgccaucuacuccaccgucgccuccucccucguccuccucgucucccucggcgccaucuccuucuggaugugcuccaacggcucccuccagugccgcaucugcaucuga

SEQ ID NO: 98013 - RNA, 1698 nt, Artificial Sequence; identical to SEQ ID NO: 97950
  derived and/or modified CDS sequence (opt2) from hemagglutinin__InfluenzaA__ABV30536

SEQ ID NO: 98014 - RNA, 1698 nt, Artificial Sequence; identical to SEQ ID NO: 97957
  derived and/or modified CDS sequence (opt2) from hemagglutinin__InfluenzaA__ABV30547

SEQ ID NO: 98015 - RNA, 1698 nt, Artificial Sequence; identical to SEQ ID NO: 97950
  derived and/or modified CDS sequence (opt2) from hemagglutinin__InfluenzaA__ABV30558

SEQ ID NO: 98016 - RNA, 1698 nt, Artificial Sequence
  derived and/or modified CDS sequence (opt2) from hemagglutinin__InfluenzaA__ABV30569
augaaggucaagcuccucauccuccucugcaccuucaccgccaccuacgccgacaccaucugcaucggcuaccacgccaacaacuccaccgacaccgucgacaccguccucgagaagaacgucaccgucacccacuccgucaaccuccucgaggacaaccacaacggcaagcucugccuccucaagggcaucgccccccuccagcucggcaacugcuccgucgccggcuggauccucggcaaccccgagugcgagcuccucaucuccaaggaguccugguccuacaucgucgagacccccaaccccgagaacggcaccugcuaccccggcuacuucgccgacuacgaggagcuccgcgagcagcucuccuccgucuccuccuucgagcgcuucgagaucuuccccaaggaguccuccuggcccaaccacaccgucaccggcgucuccgccuccugcucccacaacggcaaguccuccuucuaccgcaaccuccucuggcucaccggcaagaacggccucuaccccaaccucuccaaguccuacgccaacaacaaggagaaggagguccucguccucuggggcguccaccacccccccaacaucggcgaccagcgcgcccucuaccacaccgagaacgccuacgucuccgucgucuccucccacuacucccgccgcuucacccccgagaucgccaagcgccccaagguccgcgaccaggagggccgcaucaacuacuacuggacccuccucgagcccggcgacaccaucaucuucgaggccaacggcaaccucaucgccccccgcuucgccuucgcccucucccgcggcuucggcuccggcaucaucaccuccaacgcccccauggacgagugcgacgccaagugccagaccccccagggcgccaucaacuccucccuccccuuccagaacguccaccccgucaccaucggcgagugccccaaguacguccgcuccaccaagcuccgcauggucaccggccuccgcaacauccccuccauccagucccgcggccucuucggcgccaucgccggcuucaucgagggcggcuggaccggcauggucgacggcugguacggcuaccaccaccagaacgagcagggcuccggcuacgccgccgaccagaaguccacccagaacgccaucaacggcaucaccaacaaggucaacuccgucaucgagaagaugaacacccaguucaccgccgucggcaaggaguucaacaagcucgagcgccgcauggagaaccucaacaagaaggucgacgacggcuuccucgacaucuggaccuacaacgccgagcuccucguccuccucgagaacgagcgcacccucgacuuccacgacuccaacgucaagaaccucuacgagaaggucaagucccagcucaagaacaacgccaaggagaucggcaacggcugcuucgaguucuaccacaagugcaacgacgagugcauggaguccgucaagaacggcaccuacgacuaccccaaguacuccgaggaguccaagcucaaccgcgagaagaucgacggcgucaagcucgaguccaugggcgucuaccagauccucgccaucuacuccaccgucgccuccucccucguccuccucgucucccucggcgccaucuccuucuggaugugcuccaacggcucccuccagugccgcaucugcaucuga

SEQ ID NO: 98017 - RNA, 1698 nt, Artificial Sequence; identical to SEQ ID NO: 97950
  derived and/or modified CDS sequence (opt2) from hemagglutinin__InfluenzaA__ABV30580

SEQ ID NO: 98018 - RNA, 1698 nt, Artificial Sequence; identical to SEQ ID NO: 97946
  derived and/or modified CDS sequence (opt2) from hemagglutinin__InfluenzaA__ABV30591

SEQ ID NO: 98019 - RNA, 1698 nt, Artificial Sequence; identical to SEQ ID NO: 97946
  derived and/or modified CDS sequence (opt2) from hemagglutinin__InfluenzaA__ABV30602

SEQ ID NO: 98020 - RNA, 1698 nt, Artificial Sequence
  derived and/or modified CDS sequence (opt2) from hemagglutinin__InfluenzaA__ABV30613
augaaggucaagcuccucauccuccucugcaccuucaccgccaccuacgccgacaccaucugcaucggcuaccacgccaacaacuccaccgacaccgucgacaccguccucgagaagaacgucaccgucacccacuccgucaaccuccucgaggacucccacaacggcaagcucugccuccucaagggcaucgccccccuccagcucggcaacugcuccgucgccggcuggauccucggcaaccccgagugcgagcuccucaucuccaaggaguccugguccuacaucgucgagacccccaaccccgagaacggcaccugcuaccccggcuacuucgccgacuacgaggagcuccgcgagcagcucuccuccgucuccuccuucgagcgcuucgagaucuuccccaaggaguccuccuggcccaaccacaccgucaccggcgucuccgccuccugcucccacaacggcaaguccuccuucuaccgcaaccuccucuggcucaccggcaagaacggccucuaccccaaccucuccaaguccuacgccaacaacaaggagaaggagguccucguccucuggggcguccaccacccccccaacaucggcgaccagcgcgcccucuaccacaccgagaacgccuacgucuccgucgucuccucccacuacucccgccgcuucacccccgagaucgccaagcgccccaagguccgcgaccaggagggccgcaucaacuacuacuggacccuccucgagcccggcgacaccaucaucuucgaggccaacggcaaccucaucgccccccgcuucgccuucgcccucucccgcggcuucggcuccggcaucaucaccuccaacgcccccauggacgagugcgacgccaagugccagaccccccagggcgccaucaacuccucccuccccuuccagaacguccaccccgucaccaucggcgagugccccaaguacguccgcuccaccaagcuccgcauggucaccggccuccgcaacauccccuccauccagucccgcggccucuucggcgccaucgccggcuucaucgagggcggcuggaccggcauggucgacggcugguacggcuaccaccaccagaacgagcagggcuccggcuacgccgccgaccagaaguccacccagaacgccaucaacggcaucaccaacaaggucaacuccgucaucgagaagaugaacacccaguucaccgccgucggcaaggaguucaacaagcucgagcgccgcaugaagaaccucaacaagaaggucgacgacggcuuccucgacaucuggaccuacaacgccgagcuccucguccuccucgagaacgagcgcacccucgacuuccacgacuccaacgucaagaaccucuacgagaaggucaagucccagcucaagaacaacgccaaggagaucggcaacggcugcuucgaguucuaccacaagugcaacgacgagugcauggaguccgucaagaacggcaccuacgacuaccccaaguacuccgaggaguccaagcucaaccgcgagaagaucgacggcgucaagcucgaguccaugggcgucuaccagauccucgccaucuacuccaccgucgccuccucccucguccuccucgucucccucggcgccaucuccuucuggaugugcuccaacggcucccuccagugccgcaucugcaucuga

SEQ ID NO: 98021 - RNA, 1698 nt, Artificial Sequence; identical to SEQ ID NO: 97946
  derived and/or modified CDS sequence (opt2) from hemagglutinin__InfluenzaA__ABV30624

SEQ ID NO: 98022 - RNA, 1701 nt, Artificial Sequence
  derived and/or modified CDS sequence (opt2) from hemagglutinin__InfluenzaA__ABV30646
augaagaccaucaucgcccucuccuacauccucugccucgucuucgcccagaagcuccccggcaacgacaacuccaccgccacccucugccucggccaccacgccguccccaacggcaccaucgucaagaccaucaccaacgaccagaucgaggucaccaacgccaccgagcucguccaguccuccuccaccggcgagaucugcgacuccccccaccagauccucgacggcgagaacugcacccucaucgacgcccuccucggcgacccccagugcgacggcuuccagaacaagaagugggaccucuucgucgagcgcuccaaggccuacuccaacugcuaccccuacgacguccccgacuacgccucccuccgcucccucgucgccuccuccggcacccucgaguucaacaacgaguccuucaacuggaccggcgucacccagaacggcaccuccuccgccugcauccgccgcuccaacaacuccuucuucucccgccucaacuggcucacccaccucaaguucaaguaccccgcccucaacgucaccaugcccaacaacgagaaguucgacaagcucuacaucuggggcguccaccaccccggcaccuacaacgaccagaucuuccucuacgcccaggccuccggccgcaucaccgucuccaccaagcgcucccagcagaccgucauccccaacaucggcucccgcccccgcguccgcaacauccccucccgcaucuccaucuacuggaccaucgucaagcccggcgacauccuccucaucaacuccaccggcaaccucaucgccccccgcggcuacuucaagauccgcuccggcaaguccuccaucaugcgcuccgacgcccccaucggcaagugcaacuccgagugcaucacccccaacggcuccauccccaacgacaagcccuuccagaacgucaaccgcaucaccuacggcgccugcccccgcuacgucaagcagaacacccucaagcucgccaccggcaugcgcaacguccccgagaagcagacccgcggcaucuucggcgccaucgccggcuucaucgagaacggcugggagggcauggucgacggcugguacggcuuccgccaccagaacuccgagggcaucggccaggccgccgaccucaaguccacccaggccgccaucgaccagaucaacggcaagcucaaccgccucaucggcaagaccaacgagaaguuccaccagaucgagaaggaguucuccgaggucgagggccgcauccaggaccucgagaaguacgucgaggacaccaagaucgaccucugguccuacaacgccgagcuccucgucgcccucgagaaccagcacaccaucgaccucaccgacuccgagaugaacaagcucuucgagaagaccaagaagcagcuccgcgagaacgccgaggacaugggcaacggcugcuucaagaucuaccacaagugcgacaacgccugcaucggcuccauccgcaacggcaccuacgaccacgacgucuaccgcgacgaggcccucaacaaccgcuuccagaucaagggcgucgagcucaaguccggcuacaaggacuggauccucuggaucuccuucgccaucuccugcuuccuccucugcgucgcccuccucggcuucaucaugugggccugccagaagggcaacauccgcugcaacaucugcaucuga

SEQ ID NO: 98023 - RNA, 1701 nt, Artificial Sequence
  derived and/or modified CDS sequence (opt2) from hemagglutinin__InfluenzaA__ABV30657
augaagaccaucaucgcccucuccuacauccucugccucgucuucgcccagaagcuccccggcaacgacaacuccaccgccacccucugccucggccaccacgccguccccaacggcaccaucgucaagaccaucaccaacgaccagaucgaggucaccaacgccaccgagcucguccaguccuccuccaccggcgagaucugcgacuccccccaccagauccucgacggcgagaacugcacccucaucgacgcccuccucggcgacccccagugcgacggcuuccagaacaagaagugggaccucuucgucgagcgcuccaaggccuacuccaacugcuaccccuacgacguccccgacuacgccucccuccgcucccucgucgccuccuccggcacccucgaguucaacaacgaguccuucaacuggaccggcgucacccagaacggcaccuccuccgccugcauccgccgcuccaacaacuccuucuucucccgccucaacuggcucacccaccucaaguucaaguaccccgcccucaacgucaccaugcccaacaacgagaaguucgacaagcucuacaucuggggcguccaccaccccggcaccgacaacgaccaggucuuccucuacgcccaggccuccggccgcaucaccgucuccaccaagcgcucccagcagaccgucauccccaacaucggcucccgcccccgcguccgcaacauccccucccgcaucuccaucuacuggaccaucgucaagcccggcgacauccuccucaucaacuccaccggcaaccucaucgccccccgcggcuacuucaagauccgcuccggcaaguccuccaucaugcgcuccgacgcccccaucggcaagugcaacuccgagugcaucacccccaacggcuccauccccaacgacaagcccuuccagaacgucaaccgcaucaccuacggcgccugcccccgcuacgucaagcagaacacccucaagcucgccaccggcaugcgcaacguccccgagaagcagacccgcggcaucuucggcgccaucgccggcuucaucgagaacggcugggagggcauggucgacggcugguacggcuuccgccaccagaacuccgagggcaucggccaggccgccgaccucaaguccacccaggccgccaucgaccagaucaacggcaagcucaaccgccucaucggcaagaccaacgagaaguuccaccagaucgagaaggaguucuccgaggucgagggccgcauccaggaccucgagaaguacgucgaggacaccaagaucgaccucugguccuacaacgccgagcuccucgucgcccucgagaaccagcacaccaucgaccucaccgacuccgagaugaacaagcucuucgagaagaccaagaagcagcuccgcgagaacgccgaggacaugggcaacggcugcuucaagaucuaccacaagugcgacaacgccugcaucggcuccauccgcaacggcaccuacgaccacgacgucuaccgcgacgaggcccucaacaaccgcuuccagaucaagggcgucgagcucaaguccggcuacaaggacuggauccucuggaucuccuucgccaucuccugcuuccuccucugcgucgcccuccucggcuucaucaugugggccugccagaagggcaacauccgcugcaacaucugcaucuga

SEQ ID NO: 98024 - RNA, 1701 nt, Artificial Sequence; identical to SEQ ID NO: 98023
  derived and/or modified CDS sequence (opt2) from hemagglutinin__InfluenzaA__ABV45860

SEQ ID NO: 98025 - RNA, 1698 nt, Artificial Sequence; identical to SEQ ID NO: 97991
  derived and/or modified CDS sequence (opt2) from hemagglutinin__InfluenzaA__ABV45871

SEQ ID NO: 98026 - RNA, 1698 nt, Artificial Sequence; identical to SEQ ID NO: 97950
  derived and/or modified CDS sequence (opt2) from hemagglutinin__InfluenzaA__ABV45882

SEQ ID NO: 98027 - RNA, 1698 nt, Artificial Sequence; identical to SEQ ID NO: 97957
  derived and/or modified CDS sequence (opt2) from hemagglutinin__InfluenzaA__ABV45893

SEQ ID NO: 98028 - RNA, 1701 nt, Artificial Sequence; identical to SEQ ID NO: 97765
  derived and/or modified CDS sequence (opt2) from hemagglutinin__InfluenzaA__ABV45904

SEQ ID NO: 98029 - RNA, 1698 nt, Artificial Sequence; identical to SEQ ID NO: 97957
  derived and/or modified CDS sequence (opt2) from hemagglutinin__InfluenzaA__ABV45926

SEQ ID NO: 98030 - RNA, 1698 nt, Artificial Sequence
  derived and/or modified CDS sequence (opt2) from hemagglutinin__InfluenzaA__ABV45937
augaaggucaagcuccucguccuccucugcaccuucaccgccaccuacgccgacaccaucugcaucggcuaccacgccaacaacuccaccgacaccgucgacaccguccucgagaagaacgucaccgucacccacuccgucaaccuccucgaggacucccacaacggcaagcucugccuccucaagggcaucgccccccuccagcucggcaacugcuccgucgccggcuggauccucggcaaccccgagugcgagcuccucaucuccaaggaguccugguccuacaucgucgagacccccaaccccgagaacggcaccugcuaccccggcuacuucgccgacuacgaggagcuccgcgagcagcucuccuccgucuccuccuucgagcgcuucgagaucuuccccaaggaguccuccuggcccaaccacaccgucaccggcgucuccgccuccugcucccacaacggcaaguccuccuucuaccgcaaccuccucuggcucaccggcaagaacggccucuaccccaaccucuccaaguccuacgccaacaacaaggagaaggagguccucguccucuggggcguccaccacccccccaacaucggcgaccagcgcgcccucuaccacaccgagaacgccuacgucuccgucgucuccucccacuacucccgccgcuucacccccgagaucgccaagcgccccaagguccgcgaccaggagggccgcaucaacuacuacuggacccuccucgagcccggcgacaccaucaucuucgagaccaacggcaaccucaucgccccccgcuucgccuucgcccucucccgcggcuucggcuccggcaucaucaccuccaacgcccccaugggcgagugcgacgccaagugccagaccccccagggcgccaucaacuccucccuccccuuccagaacguccaccccgucaccaucggcgagugccccaaguacguccgcuccgccaagcuccgcauggucaccggccuccgcaacauccccuccauccagucccgcggccucuucggcgccaucgccggcuucaucgagggcggcuggaccggcauggucgacggcugguacggcuaccaccaccagaacgagcagggcuccggcuacgccgccgaccagaaguccacccagaacgccaucaacggcaucaccaacaaggucaacuccgucaucgagaagaugaacacccaguucaccgccgucggcaaggaguucaacaagcucgagcgccgcauggagaaccucaacaagaaggucgacgacggcuuccucgacaucuggaccuacaacgccgagcuccucguccuccucgagaacgagcgcacccucgacuuccacgacuccaacgucaagaaccucuacgagaaggucaagucccagcucaagaacaacgccaaggagaucggcaacggcugcuucgaguucuaccacaagugcaacgacgagugcauggaguccgucaagaacggcaccuacgacuaccccaaguacuccgaggaguccaagcucaaccgcgagaagaucgacggcgucaagcucgaguccaugggcgucuaccagauccucgccaucuacuccaccgucgccuccucccucguccuccucgucucccucggcgccaucuccuucuggaugugcuccaacggcucccuccagugccgcaucugcaucuga

SEQ ID NO: 98031 - RNA, 1698 nt, Artificial Sequence; identical to SEQ ID NO: 97983
  derived and/or modified CDS sequence (opt2) from hemagglutinin__InfluenzaA__ABV45948

SEQ ID NO: 98032 - RNA, 1698 nt, Artificial Sequence; identical to SEQ ID NO: 97950
  derived and/or modified CDS sequence (opt2) from hemagglutinin__InfluenzaA__ABV45959

SEQ ID NO: 98033 - RNA, 1701 nt, Artificial Sequence
  derived and/or modified CDS sequence (opt2) from hemagglutinin__InfluenzaA__ABV45970
augaagaccaucaucgcccucuccuacauccucugccucgucuucgcccagaagcuccccggcaacgacaacuccaccgccacccucugccucggccaccacgccguccccaacggcaccaucgucaagaccaucaccaacgaccagaucgaggucaccaacgccaccgagcucguccaguccuccuccaccggcgagaucugcgacuccccccaccagauccucgacggcgagaacugcacccucaucgacgcccuccucggcgacccccagugcgacggcuuccagaacaagaagugggaccucuucgucgagcgcuccaaggccuacuccaacugcuaccccuacgacguccccgaccacgccucccuccgcucccucgucgccuccuccggcacccucgaguucaacaacgaguccuucaacuggaccggcgucacccagaacggcaccuccuccgccugcauccgccgcuccaacaacuccuucuucucccgccucaacuggcucacccaccucaaguucaaguaccccgcccucaacgucaccaugcccaacaacgagaaguucgacaagcucuacaucuggggcguccaccaccccggcaccgacaacgaccagaucuuccucuacgcccaggccuccggccgcaucaccgucuccaccaagcgcucccagcagaccgucauccccaacaucggcucccgcccccgcguccgcaacauccccucccgcaucuccaucuacuggaccaucgucaagcccggcgacauccuccucaucaacuccaccggcaaccucaucgccccccgcggcuacuucaagauccaguccggcaaguccuccaucaugcgcuccgacgcccccaucggcaagugcaacuccgagugcaucacccccaacggcuccauccccaacgacaagcccuuccagaacgucaaccgcaucaccuacggcgccugcccccgcuacgucaagcagaacacccucaagcucgccaccggcaugcgcaacguccccgagaagcagacccgcggcaucuucggcgccaucgccggcuucaucgagaacggcugggagggcauggucgacggcugguacggcuuccgccaccagaacuccgagggcaucggccaggccgccgaccucaaguccacccaggccgccaucgaccagaucaacggcaagcucaaccgccucaucggcaagaccaacgagaaguuccaccagaucgagaaggaguucuccgaggucgagggccgcauccaggaccucgagaaguacgucgaggacaccaagaucgaccucugguccuacaacgccgagcuccucgucgcccucgagaaccagcacaccaucgaccucaccgacuccgagaugaacaagcucuucgagaagaccaagaagcagcuccgcgagaacgccgaggacaugggcaacggcugcuucaagaucuaccacaagugcgacaacgccugcaucggcuccauccgcaacggcaccuacgaccacgacgucuaccgcgacgaggcccucaacaaccgcuuccagaucaagggcgucgagcucaaguccggcuacaaggacuggauccucuggaucuccuucgccaucuccugcuuccuccucugcgucgcccuccucggcuucaucaugugggccugccagaagggcaacauccgcugcaacaucugcaucuga

SEQ ID NO: 98034 - RNA, 1701 nt, Artificial Sequence
  derived and/or modified CDS sequence (opt2) from hemagglutinin__InfluenzaA__ABV45981
augaagaccaucaucgcccucuccuacauccucugccucgucuucgcccagaagcuccccggcaacgacaacuccaccgccacccucugccucggccaccacgccguccccaacggcaccaucgucaagaccaucaccaacgaccagaucgaggucaccaacgccaccgagcucguccaguccuccuccaccggcgagaucugcgacuccccccaccagauccucgacggcgagaacugcacccucaucgacgcccuccucggcgacccccagugcgacggcuuccagaacaagaagugggaccucuucgucgagcgcuccaaggccuacuccaacugcuaccccuacgacguccccgacuacgccucccuccgcucccucgucgccuccuccggcacccucgaguucaacaacgaguccuucaacuggaccggcgucacccagaacggcaccuccuccgccugcauccgccgcuccaacaacuccuucuucucccgccucaacuggcucacccaccucaaguucaaguaccccgcccucaacgucaccaugcccaacaacgagaaguucgacaagcucuacaucuggggcguccaccaccccggcaccgacaacgaccagaucuuccucuacgcccaggccuccggccgcaucaccgucuccaccaagcgcucccagcagaccgucauccccaacaucggcucccgcccccgcguccgcaacauccccucccgcaucuccaucuacuggaccaucgucaagcccggcgacauccuccucaucaacuccaccggcaaccucaucgccccccgcggcuacuucaagauccgcuccggcaaguccuccaucaugcgcuccgacgcccccaucggcaagugcaacuccgagugcaucacccccaacggcuccauccccaacgacaagcccuuccagaacgucaaccgcaucaccuacggcgccugcccccgcuacgucaagcagaacacccucaagcucgccaccggcaugcgcaacguccccgagaagcagacccgcggcaucuucggcgccaucgccggcuucaucgagaacggcugggagggcauggucgacggcugguacggcuuccgccaccagaacuccgagggcaucggccaggccgccgaccucaaguccacccaggccgccaucgaccagaucaacggcaagcucaaccgccucaucggcaagaccaacgagaaguuccaccagaucgagaaggaguucuccgaggucgagggccgcauccaggaccucgagaaguacgucgaggacaccaagaucgaccucugguccuacaacgccgagcuccucgucgcccucgagaaccagcacaccaucgaccucaccgacuccgagaugaacaagcucuucgagaagaccaagaagcagcuccgcgagaacgccgaggacaugggcaacggcugcuucaagaucuaccacaagugcgacaacgccugcaucggcuccauccgcaacggcaccuacgaccacgacgucuaccgcgacgaggcccucaacaaccgcuuccagaucaagggcgucgagcucaaguccggcuacaaggacuggaucaucuggaucuccuucgccaucuccugcuuccuccucugcgucgcccuccucggcuucaucaugugggccugccagaagggcaacauccgcugcaacaucugcaucuga

SEQ ID NO: 98035 - RNA, 1698 nt, Artificial Sequence
  derived and/or modified CDS sequence (opt2) from hemagglutinin__InfluenzaA__ABV82551
augaaggucaagcuccucguccuccucugcaccuucaccgccaccuacgccgacaccaucugcaucggcuaccacgccaacaacuccaccgacaccgucgacaccguccucgagaagaacgucaccgucacccacuccgucaaccuccucgaggacucccacaacggcaagcucugccuccucaagggcaucgccccccuccagcucggcaacugcuccgucgccggcuggauccucggcaaccccgagugcgagcuccucaucuccaaggaguccugguccuacaucgucgagacccccaaccccgagaacggcaccugcuaccccggcuacuucgccgacuacgaggagcuccgcgagcagcucuccuccgucuccuccuucgagcgcuucgagaucuuccccaaggaguccuccuggcccaaccacaccgucaccggcgucuccgccuccugcucccacaacggcgaguccuccuucuaccgcaaccuccucuggcucaccgagaagaacggccucuaccccaaccucuccaaguccuacgccaacaacaaggagaaggagguccucguccucuggggcguccaccacccccccaacaucggcgaccagcgcgcccucuaccacaccgagaacgccuacgucuccgucgucuccucccacuacucccgccgcuucacccccgagaucgccaagcgccccaagguccgcgaccaggagggccgcaucaacuacuacuggacccuccucgagcccggcgacaccaucaucuucgaggccaacggcaaccucaucgccccccgcuucgccuucgcccucucccgcggcuucggcuccggcaucaucaccuccaacgcccccauggacaagugcgacgccaagugccagaccccccagggcgccaucaacuccucccuccccuuccagaacguccaccccgucaccaucggcgagugccccaaguacguccgcuccaccaagcuccgcauggucaccggccuccgcaacauccccuccauccagucccgcggccucuucggcgccaucgccggcuucaucgagggcggcuggaccggcauggucgacggcugguacggcuaccaccaccagaacgagcagggcuccggcuacgccgccgaccagaaguccacccagaacgccaucaacggcaucaccaacaaggucaacuccgucaucgagaagaugaacacccaguucaccgccgucggcaaggaguucaacaagcucgagcgccgcauggagaaccucaacaagaaggucgacgacggcuuccucgacaucuggaccuacaacgccgagcuccucguccuccucgagaacgagcgcacccucgacuuccacgacuccaacgucaagaaccucuacgagaaggucaagucccagcucaagaacaacgccaaggagaucggcaacggcugcuucgaguucuaccacaagugcaacgacgagugcauggaguccgucaagaacggcaccuacgacuaccccaaguacuccgaggaguccaagcucaaccgcgagaagaucgacggcgucaagcucgaguccaugggcgucuaccagauccucgccaucuacuccaccgucgccuccucccucguccuccucgucucccucggcgccaucuccuucuggaugugcuccaacggcucccuccagugccgcaucugcaucuga

SEQ ID NO: 98036 - RNA, 1701 nt, Artificial Sequence; identical to SEQ ID NO: 97964
  derived and/or modified CDS sequence (opt2) from hemagglutinin__InfluenzaA__ABV82562

SEQ ID NO: 98037 - RNA, 1701 nt, Artificial Sequence; identical to SEQ ID NO: 97964
  derived and/or modified CDS sequence (opt2) from hemagglutinin__InfluenzaA__ABW36168

SEQ ID NO: 98038 - RNA, 1698 nt, Artificial Sequence; identical to SEQ ID NO: 97950
  derived and/or modified CDS sequence (opt2) from hemagglutinin__InfluenzaA__ABW36179

SEQ ID NO: 98039 - RNA, 1698 nt, Artificial Sequence; identical to SEQ ID NO: 97993
  derived and/or modified CDS sequence (opt2) from hemagglutinin__InfluenzaA__ABW36190

SEQ ID NO: 98040 - RNA, 1698 nt, Artificial Sequence; identical to SEQ ID NO: 97950
  derived and/or modified CDS sequence (opt2) from hemagglutinin__InfluenzaA__ABW36201

SEQ ID NO: 98041 - RNA, 1698 nt, Artificial Sequence
  derived and/or modified CDS sequence (opt2) from hemagglutinin__InfluenzaA__ABW36212
augaaggucaagcuccucguccuccucugcaccuucaccgccaccuacgccgacaccaucugcaucggcuaccacgccaacaacuccaccgacaccgucgacaccguccucgagaagaacgucaccgucacccacuccgucaaccuccucgaggacucccacaacggcaagcucugccuccucaagggcaucgccccccuccagcucggcaacugcuccgucgccggcuggauccucggcaaccccgagugcgagcuccucaucuccaaggaguccugguccuacaucgucgagacccccaaccccgagaacggcaccugcuaccccggcuacuucgccgacuacgaggagcuccgcgagcagcucuccuccgucuccuccuucgagcgcuucgagaucuuccccaaggagaacuccuggcccaaccacaccgucaccggcgucuccgccuccugcucccacaacggcaaguccuccuucuaccgcaaccuccucuggcucaccggcaagaacggccucuaccccaaccucuccaaguccuacgccaacaacaaggagaaggagguccucguccucuggggcguccaccacccccccaacaucggcgaccagcgcgcccucuaccacaccgagaacgccuacgucuccgucgucuccucccacuacucccgccgcuucacccccgagaucgccaagcgccccaagguccgcgaccaggagggccgcaucaacuacuacuggacccuccucgagcccggcgacaccaucaucuucgaggccaacggcaaccucaucgccccccgcuucgccuucgcccucucccgcggccucggcuccggcaucaucaccuccaacgcccccauggacgagugcgacgccaagugccagaccccccagggcgccaucaacuccucccuccccuuccagaacguccaccccgucaccaucggcgagugccccaaguacguccgcuccgccaagcuccgcauggucaccggccuccgcaacauccccuccauccagucccgcggccucuucggcgccaucgccggcuucaucgagggcggcuggaccggcauggucgacggcugguacggcuaccaccaccagaacgagcagggcuccggcuacgccgccgaccagaaguccacccagaacgccaucaacggcaucaccaacaaggucaacuccgucaucgagaagaugaacacccaguucaccgccgucggcaaggaguucaacaagcucgagcgccgcauggagaaccucaacaagaaggucgacgacggcuuccucgacaucuggaccuacaacgccgagcuccucguccuccucgagaacgagcgcacccucgacuuccacgacuccaacgucaagaaccucuacgagaaggucaagggccagcucaagaacaacgccaaggagaucggcaacggcugcuucgaguucuaccacaagugcaacgacgagugcauggaguccgucaagaacggcaccuacgacuaccccaaguacuccgaggaguccaagcucaaccgcgagaagaucgacggcgucaagcucgaguccaugggcgucuaccagauccucgccaucuacuccaccgucgccuccucccucguccuccucgucucccucggcgccaucuccuucuggaugugcuccaacggcucccuccagugccgcaucugcaucuga

SEQ ID NO: 98042 - RNA, 1698 nt, Artificial Sequence; identical to SEQ ID NO: 97946
  derived and/or modified CDS sequence (opt2) from hemagglutinin__InfluenzaA__ABW36223

SEQ ID NO: 98043 - RNA, 1698 nt, Artificial Sequence; identical to SEQ ID NO: 97946
  derived and/or modified CDS sequence (opt2) from hemagglutinin__InfluenzaA__ABW36245

SEQ ID NO: 98044 - RNA, 1698 nt, Artificial Sequence; identical to SEQ ID NO: 97946
  derived and/or modified CDS sequence (opt2) from hemagglutinin__InfluenzaA__ABW36267

SEQ ID NO: 98045 - RNA, 1698 nt, Artificial Sequence; identical to SEQ ID NO: 97950
  derived and/or modified CDS sequence (opt2) from hemagglutinin__InfluenzaA__ABW36278

SEQ ID NO: 98046 - RNA, 1698 nt, Artificial Sequence
  derived and/or modified CDS sequence (opt2) from hemagglutinin__InfluenzaA__ABW36289
augaagcucaagcuccucguccuccucugcaccuucaccgccaccuacgccgacaccaucugcaucggcuaccacgccaacaacuccaccgacaccgucgacaccguccucgagaagaacgucaccgucacccacuccgucaaccuccucgaggacucccacaacggcaagcucugccuccucaagggcaucgccccccuccagcucggcaacugcuccgucgccggcuggauccucggcaaccccgagugcgagcuccucaucuccaaggaguccugguccuacaucgucgagacccccaaccccgagaacggcaccugcuaccccggcuacuucgccgacuacgaggagcuccgcgagcagcucuccuccgucuccuccuucgagcgcuucgagaucuuccccaaggaguccuccuggcccaaccacaccgucaccggcgucuccgccuccugcucccacaacggcaaguccuccuucuaccgcaaccuccucuggcucaccggcaagaacggccucuaccccaaccucuccaaguccuacgccaacaacaaggagaaggagguccucguccucuggggcguccaccacccccccaacaucggcgaccagcgcgcccucuaccacaccgagaacgccuacgucuccgucgucuccucccacuacucccgccgcuucacccccgagaucgccaagcgccccaagguccgcgaccaggagggccgcaucaacuacuacuggacccuccucgagcccggcgacaccaucaucuucgaggccaacggcaaccucaucgccccccgcuucgccuucgcccucucccgcggcuucggcuccggcaucaucaccuccaacgcccccauggacgagugcgacgccaagugccagaccccccagggcgccaucaacuccucccuccccuuccagaacguccaccccgucaccaucggcgagugccccaaguacguccgcuccaccaagcuccgcauggucaccggccuccgcaacauccccuccauccagucccgcggccucuucggcgccaucgccggcuucaucgagggcggcuggaccggcauggucgacggcugguacggcuaccaccaccagaacgagcagggcuccggcuacgccgccgaccagaaguccacccagaacgccaucaacggcaucaccaacaaggucaacuccgucaucgagaagaugaacacccaguucaccgccgucggcaaggaguucaacaagcucgagcgccgcauggagaaccucaacaagaaggucgacgacggcuuccucgacaucuggaccuacaacgccgagcuccucguccuccucgagaacgagcgcacccucgacuuccacgacuccaacgucaagaaccucuacgagaaggucaagucccagcucaagaacaacgccaaggagaucggcaacggcugcuucgaguucuaccacaagugcaacgacgagugcauggaguccgucaagaacggcaccuacgacuaccccaaguacuccgaggaguccaagcucaaccgcgagaagaucgacggcgucaagcucgaguccaugggcgucuaccagauccucgccaucuacuccaccgucgccuccucccucguccuccucgucucccucggcgccaucuccuucuggaugugcuccaacggcucccuccagugccgcaucugcaucuga

SEQ ID NO: 98047 - RNA, 1698 nt, Artificial Sequence; identical to SEQ ID NO: 97957
  derived and/or modified CDS sequence (opt2) from hemagglutinin__InfluenzaA__ABW36300

SEQ ID NO: 98048 - RNA, 1701 nt, Artificial Sequence
  derived and/or modified CDS sequence (opt2) from hemagglutinin__InfluenzaA__ABW36311
augaaggccaagcuccucguccuccucugcgcccucuccgccaccgacgccgacaccaucugcaucggcuaccacgccaacaacuccaccgacaccgucgacaccguccucgagaagaacgucaccgucacccacuccgucaaccuccucgaggacucccacaacggcaagcucugccgccucaagggcaucgccccccuccagcucggcaagugcuccaucgccggcuggauccucggcaaccccgagugcgagucccucuucuccaagaaguccugguccuacaucgccgagacccccaacuccgagaacggcaccugcuaccccggcuacuucgccgacuacgaggagcuccgcgagcagcucuccuccgucuccuccuucgagcgcuucgagaucuuccccaaggagcgcuccuggcccaagcacaacgucacccgcggcgucaccgccuccugcucccacaagggcaaguccuccuucuaccgcaaccuccucuggcucaccgagaagaacggcuccuaccccaaccucuccaaguccuacgucaacaacaaggagaaggagguccucguccucuggggcguccaccaccccuccaacaucgaggaccagaagaccaucuaccgcaaggagaacgccuacgucuccgucgucuccuccaacuacaaccgccgcuucacccccgagaucgccaagcgccccaagguccgcgaccaggagggccgcaucaacuacuacuggacccuccucgagcccggcgacaccaucaucuucgaggccaacggcaaccucaucgcccccugguacgccuucgcccucucccgcggcuucggcuccggcaucaucaccuccaacgccuccauggacgagugcgacaccaagugccagaccccccagggcgccaucaacuccucccuccccuuccagaacguccaccccgucaccaucggcgagugccccaaguacguccgcuccaccaagcuccgcauggucaccggccuccgcaacauccccuccauccagucccgcggccucuucggcgccaucgccggcuucaucgagggcggcuggaccggcaugaucgacggcugguacggcuaccaccaccagaacgagcagggcuccggcuacgccgccgaccagaaguccacccagaacgccaucaacggcaucaccaacaaggucaacuccgucaucgagaagaugaacacccaguucaccgccgucggcaaggaguucaacaagcucgagaagcgcauggagaaccucaacaagaaggucgacgacggcuuccucgacaucuggaccuacaacgccgagcuccucguccuccucgagaacgagcgcacccucgacucccacgacuccaacgucaagaaccucuacgagaaggucaagucccagcucaagaacaacgccaaggagaucggcaacggcugcuucgaguucuaccacaagugcaacaacgagugcauggaguccgucaagaacggcaccuacgacuaccccaaguacuccgaggaguccaagcucaaccgcgagaagaucgacggcgucaagcucgaguccaugggcgucuaccagauccucgccaucuacuccaccgucgccuccucccucguccuccucgucucccucggcgccaucuccuucuggaugugcuccaacggcucccuccagugccgcaucugcaucuga

SEQ ID NO: 98049 - RNA, 1701 nt, Artificial Sequence
  derived and/or modified CDS sequence (opt2) from hemagglutinin__InfluenzaA__ABW38363
augaagaccaucaucgcccucuccuacauccucugccucgucuucgcccagaagcuccccggcaacgacaacuccaccgccacccucugccucggccaccacgccguccccaacggcaccaucgucaagaccaucaccaacgaccagaucgaggucaccaacgccaccgagcucguccaguccuccuccaccggcgagaucugcgacuccccccaccagauccucgacggcgagaacugcacccucaucgacgcccuccucggcgacccccagugcgacggcuuccagaacaagaagugggaccucuucgucgagcgcuccaaggccuacuccaacugcuaccccuacgacguccccgacuacgccucccuccgcucccucgucgccuccuccggcacccucgaguucaacaacgaguccuucaacuggaccggcgucacccagaacggcaccuccuccgccugcaagcgccgcuccaacaacuccuucuucucccgccucaacuggcucacccaccucaaguucaaguaccccgcccucaacgucaccaugcccaacaacgagaaguucgacaagcucuacaucuggggcguccaccaccccggcaccgacaacgaccagaucuuccucuacgcccaggccuccggccgcaucaccgucuccaccaagcgcucccagcagaccgucauccccaacaucggcucccgcccccgcguccgcaacauccccucccgcaucuccaucuacuggaccaucgucaagcccggcgacauccuccucaucaacuccaccggcaaccucaucgccccccgcggcuacuucaagauccgcuccggcaaguccuccaucaugcgcuccgacgcccccaucggcaagugcaacuccgagugcaucacccccaacggcuccauccccaacgacaagcccuuccagaacgucaaccgcaucaccuacggcgccugcccccgcuacgucaagcagaacacccucaagcucgccaccggcaugcgcaacguccccgagaagcagacccgcggcaucuucggcgccaucgccggcuucaucgagaacggcugggagggcauggucgacggcugguacggcuuccgccaccagaacuccgagggcaucggccaggccgccgaccucaaguccacccaggccgccaucgaccagaucaacggcaagcucaaccgccucaucggcaagaccaacgagaaguuccaccagaucgagaaggaguucuccgaggucgagggccgcauccaggaccucgagaaguacgucgaggacaccaagaucgaccucugguccuacaacgccgagcucaucgucgcccucgagaaccagcacaccaucgaccucaccgacuccgagaugaacaagcucuucgagcgcaccaagaagcagcuccgcgagaacgccgaggacaugggcaacggcugcuucaagaucuaccacaagugcgacaacgccugcaucggcuccauccgcaacggcaccuacgaccacgacgucuaccgcgacgaggcccucaacaaccgcuuccagaucaagggcgucgagcucaaguccggcuacaaggacuggauccucuggaucuccuucgccaucuccugcuuccuccucugcgucgcccuccucggcuucaucaugugggccugccagaagggcaacauccgcugcaacaucugcaucuga

SEQ ID NO: 98050 - RNA, 1698 nt, Artificial Sequence
  derived and/or modified CDS sequence (opt2) from hemagglutinin__InfluenzaA__ABW39777
augaaggucaagcuccucguccuccucugcaccuucaccgccaccuacgccgacaccaucugcaucggcuaccacgccaacaacuccaccgacaccgucgacaccguccucgagaagaacgucaccgucacccacuccgucaaccuccucgaggacucccacaacggcaagcucugccuccucaagggcaucgccccccuccagcucggcaacugcuccgucgccggcuggauccucggcaaccccgagugcgagcuccucaucuccaaggaguccugguccuacaucgucgagacccccaaccccgagaacggcaccugcuaccccggcuacuucgccgacuacgaggagcuccgcgagcagcucuccuccgucuccuccuucgagcgcuucgagaucuuccccaaggagaacuccuggcccaaccacaccgucaccggcgucuccgccuccugcucccacaacggcaaguccuccuucuaccgcaaccuccucuggcucaccggcaagaacggccucuaccccaaccucuccaaguccuacgccaacaacaaggagaaggagguccucguccucuggggcguccaccacccccccaacaucggcgaccagcgcgcccucuaccacaccgagaacgccuacgucuccgucgucuccucccacuacucccgccgcuucacccccgagaucgccaagcgccccaagguccgcgaccaggagggccgcaucaacuacuacuggacccuccucgagcccggcgacaccaucaucuucgaggccaacggcaaccucaucgccccccgcuucgccuucgcccucucccgcggccucggcuccggcaucaucaccuccaacgcccccauggacgagugcgacgccaagugccagaccccccagggcgccaucaacuccucccuccccuuccagaacguccaccccgucaccaucggcgagugccccaaguacguccgcuccgccaagcuccgcauggucaccggccuccgcaacauccccuccauccagucccgcggccucuucggcgccaucgccggcuucaucgagggcggcuggaccggcauggucgacggcugguacggcuaccaccaccagaacgagcagggcuccggcuacgccgccgaccagaaguccacccagaacgccaucaacggcaucaccaacaaggucaacuccgucaucgagaagaugaacacccaguucaccgccgucggcaaggaguucaacaagcucgagcgccgcauggagaaccucaacaagaaggucgacgacggcuuccucgacaucuggaccuacaacgccgagcuccucguccuccucgagaacgagcgcacccucgacuuccacgacuccaacgucaagaaccucuacgagaaggucaagucccagcucaagaacaacgccaaggagaucggcaacggcugcuucgaguucuaccacaagugcaacgacgagugcauggaguccgucaagaacggcaccuacgacuaccccaaguacuccgaggaguccaagcucaaccgcgagaagaucgacggcgucaagcucgaguccaugggcgucuaccagauccucgccaucuacuccaccgucgccuccucccucguccuccucgucucccucggcgccaucuccuucuggaugugcuccaacggcucccuccagugccgcaucugcaucuga

SEQ ID NO: 98051 - RNA, 1698 nt, Artificial Sequence; identical to SEQ ID NO: 97950
  derived and/or modified CDS sequence (opt2) from hemagglutinin__InfluenzaA__ABW39806

SEQ ID NO: 98052 - RNA, 1698 nt, Artificial Sequence; identical to SEQ ID NO: 97957
  derived and/or modified CDS sequence (opt2) from hemagglutinin__InfluenzaA__ABW39817

SEQ ID NO: 98053 - RNA, 1698 nt, Artificial Sequence
  derived and/or modified CDS sequence (opt2) from hemagglutinin__InfluenzaA__ABW39828
augaaggucaagcuccucguccuccucugcaccuucaccgccaccuacgccgacaccaucugcaucggcuaccacgccaacaacuccaccgacaccgucgacaccguccucgagaagaacgucaccgucacccacuccgucaaccuccucgaggacaaccacaacggcaagcucugccuccucaagggcaucgccccccuccagcucggcaacugcuccgucgccggcuggauccucggcaaccccgagugcgagcuccucaucuccaaggaguccugguccuacaucgucgagaagcccaaccccgagaacggcaccugcuaccccggccacuucgccgacuacgaggagcuccgcgagcagcucuccuccgucuccuccuucgagcgcuucgagaucuuccccaaggaguccuccuggcccaaccacaccgucaccggcgucuccgccuccugcucccacaacggcgaguccuccuucuacaagaaccuccucuggcucaccggcaagaacggccucuaccccaaccucuccaaguccuacgccaacaacaaggagaaggagguccucguccucuggggcguccaccacccccccaacaucggcgaccagaugacccucuaccacaaggagaacgccuacgucuccgucgucuccucccacuacucccgcaaguucacccccgagaucgccaagcgccccaagguccgcgaccaggagggccgcaucaacuacuacuggacccuccucgagcccggcgacaccaucaucuucgaggccaacggcaaccucaucgccccccgcuacgccuucgcccucucccgcggcuucggcuccggcaucaucaacuccaacgcccccauggacgagugcgacgccaagugccagaccccccagggcgccaucaacuccucccuccccuuccagaacguccaccccgucaccaucggcgagugccccaaguacguccgcuccgccaagcuccgcauggucaccggccuccgcaacauccccuccauccagucccgcggccucuucggcgccaucgccggcuucaucgagggcggcuggaccggcauggucgacggcugguacggcuaccaccaccagaacgagcagggcuccggcuacgccgccgaccagaaguccacccagaacgccaucaacggcaucaccaacaaggucaacuccgucaucgagaagaugaacacccaguucaccgccgucggcaaggaguucaacaagcucgagcgccgcauggagaaccucaacaagaaggucgacgacggcuucaucgacgucuggaccuacaacgccgagcuccucguccuccucgagaacgagcgcacccucgacuuccacgacuccaacgucaagaaccucuacgagaaggucaagaaccagcucaagaacaacgccaaggagaucggcaacggcugcuucgaguucuaccacaagugcaacgacgagugcauggaguccgucaagaacggcaccuacgacuaccccaaguacuccgaggaguccaagcucucccgcgagaagaucgacggcgucaagcucgaguccaugggcgucuaccagauccucgccaucuacuccaccgucgccuccucccucguccuccucgucucccucggcgccaucuccuucuggaugugcuccaacggcucccuccagugccgcaucugcaucuga

SEQ ID NO: 98054 - RNA, 1698 nt, Artificial Sequence
  derived and/or modified CDS sequence (opt2) from hemagglutinin__InfluenzaA__ABW39839
augaaggucaagcuccucguccuccucugcaccuucaccgccaccuacgccgacaccaucugcaucggcuaccacgccaacaacuccaccgacaccgucgacaccguccucgagaagaacgucaccgucacccacuccgucaaccuccucgaggacucccacaacggcaagcucugccuccucaagggcaucgccccccuccagcucggcaacugcuccgucgccggcuggauccucggcaaccccgagugcgagcuccucaucuccaaggaguccugguccuacaucgucgagacccccaaccccgagaacggcaccugcuaccccggcuacuucgccgacuacgaggagcuccgcgagcagcucuccuccgucuccuccuucgagcgcuucgagaucuuccccaaggaguccuccuggcccaaccacaccgucaccggcgucuccgccuccugcucccacaacggcaaguccuccuucuaccgcaaccuccucuggcucaccggcaagaacggccucuaccccaaccucuccaaguccuacuccaacaacaaggagaaggagguccucguccucuggggcguccaccacccccccaacaucggcgaccagcgcgcccucuaccacaccgagaacgccuacgucuccgucgucuccucccacuacucccgccgcuucacccccgagaucgccaagcgccccaagguccgcgaccaggagggccgcaucaacuacuacuggacccuccucgagcccggcgacaccaucaucuucgaggccaacggcaaccucaucgccccccgcuucgccuucgcccucucccgcggcuucggcuccggcaucaucaccuccaacgcccccaugggcgagugcgacgccaagugccagaccccccagggcgccaucaacuccucccuccccuuccagaacguccaccccgucaccaucggcgagugccccaaguacguccgcuccgccaagcuccgcauggucaccggccuccgcaacauccccuccauccagucccgcggccucuucggcgccaucgccggcuucaucgagggcggcuggaccggcauggucgacggcugguacggcuaccaccaccagaacgagcagggcuccggcuacgccgccgaccagaaguccacccagaacgccaucaacggcaucaccaacaaggucaacuccgucaucgagaagaugaacacccaguucaccgccgucggcaaggaguucaacaagcucgagcgccgcauggagaaccucaacaagaaggucgacgacggcuuccucgacaucuggaccuacaacgccgagcuccucguccuccucgagaacgagcgcacccucgacuuccacgacuccaacgucaagaaccucuacgagaaggucaagucccagcucaagaacaacgccaaggagaucggcaacggcugcuucgaguucuaccacaagugcaacgacgagugcauggaguccguccgcaacggcaccuacgacuaccccaaguacuccgaggaguccaagcucaaccgcgagaagaucgacggcgucaagcucgaguccaugggcgucuaccagauccucgccaucuacuccaccgucgccuccucccucguccuccucgucucccucggcgccaucuccuucuggaugugcuccaacggcucccuccagugccgcaucugcaucuga

SEQ ID NO: 98055 - RNA, 1698 nt, Artificial Sequence
  derived and/or modified CDS sequence (opt2) from hemagglutinin__InfluenzaA__ABW39850
augaaggucaagcuccucguccuccucugcaccuucaccgccaccaacgccgacaccaucugcaucggcuaccacgccaacaacuccaccgacaccgucgacaccguccucgagaagaacgucaccgucacccacuccgucaaccuccucgagaacucccacaacggcaagcucugccuccucaagggcaucgccccccuccagcucggcaacugcuccgucgccggcuggauccucggcaaccccgagugcgagcuccucaucuccaaggaguccugguccuacaucgucgagaagcccaaccccgagaacggcaccugcuaccccggccacuucgccgacuacgaggagcuccgcgagcagcucuccuccgucuccuccuucgagcgcuucgagaucuuccccaaggaguccuccuggcccaaccacaccgucaccggcgucuccgccuccugcucccacaacggcgaguccuccuucuaccgcaaccuccucuggcucaccggcaagaacggccucuaccccaaccucuccaaguccuacgccaacaacaaggagaaggagguccucguccucuggggcguccaccacccccccaacaucggcgaccagaaggcccucuaccacaccgagaacgccuacgucuccgucgucuccucccacuacucccgcaaguucacccccgagaucgccaagcgccccaagguccgcgaccaggagggccgcaucaacuacuacuggacccuccucgagcccggcgacaccaucaucuucgaggccaacggcaaccucaucgccccccgcuacgccuucgcccucucccgcggcuucggcuccggcaucaucaacuccaacgcccccauggacaagugcgacgccaagugccagaccccccagggcgccaucaacuccucccuccccuuccagaacguccaccccgucaccaucggcgagugccccaaguacguccgcuccgccaagcuccgcauggucaccggccuccgcaacauccccuccauccagucccgcggccucuucggcgccaucgccggcuucaucgagggcggcuggaccggcauggucgacggcugguacggcuaccaccaccagaacgagcagggcuccggcuacgccgccgaccagaaguccacccagaacgccaucaacggcaucaccaacaaggucaacuccgucaucgagaagaugaacacccaguucaccgccgucggcaaggaguucaacaagcucgagcgccgcauggagaaccucaacaagaaggucgacgacggcuucaucgacaucuggaccuacaacgccgagcuccucguccuccucgagaacgagcgcacccucgacuuccacgacuccaacgucaagaaccucuacgagaaggucaagggccagcucaagaacaacgccaaggagaucggcaacggcugcuucgaguucuaccacaagugcaacgacgagugcauggaguccgucaagaacggcaccuacgacuaccccaaguacuccgaggaguccaagcucaaccgcgagaagaucgacggcgucaagcucgaguccaugggcgucuaccagauccucgccaucuacuccaccgucgccuccucccucguccuccucgucucccucggcgccaucuccuucuggaugugcuccaacggcucccuccagugccgcaucugcaucuga

SEQ ID NO: 98056 - RNA, 1698 nt, Artificial Sequence; identical to SEQ ID NO: 97981
  derived and/or modified CDS sequence (opt2) from hemagglutinin__InfluenzaA__ABW39861

SEQ ID NO: 98057 - RNA, 1701 nt, Artificial Sequence; identical to SEQ ID NO: 97964
  derived and/or modified CDS sequence (opt2) from hemagglutinin__InfluenzaA__ABW39872

SEQ ID NO: 98058 - RNA, 1698 nt, Artificial Sequence
  derived and/or modified CDS sequence (opt2) from hemagglutinin__InfluenzaA__ABW39883
augaaggucaagcuccucguccuccucugcaccuucaccgccaccuacgccgacaccaucugcaucggcuaccacgccaacaacuccaccgacaccgucgacaccguccucgagaagaacgucaccgucacccacuccgucaaccuccucgaggacucccacaacggcaagcucugccuccucaagggcaucgccccccuccagcucggcaacugcuccgucgccggcuggauccucggcaaccccgagugcgagcuccucaucuccaaggaguccugguccuacaucgucgagacccccaaccccgagaacggcaccugcuaccccggcuacuucgccgacuacgaggagcuccgcgagcagcucuccuccgucuccuccuucgagcgcuucgagaucuuccccaaggaguccuccuggcccaaccacaccgucaccggcgucuccgccuccugcucccacaacggcaaguccuccuucuaccgcaaccuccucuggcucaccggcaagaacggccucuaccccaaccucuccaaguccuacgccaacaacaaggagaaggagguccucguccucuggggcguccaccacccccacaacaucggcgaccagcgcgcccucuaccacaccgagaacgccuacgucuccgucgucuccucccacuacucccgccgcuucacccccgagaucgccaagcgccccaagguccgcgaccaggagggccgcaucaacuacuacuggacccuccucgagcccggcgacaccaucaucuucgaggccaacggcaaccucaucgccccccgcuucgccuucgcccucucccgcggcuucggcuccggcaucaucaccuccaacgcccccauggacgagugcgacgccaagugccagaccccccagggcgccaucaacuccucccuccccuuccagaacguccaccccgucaccaucggcgagugccccaaguacguccgcuccaccaagcuccgcauggucaccggccuccgcaacauccccuccauccagucccgcggccucuucggcgccaucgccggcuucaucgagggcggcuggaccggcauggucgacggcugguacggcuaccaccaccagaacgagcagggcuccggcuacgccgccgaccagaaguccacccagaacgccaucaacggcaucaccaacaaggucaacuccgucaucgagaagaugaacacccaguucaccgccgucggcaaggaguucaacaagcucgagcgccgcauggagaaccucaacaagaaggucgacgacggcuuccucgacaucuggaccuacaacgccgagcuccucguccuccucgagaacgagcgcacccucgacuuccacgacuccaacgucaagaaccucuacgagaaggucaagucccagcucaagaacaacgccaaggagaucggcaacggcugcuucgaguucuaccacaagugcaacgacgagugcauggaguccgucaagaacggcaccuacgacuaccccaaguacuccgaggaguccaagcucaaccgcgagaagaucgacggcgucaagcucgaguccaugggcgucuaccagauccucgccaucuacuccaccgucgccuccucccucguccuccucgucucccucggcgccaucuccuucuggaugugcuccaacggcucccuccagugccgcaucugcaucuga

SEQ ID NO: 98059 - RNA, 1698 nt, Artificial Sequence; identical to SEQ ID NO: 97991
  derived and/or modified CDS sequence (opt2) from hemagglutinin__InfluenzaA__ABW39894

SEQ ID NO: 98060 - RNA, 1698 nt, Artificial Sequence; identical to SEQ ID NO: 97946
  derived and/or modified CDS sequence (opt2) from hemagglutinin__InfluenzaA__ABW39905

SEQ ID NO: 98061 - RNA, 1698 nt, Artificial Sequence; identical to SEQ ID NO: 97950
  derived and/or modified CDS sequence (opt2) from hemagglutinin__InfluenzaA__ABW39927

SEQ ID NO: 98062 - RNA, 1701 nt, Artificial Sequence
  derived and/or modified CDS sequence (opt2) from hemagglutinin__InfluenzaA__ABW39938
augaagaccaucaucgcccucuccuacauccucugccucgucuucgcccagaagauccccggcaacgacaacuccaccgccacccucugccucggccaccacgccguccccaacggcaccaucgucaagaccaucaccaacgaccagaucgaggucaccaacgccaccgagcucguccaguccuccuccaccggcgagaucugcgacuccccccaccagauccucgacggcgagaacugcacccucaucgacgcccuccucggcgacccccagugcgacggcuuccagaacaagaagugggaccucuucgucgagcgcuccaaggccuacuccaacugcuaccccuacgacguccccgacuacgccucccuccgcucccucgucgccuccuccggcacccucgaguucaacaacgaguccuucaacuggaccggcgucacccagaacggcaccuccuccgccugcauccgccgcuccaacaacuccuucuucucccgccucaacuggcucacccaccucaaguucaaguaccccgcccucaacgucaccaugcccaacaacgagaaguucgacaagcucuacaucuggggcguccaccaccccggcaccgacaacgaccagaucuuccucuacgcccaggccuccggccgcaucaccgucuccaccaagcgcucccagcagaccgucauccccaacaucggcucccgcccccgcguccgcaacauccccucccgcaucuccaucuacuggaccaucgucaagcccggcgacauccuccucaucaacuccaccggcaaccucaucgccccccgcggcuacuucaagauccgcuccggcaaguccuccaucaugcgcuccgacgcccccaucggcaagugcaacuccgagugcaucacccccaacggcuccauccccaacgacaagcccuuccagaacgucaaccgcaucaccuacggcgccugcccccgcuacgucaagcagaacacccucaagcucgccaccggcaugcgcaacguccccgagaagcagacccgcggcaucuucggcgccaucgccggcuucaucgagaacggcugggagggcauggucgacggcugguacggcuuccgccaccagaacuccgagggcaucggccaggccgccgaccucaaguccacccaggccgccaucgaccagaucaacggcaagcucaaccgccucaucggcaagaccaacgagaaguuccaccagaucgagaaggaguucuccgaggucgagggccgcauccaggaccucgagaaguacgucgaggacaccaagaucgaccucugguccuacaacgccgagcuccucgucgcccucgagaaccagcacaccaucgaccucaccgacuccgagaugaacaagcucuucgagaagaccaagaagcagcuccgcgagaacgccgaggacaugggcaacggcugcuucaagaucuaccacaagugcgacaacgccugcaucggcuccauccgcaacggcaccuacgaccacgacgccuaccgcgacgaggcccucaacaaccgcuuccagaucaagggcgucgagcucaaguccggcuacaaggacuggauccucuggaucuccuucgccaucuccugcuuccuccucugcgucgcccuccucggcuucaucaugugggccugccagaagggcaacauccgcugcaacaucugcaucuga

SEQ ID NO: 98063 - RNA, 1698 nt, Artificial Sequence; identical to SEQ ID NO: 97950
  derived and/or modified CDS sequence (opt2) from hemagglutinin__InfluenzaA__ABW39949

SEQ ID NO: 98064 - RNA, 1698 nt, Artificial Sequence; identical to SEQ ID NO: 97991
  derived and/or modified CDS sequence (opt2) from hemagglutinin__InfluenzaA__ABW39960

SEQ ID NO: 98065 - RNA, 1698 nt, Artificial Sequence; identical to SEQ ID NO: 97946
  derived and/or modified CDS sequence (opt2) from hemagglutinin__InfluenzaA__ABW39982

SEQ ID NO: 98066 - RNA, 1698 nt, Artificial Sequence; identical to SEQ ID NO: 97966
  derived and/or modified CDS sequence (opt2) from hemagglutinin__InfluenzaA__ABW39993

SEQ ID NO: 98067 - RNA, 1698 nt, Artificial Sequence; identical to SEQ ID NO: 97946
  derived and/or modified CDS sequence (opt2) from hemagglutinin__InfluenzaA__ABW40004

SEQ ID NO: 98068 - RNA, 1698 nt, Artificial Sequence; identical to SEQ ID NO: 97992
  derived and/or modified CDS sequence (opt2) from hemagglutinin__InfluenzaA__ABW40015

SEQ ID NO: 98069 - RNA, 1701 nt, Artificial Sequence; identical to SEQ ID NO: 98023
  derived and/or modified CDS sequence (opt2) from hemagglutinin__InfluenzaA__ABW40026

SEQ ID NO: 98070 - RNA, 1698 nt, Artificial Sequence; identical to SEQ ID NO: 97946
  derived and/or modified CDS sequence (opt2) from hemagglutinin__InfluenzaA__ABW40037

SEQ ID NO: 98071 - RNA, 1698 nt, Artificial Sequence
  derived and/or modified CDS sequence (opt2) from hemagglutinin__InfluenzaA__ABW40048
augaaggucaagcuccucguccuccucugcaccuucaccgccaccuacgccgacaccaucugcaucggcuaccacgccaacaacuccaccgacaccgucgacaccguccucgagaagaacgucaccgucacccacuccgucaaccuccucgaggacucccacaacggcaagcucugccuccucaagggcaucgccccccuccagcucggcaacugcuccgucgccggcuggauccucggcaaccccgagugcgagcuccucaucuccaaggaguccugguccuacaucgucgagacccccaaccccgagaacggcaccugcuaccccggcuacuucgccgacuacgaggagcuccgcgagcagcucuccuccgucuccuccuucgagcgcuucgagaucuuccccaaggaguccuccuggcccaaccacaccgucaccggcgucuccgccuccugcucccacaacggcaaguccuccuucuaccgcaaccuccucuggcucaccggcaagaacggccucuaccccaaccucuccaaguccuacgccaacaacaaggagaaggagguccucguccucuggggcguccaccacccccccaacaucggcgaccagaaggcccucuaccacaccgagaacgccuacgucuccgucgucuccucccacuacucccgccgcuucacccccgagaucgccaagcgccccaagguccgcgaccaggagggccgcaucaacuacuacuggacccuccucgagcccggcgacaccaucaucuucgaggccaacggcaaccucaucgccccccgcuucgccuucgcccucucccgcggcuucggcuccggcaucaucaccuccaacgcccccauggacgagugcgacgccaagugccagaccccccagggcgccaucaacuccucccuccccuuccagaacguccaccccgucaccaucggcgagugccccaaguacguccgcuccaccaagcuccgcauggucaccggccuccgcaacauccccuccauccagucccgcggccucuucggcgccaucgccggcuucaucgagggcggcuggaccggcauggucgacggcugguacggcuaccaccaccagaacgagaagggcuccggcuacgccgccgaccagaaguccacccagaacgccaucaacggcaucaccaacaaggucaacuccgucaucgagaagaugaacacccaguucaccgccgucggcaaggaguucaacaagcucgagcgccgcauggagaaccucaacaagaaggucgacgacggcuuccucgacaucuggaccuacaacgccgagcuccucguccuccucgagaacgagcgcacccucgacuuccacgacuccaacgucaagaaccucuacgagaaggucaagucccagcucaagaacaacgccaaggagaucggcaacggcugcuucgaguucuaccacaagugcaacgacgagugcauggaguccgucaagaacggcaccuacgacuaccccaaguacuccgaggaguccaagcucaaccgcgagaagaucgacggcgucaagcucgaguccaugggcgucuaccagauccucgccaucuacuccaccgucgccuccucccucguccuccucgucucccucggcgccaucuccuucuggaugugcuccaacggcucccuccagugccgcaucugcaucuga

SEQ ID NO: 98072 - RNA, 1698 nt, Artificial Sequence; identical to SEQ ID NO: 97950
  derived and/or modified CDS sequence (opt2) from hemagglutinin__InfluenzaA__ABW40059

SEQ ID NO: 98073 - RNA, 1698 nt, Artificial Sequence
  derived and/or modified CDS sequence (opt2) from hemagglutinin__InfluenzaA__ABW40070
augaaggucaagcuccucguccuccucugcaccuucaccgccaccuacgccgacaccaucugcaucggcuaccacgccaacaacuccaccgacaccgucgacaccguccucgagaagaacgucaccgucacccacuccgucaaccuccucgagaacucccacaacggcaagcucugccuccucaagggcaucgccccccuccagcucggcaacugcuccgucgccggcuggauccucggcaaccccgagugcgagcuccucaucuccaaggaguccugguccuacaucgucgagaagcccaaccccgagaacggcaccugcuaccccggccacuucgccgacuacgaggagcuccgcgagcagcucuccuccgucuccuccuucaagcgcuucgagaucuuccccaaggaguccuccuggcccaaccacaccgucaccggcgucuccgccuccugcucccacaacggcgaguccuccuucuaccgcaaccuccucuggcucaccggcaagaacggccucuaccccaaccucuccaaguccuacgccaacaacaaggagaaggagguccucguccucuggggcguccaccacccccccaacaucggcgaccagaaggcccucuaccacaccgagaacgccuacgucuccgucgucuccucccacuacucccgcaaguucacccccgagaucgccaagcgccccaagguccgcgaccaggagggccgcaucaacuacuacuggacccuccucgagcccggcgacaccaucaucuucgaggccaacggcaaccucaucgccccccgcuacgccuucgcccucucccgcggcuucggcuccggcaucaucaacuccaacgcccccauggacaagugcgacuccaagugccagaccccccagggcgccaucaacuccucccuccccuuccagaacguccaccccgucaccaucggcgagugccccaaguacguccgcuccgccaagcuccgcauggucaccggccuccgcaacauccccuccauccagucccgcggccucuucggcgccaucgccggcuucaucgagggcggcuggaccggcauggucgacggcugguacggcuaccaccaccagaacgagcagggcuccggcuacgccgccgaccagaaguccacccagaacgccaucaacggcaucaccaacaaggucaacuccgucaucgagaagaugaacacccaguucaccgccgucggcaaggaguucaacaagcucgagcgccgcauggagaaccucaacaagaaggucgacgacggcuucaucgacaucuggaccuacaacgccgagcuccucguccuccucgagaacgagcgcacccucgacuuccacgacuccaacgucaagaaccucuacgagaaggucaagucccagcucaagaacaacgccaaggagaucggcaacggcugcuucgaguucuaccacaagugcaacgacgagugcauggaguccgucaagaacggcaccuacgacuaccccaaguacuccgaggaguccaagcucaaccgcgagaagaucgacggcgucaagcucgaguccaugggcgucuaccagauccucgccaucuacuccaccgucgccuccucccucguccuccucgucucccucggcgccaucuccuucuggaugugcuccaacggcucccuccagugccgcaucugcaucuga

SEQ ID NO: 98074 - RNA, 1701 nt, Artificial Sequence; identical to SEQ ID NO: 97964
  derived and/or modified CDS sequence (opt2) from hemagglutinin__InfluenzaA__ABW40081

SEQ ID NO: 98075 - RNA, 1698 nt, Artificial Sequence
  derived and/or modified CDS sequence (opt2) from hemagglutinin__InfluenzaA__ABW40092
augaaggucaagcuccucauccuccucugcaccuucaccgccaccuacgccgacaccaucugcaucggcuaccacgccaacaacuccaccgacaccgucgacaccguccucgagaagaacgucaccgucacccacuccgucaaccuccucgaggacucccacaacggcaagcucugccuccucaagggcaucgccccccuccagcucggcaacugcuccgucgccggcuggauccucggcaaccccgagugcgagcuccucaucuccaaggaguccugguccuacaucgucgagacccccaaccccgagaacggcaccugcuaccccggcuacuucgccgacuacgaggagcuccgcgagcagcucuccuccgucuccuccuucaagcgcuucgagaucuuccccaaggaguccuccuggcccaaccacaccgucaccggcgucuccgccuccugcucccacaacggcaaguccuccuucuaccgcaaccuccucuggcucaccggcaagaacggccucuaccccaaccucuccaaguccuacgccaacaacaaggagaaggagguccucguccucuggggcguccaccacccccccaacaucggcgaccagcgcgcccucuaccacaccgagaacgccuacgucuccgucgucuccucccacuacucccgccgcuucacccccgagaucgccaagcgccccaagguccgcgaccaggagggccgcaucaacuacuacuggacccuccucgagcccggcgacaccaucaucuucgaggccaacggcaaccucaucgccccccgcuucgccuucgcccucucccgcggcuucggcuccggcaucaucaccuccaacgcccccauggacgagugcgacgccaagugccagaccccccagggcgccaucaacuccucccuccccuuccagaacguccaccccgucaccaucggcgagugccccaaguacguccgcuccaccaagcuccgcauggucaccggccuccgcaacauccccuccauccagucccgcggccucuucggcgccaucgccggcuucaucgagggcggcuggaccggcauggucgacggcugguacggcuaccaccaccagaacgagcagggcuccggcuacgccgccgaccagaaguccacccagaacgccaucaacggcaucaccaacaaggucaacuccgucaucgagaagaugaacacccaguucaccgccgucggcaaggaguucaacaagcucgagcgccgcauggagaaccucaacaagaaggucgacgacggcuuccucgacaucuggaccuacaacgccgagcuccucguccuccucgagaacgagcgcacccucgacuuccacgacuccaacgucaagaaccucuacgagaaggucaagucccagcucaagaacaacgccaaggagaucggcaacggcugcuucgaguucuaccacaagugcaacgacgagugcauggaguccgucaagaacggcaccuacgacuaccccaaguacuccgaggaguccaagcucaaccgcgagaagaucgacggcgucaagcucgaguccaugggcgucuaccagauccucgccaucuacuccaccgucgccuccucccucguccuccucgucucccucggcgccaucuccuucuggaugugcuccaacggcucccuccagugccgcaucugcaucuga

SEQ ID NO: 98076 - RNA, 1698 nt, Artificial Sequence; identical to SEQ ID NO: 97993
  derived and/or modified CDS sequence (opt2) from hemagglutinin__InfluenzaA__ABW40103

SEQ ID NO: 98077 - RNA, 1698 nt, Artificial Sequence
  derived and/or modified CDS sequence (opt2) from hemagglutinin__InfluenzaA__ABW40114
augaaggucaagcuccucauccuccucugcaccuucaccgccaccuacgccgacaccaucugcaucggcuaccacgccaacaacuccaccgacaccgucgacaccguccucgagaagaacgucaccgucacccacuccgucaaccuccucgaggacucccacaacggcaagcucugccuccucaagggcaucgccccccuccagcucggcaacugcuccgucgccggcuggauccucggcaaccccgagugcgagcuccucaucuccaaggaguccugguccuacaucgucgagacccccaaccccgagaacggcaccugcuaccccggcuacuucgccgacuacgaggagcuccgcgagcagcucuccuccgucuccuccuucgagcgcuucgagaucuuccccaaggaguccuccuggcccaaccacaccgucaccggcgucuccaccuccugcucccacaacggcaaguccuccuucuaccgcaaccuccucuggcucaccggcaagaacggccucuaccccaaccucuccaaguccuacgccaacaacaaggagaaggagguccucguccucuggggcguccaccacccccccaacaucggcaaccagcgcgcccucuaccacaccgagaacgccuacgucuccgucgucuccucccacuacucccgccgcuucacccccgagaucgccaagcgccccaagguccgcgaccaggagggccgcaucaacuacuacuggacccuccucgagcccggcgacaccaucaucuucgaggccaacggcaaccucaucgccccccgcuucgccuucgcccucucccgcggcuucggcuccggcaucaucaccuccaacgcccccauggacgagugcgacgccaagugccagaccccccagggcgccaucaacuccucccuccccuuccagaacguccaccccgucaccaucggcgagugccccaaguacguccgcuccaccaagcuccgcauggucaccggccuccgcaacauccccuccauccagucccgcggccucuucggcgccaucgccggcuucaucgagggcggcuggaccggcauggucgacggcugguacggcuaccaccaccagaacgagcagggcuccggcuacgccgccgaccagaaguccacccagaacgccaucaacggcaucaccaacaaggucaacuccgucaucgagaagaugaacacccaguucaccgccgucggcaaggaguucaacaagcucgagcgccgcauggagaaccucaacaagaaggucgacgacggcuuccucgacaucuggaccuacaacgccgagcuccucguccuccucgagaacgagcgcacccucgacuuccacgacuccaacgucaagaaccucuacgagaaggucaagucccagcucaagaacaacgccaaggagaucggcaacggcugcuucgaguucuaccacaagugcaacgacgagugcauggaguccgucaagaacggcaccuacgacuaccccaaguacuccgaggaguccaagcucaaccgcgagaagaucgacggcgucaagcucgaguccaugggcgucuaccagauccucgccaucuacuccaccgucgccuccucccucguccuccucgucucccucggcgccaucuccuucuggaugugcuccaacggcucccuccagugccgcaucugcaucuga

SEQ ID NO: 98078 - RNA, 1698 nt, Artificial Sequence; identical to SEQ ID NO: 97946
  derived and/or modified CDS sequence (opt2) from hemagglutinin__InfluenzaA__ABW40125

SEQ ID NO: 98079 - RNA, 1701 nt, Artificial Sequence; identical to SEQ ID NO: 97964
  derived and/or modified CDS sequence (opt2) from hemagglutinin__InfluenzaA__ABW40136

SEQ ID NO: 98080 - RNA, 1698 nt, Artificial Sequence; identical to SEQ ID NO: 97981
  derived and/or modified CDS sequence (opt2) from hemagglutinin__InfluenzaA__ABW40147

SEQ ID NO: 98081 - RNA, 1698 nt, Artificial Sequence; identical to SEQ ID NO: 97950
  derived and/or modified CDS sequence (opt2) from hemagglutinin__InfluenzaA__ABW40158

SEQ ID NO: 98082 - RNA, 1698 nt, Artificial Sequence; identical to SEQ ID NO: 97950
  derived and/or modified CDS sequence (opt2) from hemagglutinin__InfluenzaA__ABW40180

SEQ ID NO: 98083 - RNA, 1701 nt, Artificial Sequence; identical to SEQ ID NO: 97964
  derived and/or modified CDS sequence (opt2) from hemagglutinin__InfluenzaA__ABW40191

SEQ ID NO: 98084 - RNA, 1698 nt, Artificial Sequence; identical to SEQ ID NO: 97966
  derived and/or modified CDS sequence (opt2) from hemagglutinin__InfluenzaA__ABW40202

SEQ ID NO: 98085 - RNA, 1698 nt, Artificial Sequence; identical to SEQ ID NO: 97946
  derived and/or modified CDS sequence (opt2) from hemagglutinin__InfluenzaA__ABW40213

SEQ ID NO: 98086 - RNA, 1698 nt, Artificial Sequence; identical to SEQ ID NO: 97946
  derived and/or modified CDS sequence (opt2) from hemagglutinin__InfluenzaA__ABW40224

SEQ ID NO: 98087 - RNA, 1698 nt, Artificial Sequence; identical to SEQ ID NO: 97950
  derived and/or modified CDS sequence (opt2) from hemagglutinin__InfluenzaA__ABW40235

SEQ ID NO: 98088 - RNA, 1701 nt, Artificial Sequence
  derived and/or modified CDS sequence (opt2) from hemagglutinin__InfluenzaA__ABW40246
augaagaccaucaucgcccucuccuacauccucugccucgucuucgcccagaagcuccccggcaacgacaacuccaccgccacccucugccucggccaccacgccguccccaacggcaccaucgucaagaccaucaccaacgaccagaucgaggucaccaacgccaccgagcucguccaguccuccuccaccggcgagaucugcgacuccccccaccagauccucgacggcgagaacugcacccucaucgacgcccuccucggcgacccccagugcgacggcuuccagaacaagaagugggaccucuucgucgagcgcuccaaggccuacuccaacugcuaccccuacgacguccccgacuacgccucccuccgcucccucgucgccuccuccggcacccucgaguucaacaacgaguccuucaacuggaccggcgucacccagaacggcaccuccuccgccugcauccgccgcuccaacaacuccuucuucucccgccucaacuggcucacccaccucaaguucaaguaccccgcccucaacgucaccaugcccaacaacgagaaguucgacaagcucuacaucuggggcguccaccaccccggcaccgacaacgaccaggucuuccucuacgcccaggccuccggccgcaucaccgucuccaccaagcgcucccagcagaccgucauccccaacaucggcucccgcccccgcguccgcaacauccccucccgcaucuccaucuacuggaccaucgucaagcccggcgacauccuccucaucaacuccaccggcaaccucaucgccccccgcggcuacuuccgcauccgcuccggcaaguccuccaucaugcgcuccgacgcccccaucggcaagugcaacuccgagugcaucacccccaacggcuccauccccaacgacaagcccuuccagaacgucaaccgcaucaccuacggcgccugcccccgcuacgucaagcagaacacccucaagcucgccaccggcaugcgcaacguccccgagaagcagacccgcggcaucuucggcgccaucgccggcuucaucgagaacggcugggagggcauggucgacggcugguacggcuuccgccaccagaacuccgagggcaucggccaggccgccgaccucaaguccacccaggccgccaucgaccagaucaacggcaagcucaaccgccucaucggcaagaccaacgagaaguuccaccagaucgagaaggaguucuccgaggucgagggccgcauccaggaccucgagaaguacgucgaggacaccaagaucgaccucugguccuacaacgccgagcuccucgucgcccucgagaaccagcacaccaucgaccucaccgacuccgagaugaacaagcucuucgagaagaccaagaagcagcuccgcgagaacgccgaggacaugggcaacggcugcuucaagaucuaccacaagugcgacaacgccugcaucggcuccauccgcaacggcaccuacgaccacgacgucuaccgcgacgaggcccucaacaaccgcuuccagaucaagggcgucgagcucaaguccggcuacaaggacuggauccucuggaucuccuucgccaucuccugcuuccuccucugcgucgcccuccucggcuucaucaugugggccugccagaagggcaacauccgcugcaacaucugcaucuga

SEQ ID NO: 98089 - RNA, 1698 nt, Artificial Sequence
  derived and/or modified CDS sequence (opt2) from hemagglutinin__InfluenzaA__ABW40257
augaaggucaagcuccucauccuccucugcaccuucaccgccaccuacgccgacaccaucugcaucggcuaccacgccaacaacuccaccgacaccgucgacaccguccucgagaagaacgucaccgucacccacuccgucaaccuccucgaggacucccacaacggcaagcucugccuccucaagggcaucgccccccuccagcucggcaacugcuccgucgccggcuggauccucggcaaccccgagugcgagcuccucaucuccaaggaguccugguccuacaucgucgagacccccaaccccgagaacggcaccugcuaccccggcuacuucgccgacuacgaggagcuccgcgagcagcucuccuccgucuccuccuucgagcgcuucgagaucuuccccaaggaguccuccuggcccaaccacaccgucaccggcgucuccgccuccugcucccacaacggcaaguccuccuucuaccgcaaccuccucuggcucaccggcaagaacggccucuaccccaaccucuccaaguccuacgccaacaacaaggagaaggagguccucguccucuggggcguccaccacccccccaacaucggcgaccagcgcgcccucuaccacaccgagaacgccuacgucuccgucgucuccucccacuacucccgccgcuucacccccgagaucgccaagcgccccaagguccgcgaccaggagggccgcaucaacuacuacuggacccuccucgagcccggcgacaccaucaucuucgaggccaacggcaaccucaucgccccccgcuucgccuucgcccucucccgcggcuucggcuccggcaucaucaccuccaacgcccccauggacgagugcgacgccaagugccagaccccccagggcgccaucaacuccucccuccccuuccagaacguccaccccgucaccaucggcgagugccccaaguacguccgcuccaccaagcuccgcauggucaccggccuccgcaacauccccuccauccagucccgcggccucuucggcgccaucgccggcuucaucgagggcggcuggaccggcauggucgacggcugguacggcuaccaccaccagaacgagcagggcuccggcuacgccgccgaccagaaguccacccagaacgccaucaacggcaucaccaacaaggucaacuccaucaucgagaagaugaacacccaguucaccgccgucggcaaggaguucaacaagcucgagcgccgcauggagaaccucaacaagaaggucgacgacggcuuccucgacaucuggaccuacaacgccgagcuccucguccuccucgagaacgagcgcacccucgacuuccacgacuccaacgucaagaaccucuacgagaaggucaagucccagcucaagaacaacgccaaggagaucggcaacggcugcuucgaguucuaccacaagugcaacgacgagugcauggaguccgucaagaacggcaccuacgacuaccccaaguacuccgaggaguccaagcucaaccgcgagaagaucgacggcgucaagcucgaguccaugggcgucuaccagauccucgccaucuacuccaccgucgccuccucccucguccuccucgucucccucggcgccaucuccuucuggaugugcuccaacggcucccuccagugccgcaucugcaucuga

SEQ ID NO: 98090 - RNA, 1701 nt, Artificial Sequence; identical to SEQ ID NO: 98023
  derived and/or modified CDS sequence (opt2) from hemagglutinin__InfluenzaA__ABW40268

SEQ ID NO: 98091 - RNA, 1698 nt, Artificial Sequence
  derived and/or modified CDS sequence (opt2) from hemagglutinin__InfluenzaA__ABW40312
augaaggucaagcuccucguccuccucugcaccuucaccgccaccuacgccgacaccaucugcaucggcuaccacgccaacaacuccaccgacaccgucgacaccguccucgagaagaacgucaccgucacccacuccgucaaccuccucgaggacucccacaacggcaagcucugccuccucaagggcaucgccccccuccagcucggcaacugcuccgucgccggcuggauccucggcaaccccgagugcgagcuccucaucuccaaggaguccugguccuacaucgucgagacccccaaccccgagaacggcaccugcuaccccggcuacuucgccgacuacgaggagcuccgcgagcagcucuccuccgucuccuccuucgagcgcuucgagaucuuccccaaggaguccuccuggcccaaccacaccgucaccggcgucuccgccuccugcucccacaacggccgcuccuccuucuaccgcaaccuccucuggcucaccggcaagaacggccucuaccccaaccucuccaaguccuacgccaacaacaaggagaaggagguccucguccucuggggcguccaccacccccccaacaucggcgaccagcgcgcccucuaccacaccgagaacgccuacgucuccgucgucuccucccacuacucccgccgcuucacccccgagaucgccaagcgccccaagguccgcgaccaggagggccgcaucaacuacuacuggacccuccucgagcccggcgacaccaucaucuucgaggccaacggcaaccucaucgccccccgcuucgccuucgcccucucccgcggcuucggcuccggcaucaucaccuccaacgcccccauggacgagugcgacgccaagugccagaccccccagggcgccaucaacuccucccuccccuuccagaacguccaccccgucaccaucggcgagugccccaaguacguccgcuccaccaagcuccgcauggucaccggccuccgcaacauccccuccauccagucccgcggccucuucggcgccaucgccggcuucaucgagggcggcuggaccggcauggucgacggcugguacggcuaccaccaccagaacgagcagggcuccggcuacgccgccgaccagaaguccacccagaacgccaucaacggcaucaccaacaaggucaacuccgucaucgagaagaugaacacccaguucaccgccgucggcaaggaguucaacaagcucgagcgccgcauggagaaccucaacaagaaggucgacgacggcuuccucgacaucuggaccuacaacgccgagcuccucguccuccucgagaacgagcgcacccucgacuuccacgacuccaacgucaagaaccucuacgagaaggucaagucccagcucaagaacaacgccaaggagaucggcaacggcugcuucgaguucuaccacaagugcaacgacgagugcauggaguccgucaagaacggcaccuacgacuaccccaaguacuccgaggaguccaagcucaaccgcgagaagaucgacggcgucaagcucgaguccaugggcgucuaccagauccucgccaucuacuccaccgucgccuccucccucguccuccucgucucccucggcgccaucuccuucuggaugugcuccaacggcucccuccagugccgcaucugcaucuga

SEQ ID NO: 98092 - RNA, 1701 nt, Artificial Sequence; identical to SEQ ID NO: 97964
  derived and/or modified CDS sequence (opt2) from hemagglutinin__InfluenzaA__ABW40323

SEQ ID NO: 98093 - RNA, 1698 nt, Artificial Sequence; identical to SEQ ID NO: 97992
  derived and/or modified CDS sequence (opt2) from hemagglutinin__InfluenzaA__ABW40334

SEQ ID NO: 98094 - RNA, 1698 nt, Artificial Sequence; identical to SEQ ID NO: 97992
  derived and/or modified CDS sequence (opt2) from hemagglutinin__InfluenzaA__ABW40345

SEQ ID NO: 98095 - RNA, 1698 nt, Artificial Sequence
  derived and/or modified CDS sequence (opt2) from hemagglutinin__InfluenzaA__ABW40356
augaaggucaagcuccucguccuccucugcaccuucaccgccaccuacgccgacaccaucugcaucggcuaccacgccaacaacuccaccgacaccgucgacaccguccucgagaagaacgucaccgucacccacuccgucaaccuccucgaggacucccacaacggcaagcucugccuccucaagggcaucgccccccuccagcucggcaacugcuccgucgccggcuggauccucggcaaccccgagugcgagcuccucaucuccaaggaguccugguccuacaucgucgagacccccaaccccgagaacggcaccugcuaccccggcuacuucgccgacuacgaggagcuccgcgagcagcucuccuccgucuccuccuucgagcgcuucgagaucuuccccaaggaguccuccuggcccaaccacaccgucaccggcgucuccgccuccugcucccacaacggcaaguccuccuucuaccgcaaccuccucuggcucaccggcaagaacggccucuaccccaaccucuccaaguccuacgccaacaacaaggagaaggagguccucgucauguggggcguccaccacccccccaacaucggcgaccagcgcgcccucuaccacaccgagaacgccuacgucuccgucgucuccucccacuacucccgccgcuucacccccgagaucgccaagcgccccaagguccgcgaccaggagggccgcaucaacuacuacuggacccuccucgagcccggcgacaccaucaucuucgaggccaacggcaaccucaucgccccccgcuucgccuucgcccucucccgcggcuucggcuccggcaucaucaccuccaacgcccccaugggcgagugcgacgccaagugccagaccccccagggcgccaucaacuccucccuccccuuccagaacguccaccccgucaccaucggcgagugccccaaguacguccgcuccgccaagcuccgcauggucaccggccuccgcaacauccccuccauccagucccgcggccucuucggcgccaucgccggcuucaucgagggcggcuggaccggcauggucgacggcugguacggcuaccaccaccagaacgagcagggcuccggcuacgccgccgaccagaaguccacccagaacgccaucaacggcaucaccaacaaggucaacuccgucaucgagaagaugaacacccaguucaccgccgucggcaaggaguucaacaagcucgagcgccgcauggagaaccucaacaagaaggucgacgacggcuuccucgacaucuggaccuacaacgccgagcuccucguccuccucgagaacgagcgcacccucgacuuccacgacuccaacgucaagaaccucuacgagaaggucaagucccagcucaagaacaacgccaaggagaucggcaacggcugcuucgaguucuaccacaagugcaacgacgagugcauggaguccgucaagaacggcaccuacgacuaccccaaguacuccgaggaguccaagcucaaccgcgagaagaucgacggcgucaagcucgaguccaugggcgucuaccagauccucgccaucuacuccaccgucgccuccucccucguccuccucgucucccucggcgccaucuccuucuggaugugcuccaacggcucccuccagugccgcaucugcaucuga

SEQ ID NO: 98096 - RNA, 1698 nt, Artificial Sequence; identical to SEQ ID NO: 97950
  derived and/or modified CDS sequence (opt2) from hemagglutinin__InfluenzaA__ABW40367

SEQ ID NO: 98097 - RNA, 1701 nt, Artificial Sequence; identical to SEQ ID NO: 97964
  derived and/or modified CDS sequence (opt2) from hemagglutinin__InfluenzaA__ABW40378

SEQ ID NO: 98098 - RNA, 1698 nt, Artificial Sequence; identical to SEQ ID NO: 97950
  derived and/or modified CDS sequence (opt2) from hemagglutinin__InfluenzaA__ABW40389

SEQ ID NO: 98099 - RNA, 1698 nt, Artificial Sequence; identical to SEQ ID NO: 97946
  derived and/or modified CDS sequence (opt2) from hemagglutinin__InfluenzaA__ABW40400

SEQ ID NO: 98100 - RNA, 1698 nt, Artificial Sequence; identical to SEQ ID NO: 97946
  derived and/or modified CDS sequence (opt2) from hemagglutinin__InfluenzaA__ABW40411

SEQ ID NO: 98101 - RNA, 1698 nt, Artificial Sequence; identical to SEQ ID NO: 97946
  derived and/or modified CDS sequence (opt2) from hemagglutinin__InfluenzaA__ABW40422

SEQ ID NO: 98102 - RNA, 1698 nt, Artificial Sequence; identical to SEQ ID NO: 97992
  derived and/or modified CDS sequence (opt2) from hemagglutinin__InfluenzaA__ABW40433

SEQ ID NO: 98103 - RNA, 1698 nt, Artificial Sequence; identical to SEQ ID NO: 97966
  derived and/or modified CDS sequence (opt2) from hemagglutinin__InfluenzaA__ABW40444

SEQ ID NO: 98104 - RNA, 1698 nt, Artificial Sequence; identical to SEQ ID NO: 97983
  derived and/or modified CDS sequence (opt2) from hemagglutinin__InfluenzaA__ABW40455

SEQ ID NO: 98105 - RNA, 1698 nt, Artificial Sequence; identical to SEQ ID NO: 97950
  derived and/or modified CDS sequence (opt2) from hemagglutinin__InfluenzaA__ABW40466

SEQ ID NO: 98106 - RNA, 1698 nt, Artificial Sequence; identical to SEQ ID NO: 97950
  derived and/or modified CDS sequence (opt2) from hemagglutinin__InfluenzaA__ABW40477

SEQ ID NO: 98107 - RNA, 1698 nt, Artificial Sequence; identical to SEQ ID NO: 97946
  derived and/or modified CDS sequence (opt2) from hemagglutinin__InfluenzaA__ABW40488

SEQ ID NO: 98108 - RNA, 1698 nt, Artificial Sequence; identical to SEQ ID NO: 97950
  derived and/or modified CDS sequence (opt2) from hemagglutinin__InfluenzaA__ABW40499

SEQ ID NO: 98109 - RNA, 1698 nt, Artificial Sequence; identical to SEQ ID NO: 97992
  derived and/or modified CDS sequence (opt2) from hemagglutinin__InfluenzaA__ABW40510

SEQ ID NO: 98110 - RNA, 1698 nt, Artificial Sequence; identical to SEQ ID NO: 97946
  derived and/or modified CDS sequence (opt2) from hemagglutinin__InfluenzaA__ABW40521

SEQ ID NO: 98111 - RNA, 1698 nt, Artificial Sequence; identical to SEQ ID NO: 97950
  derived and/or modified CDS sequence (opt2) from hemagglutinin__InfluenzaA__ABW40532

SEQ ID NO: 98112 - RNA, 1698 nt, Artificial Sequence
  derived and/or modified CDS sequence (opt2) from hemagglutinin__InfluenzaA__ABW40543
augaaggucaagcuccucguccuccucugcaccuucaccgccaccuacgccgacaccaucugcaucggcuaccacgccaacaacuccaccgacaccgucgacaccguccucgagaagaacgucaccgucacccacuccgucaaccuccucgaggaccgccacaacggcaagcucugccuccucaagggcaucgccccccuccagcucggcaacugcuccgucgccggcuggauccucggcaaccccgagugcgagcuccucaccuccaaggaguccugguccuacaucgucgagacccccaaccccgagaacggcaccugcuaccccggcuacuucgccgacuacgaggagcuccgcgagcagcucuccuccgucuccuccuucgagcgcuucgagaucuuccccaaggaguccuccuggcccaaccacaccgucaccggcgucuccgccuccugcucccacaacggcaaguccuccuucuaccgcaaccuccucuggcucaccggcaagaacggccucuaccccaaccucuccaaguccuacgccaacaacaaggagaaggagguccucguccucuggggcguccaccacccccccaacaucggcgaccagcgcgcccucuaccacaccgagaacgccuacgucuccgucgucuccucccacuacucccgccgcuucacccccgagaucgccaagcgccccaagguccgcgaccaggagggccgcaucaacuacuacuggacccuccucgagcccggcgacaccaucaucuucgaggccaacggcaaccucaucgccccccgcuucgccuucgcccucucccgcggcuucggcuccggcaucaucaccuccaacgcccccauggacgagugcgacgccaagugccagaccccccagggcgccaucaacuccucccuccccuuccagaacguccaccccgucaccaucggcgagugccccaaguacguccgcuccgccaagcuccgcauggucaccggccuccgcaacauccccuccauccagucccgcggccucuucggcgccaucgccggcuucaucgagggcggcuggaccggcauggucgacggcugguacggcuaccaccaccagaacgagcagggcuccggcuacgccgccgaccagaaguccacccagaacgccaucaacggcaucaccaacaaggucaacuccgucaucgagaagaugaacacccaguucaccgccgucggcaaggaguucaacaagcucgagcgccgcauggagaaccucaacaagaaggucgacgacggcuuccucgacaucuggaccuacaacgccgagcuccucguccuccucgagaacgagcgcacccucgacuuccacgacuccaacgucaagaaccucuacgagaaggucaagucccagcucaagaacaacgccaaggagaucggcaacggcugcuucgaguucuaccacaagugcaacgacgagugcauggaguccgucaagaacggcaccuacgacuaccccaaguacuccgaggaguccaagcucaaccgcgagaagaucgacggcgucaagcucgaguccaugggcgucuaccagauccucgccaucuacuccaccgucgccuccucccucguccuccucgucucccucggcgccaucuccuucuggaugugcuccaacggcucccuccagugccgcaucugcaucuga

SEQ ID NO: 98113 - RNA, 1698 nt, Artificial Sequence; identical to SEQ ID NO: 98091
  derived and/or modified CDS sequence (opt2) from hemagglutinin__InfluenzaA__ABW40554

SEQ ID NO: 98114 - RNA, 1698 nt, Artificial Sequence; identical to SEQ ID NO: 97950
  derived and/or modified CDS sequence (opt2) from hemagglutinin__InfluenzaA__ABW40565

SEQ ID NO: 98115 - RNA, 1698 nt, Artificial Sequence
  derived and/or modified CDS sequence (opt2) from hemagglutinin__InfluenzaA__ABW40576
augaaggucaagcuccucauccuccucugcaccuucaccgccaccuacgccgacaccaucugcaucggcuaccacgccaacaacuccaccgacaccgucgacaccguccucgagaagaacgucaccgucacccacuccgucaaccuccucgaggacucccacaacggcaagcucugccuccucaagggcaucgccccccuccagcucggcaacugcuccgucgccggcuggauccucggcaaccccgagugcgagcuccucaucuccaaggaguccugguccuacaucgucgagacccccaaccccgagaacggcaccugcuaccccggcuacuucgccgacuacgaggagcuccgcgagcagcucuccuccgucuccuccuucgagcgcuucgagaucuuccccaaggaguccuccuggcccaaccacaccgucaccggcgucuccgccuccugcucccacaacggcaaguccuccuucuaccgcaaccuccucuggcucaccggcaagaacggccucuaccccaaccucuccaaguccuacgccaacaacaaggagaaggagguccucguccucuggggcguccaccacccccccaacaucggcgaccagcgcgcccucuaccacaccgagaacaccuacgucuccgucgucuccucccacuacucccgccgcuucacccccgagaucgccaagcgccccaagguccgcgaccaggagggccgcaucaacuacuacuggacccuccucgagcccggcgacaccaucauccucgaggccaacggcaaccucaucgccccccgcuucgccuucgcccucucccgcggcuucggcuccggcaucaucaccuccaacgcccccauggacgagugcgacgccaagugccagaccccccagggcgccaucaacuccucccuccccuuccagaacguccaccccgucaccaucggcgagugccccaaguacguccgcuccaccaagcuccgcauggucaccggccuccgcaacauccccuccauccagucccgcggccucuucggcgccaucgccggcuucaucgagggcggcuggaccggcauggucgacggcugguacggcuaccaccaccagaacgagcagggcuccggcuacgccgccgaccagaaguccacccagaacgccaucaacggcaucaccaacaaggucaacuccgucaucgagaagaugaacacccaguucaccgccgucggcaaggaguucaacaagcucgagcgccgcauggagaaccucaacaagaaggucgacgacggcuuccucgacaucuggaccuacaacgccgagcuccucguccuccucgagaacgagcgcacccucgacuuccacgacuccaacgucaagaaccucuacgagaaggucaagucccagcucaagaacaacgccaaggagaucggcaacggcugcuucgaguucuaccacaagugcaacgacgagugcauggaguccgucaagaacggcaccuacgacuaccccaaguacuccgaggaguccaagcucaaccgcgagaagaucgacggcgucaagcucgaguccaugggcgucuaccagauccucgccaucuacuccaccgucgccuccucccucguccuccucgucucccucggcgccaucuccuucuggaugugcuccaacggcucccuccagugccgcaucugcaucuga

SEQ ID NO: 98116 - RNA, 1701 nt, Artificial Sequence; identical to SEQ ID NO: 98023
  derived and/or modified CDS sequence (opt2) from hemagglutinin__InfluenzaA__ABW40587

SEQ ID NO: 98117 - RNA, 1698 nt, Artificial Sequence; identical to SEQ ID NO: 97992
  derived and/or modified CDS sequence (opt2) from hemagglutinin__InfluenzaA__ABW40598

SEQ ID NO: 98118 - RNA, 1698 nt, Artificial Sequence; identical to SEQ ID NO: 97966
  derived and/or modified CDS sequence (opt2) from hemagglutinin__InfluenzaA__ABW40609

SEQ ID NO: 98119 - RNA, 1698 nt, Artificial Sequence; identical to SEQ ID NO: 97981
  derived and/or modified CDS sequence (opt2) from hemagglutinin__InfluenzaA__ABW40620

SEQ ID NO: 98120 - RNA, 1701 nt, Artificial Sequence; identical to SEQ ID NO: 98023
  derived and/or modified CDS sequence (opt2) from hemagglutinin__InfluenzaA__ABW40631

SEQ ID NO: 98121 - RNA, 1698 nt, Artificial Sequence; identical to SEQ ID NO: 97946
  derived and/or modified CDS sequence (opt2) from hemagglutinin__InfluenzaA__ABW40642

SEQ ID NO: 98122 - RNA, 1701 nt, Artificial Sequence; identical to SEQ ID NO: 98023
  derived and/or modified CDS sequence (opt2) from hemagglutinin__InfluenzaA__ABW40653

SEQ ID NO: 98123 - RNA, 1698 nt, Artificial Sequence; identical to SEQ ID NO: 97992
  derived and/or modified CDS sequence (opt2) from hemagglutinin__InfluenzaA__ABW40664

SEQ ID NO: 98124 - RNA, 1698 nt, Artificial Sequence; identical to SEQ ID NO: 97966
  derived and/or modified CDS sequence (opt2) from hemagglutinin__InfluenzaA__ABW40675

SEQ ID NO: 98125 - RNA, 1698 nt, Artificial Sequence; identical to SEQ ID NO: 98095
  derived and/or modified CDS sequence (opt2) from hemagglutinin__InfluenzaA__ABW71294

SEQ ID NO: 98126 - RNA, 1698 nt, Artificial Sequence; identical to SEQ ID NO: 97992
  derived and/or modified CDS sequence (opt2) from hemagglutinin__InfluenzaA__ABW71305

SEQ ID NO: 98127 - RNA, 1698 nt, Artificial Sequence
  derived and/or modified CDS sequence (opt2) from hemagglutinin__InfluenzaA__ABW71316
augaaggucaagcuccucauccuccucugcaccuucaccgccaccuacgccgacaccaucugcaucggcuaccacgccaacaacuccaccgacaccgucgacaccguccucgagaagaacgucaccgucacccacuccgucaaccuccucgaggacucccacaacggcaagcucugccuccucaagggcaucgccccccuccagcucggcaacugcuccgucgccggcuggauccucggcaaccccgagugcgagcuccucaucuccaaggaguccugguccuacaucgucgagacccccaaccccgagaacggcaccugcuaccccggcuacuucgccgacuacgaggagcuccgcgagcagcucuccuccgucuccuccuucgagcgcuucgagaucuuccccaaggaguccuccuggcccaaccacaccgucaccggcgucuccgccuccugcucccacaacggcaaguccuccuucuaccgcaaccuccucuggcucaccggcaagaacggccucuaccccaaccucuccaaguccuacgccaacaacaaggagaaggagguccucguccucuggggcguccaccacccccccaacaucggcgaccagcgcgcccucuaccacaccgagaacgccuacgucuccgucgucuccucccacuacucccgccgcuucacccccgagaucgccaagcgccccaagguccgcgaccaggagggccgcaucaacuacuacuggacccuccucgagccccgcgacaccaucaucuucgaggccaacggcaaccucaucgccccccgcuucgccuucgcccucucccgcggcuucggcuccggcaucaucaccuccaacgcccccauggacgagugcgacgccaagugccagaccccccagggcgccaucaacuccucccuccccuuccagaacguccaccccgucaccaucggcgagugccccaaguacguccgcuccaccaagcuccgcauggucaccggccuccgcaacauccccuccauccagucccgcggccucuucggcgccaucgccggcuucaucgagggcggcuggaccggcauggucgacggcugguacggcuaccaccaccagaacgagcagggcuccggcuacgccgccgaccagaaguccacccagaacgccaucaacggcaucaccaacaaggucaacuccgucaucgagaagaugaacacccaguucaccgccgucggcaaggaguucaacaagcucgagcgccgcauggagaaccucaacaagaaggucgacgacggcuuccucgacaucuggaccuacaacgccgagcuccucguccuccucgagaacgagcgcacccucgacuuccacgacuccaacgucaagaaccucuacgagaaggucaagucccagcucaagaacaacgccaaggagaucggcaacggcugcuucgaguucuaccacaagugcaacgacgagugcauggaguccgucaagaacggcaccuacgacuaccccaaguacuccgaggaguccaagcucaaccgcgagaagaucgacggcgucaagcucgaguccaugggcgucuaccagauccucgccaucuacuccaccgucgccuccucccucguccuccucgucucccucggcgccaucuccuucuggaugugcuccaacggcucccuccagugccgcaucugcaucuga

SEQ ID NO: 98128 - RNA, 1698 nt, Artificial Sequence; identical to SEQ ID NO: 97946
  derived and/or modified CDS sequence (opt2) from hemagglutinin__InfluenzaA__ABW71327

SEQ ID NO: 98129 - RNA, 1698 nt, Artificial Sequence; identical to SEQ ID NO: 97950
  derived and/or modified CDS sequence (opt2) from hemagglutinin__InfluenzaA__ABW71338

SEQ ID NO: 98130 - RNA, 1701 nt, Artificial Sequence; identical to SEQ ID NO: 97964
  derived and/or modified CDS sequence (opt2) from hemagglutinin__InfluenzaA__ABW71349

SEQ ID NO: 98131 - RNA, 1698 nt, Artificial Sequence
  derived and/or modified CDS sequence (opt2) from hemagglutinin__InfluenzaA__ABW71360
augaaggucaagcuccucguccuccucugcaccuucaccgccaccuacgccgacaccaucugcaucggcuaccacgccaacaacuccaccgacaccgucgacaccguccucgagaagaacgucaccgucacccacuccgucaaccuccucgaggaccgccacaacggcaagcucugccuccucaagggcaucgccccccuccagcucggcaacugcuccgucgccggcuggauccucggcaaccccgagugcgagcuccucaucuccaaggaguccugguccuacaucgucgagacccccaaccccgagaacggcaccugcuaccccggcuacuucgccgacuacgaggagcuccgcgagcagcucuccuccgucuccuccuucgagcgcuucgagaucuuccccaaggaguccuccuggcccaaccacaccgucaccggcgucuccgccuccugcucccacaacggcaaguccuccuucuaccgcaaccuccucuggcucaccggcaagaacggccucuaccccaaccucucccgcuccuacgccaacaacaaggagaaggagguccucguccucuggggcguccaccacccccccaacaucggcgaccagcgcgcccucuaccacaccgagaacgccuacgucuccgucgucuccucccacuacucccgccgcuucacccccgagaucgccaagcgccccaagguccgcgaccaggagggccgcaucaacuacuacuggacccuccucgagcccggcgacaccaucaucuucgaggccaacggcaaccucaucgccccccgcuucgccuucgcccucucccgcggcuucggcuccggcaucaucaccuccaacgcccccauggacgagugcgacgccaagugccagaccccccagggcgccaucaacuccucccuccccuuccagaacguccaccccgucaccaucggcgagugccccaaguacguccgcuccgccaagcuccgcauggucaccggccuccgcaacauccccuccauccagucccgcggccucuucggcgccaucgccggcuucaucgagggcggcuggaccggcauggucgacggcugguacggcuaccaccaccagaacgagcagggcuccggcuacgccgccgaccagaaguccacccagaacgccaucaacggcaucaccaacaaggucaacuccgucaucgagaagaugaacacccaguucaccgccgucggcaaggaguucaacaagcucgagcgccgcauggagaaccucaacaagaaggucgacgacggcuuccucgacaucuggaccuacaacgccgagcuccucguccuccucgagaacgagcgcacccucgacuuccacgacuccaacgucaagaaccucuacgagaaggucaagucccagcucaagaacaacgccaaggagaucggcaacggcugcuucgaguucuaccacaagugcgacgacgagugcauggaguccgucaagaacggcaccuacgacuaccccaaguacuccgaggaguccaagcucaaccgcgagaagaucgacggcgucaagcucgaguccaugggcgucuaccagauccucgccaucuacuccaccgucgccuccucccucguccuccucgucucccucggcgccaucuccuucuggaugugcuccaacggcucccuccagugccgcaucugcaucuga

SEQ ID NO: 98132 - RNA, 1698 nt, Artificial Sequence; identical to SEQ ID NO: 97966
  derived and/or modified CDS sequence (opt2) from hemagglutinin__InfluenzaA__ABW71371

SEQ ID NO: 98133 - RNA, 1698 nt, Artificial Sequence
  derived and/or modified CDS sequence (opt2) from hemagglutinin__InfluenzaA__ABW71382
augaaggucaagcuccucauccuccucugcaccuucaccgccaccuacgccgacaccaucugcaucggcuaccacgccaacaacuccaccgacaccgucgacaccguccucgagaagaacgucaccgucacccacuccgucaaccuccucgaggacucccacaacggcaagcucugccuccucaagggcaucgccccccuccagcucggcaacugcuccgucgccggcuggauccucggcaaccccgagugcgagcuccucaucuccaaggaguccugguccuacaucgucgagacccccaaccccgagaacggcaccugcuaccccggcuacuucgccgacuacgaggagcuccgcgagcagcucuccuccgucuccuccuucgagcgcuucgagaucuuccccaaggaguccuccugguccaaccacaccaucaccggcgucuccgccuccugcucccacaacggcaaguccuccuucuaccgcaaccuccucuggcucaccggcaagaacggccucuaccccaaccucuccaaguccuacgccaacaacaaggagaaggagguccucguccucuggggcguccaccacccccccaacaucggcgaccagcgcgcccucuaccacaccgagaacgccuacgucuccgucgucuccucccacuacucccgccgcuucacccccgagaucgccaagcgccccaagguccgcgaccaggagggccgcaucaacuacuacuggacccuccucgagcccggcgacaccaucaucuucgaggccaacggcaaccucaucgccccccgcuucgccuucgcccucucccgcggcuucggcuccggcaucaucaccuccaacgcccccauggacgagugcgacgccaagugccagaccccccagggcgccaucaacuccucccuccccuuccagaacguccaccccgucaccaucggcgagugccccaaguacguccgcuccaccaagcuccgcauggucaccggccuccgcaacauccccuccauccagucccgcggccucuucggcgccaucgccggcuucaucgagggcggcuggaccggcauggucgacggcugguacggcuaccaccaccagaacgagcagggcuccggcuacgccgccgaccagaaguccacccagaacgccaucaacggcaucaccaacaaggucaacuccgucaucgagaagaugaacacccaguucaccgccgucggcaaggaguucaacaagcucgagcgccgcauggagaaccucaacaagaaggucgacgacggcuuccucgacaucuggaccuacaacgccgagcuccucguccuccucgagaacgagcgcacccucgacuuccacgacuccaacgucaagaaccucuacgagaaggucaagucccagcucaagaacaacgccaaggagaucggcaacggcugcuucgaguucuaccacaagugcaacgacgagugcauggaguccgucaagaacggcaccuacgacuaccccaaguacuccgaggaguccaagcucaaccgcgagaagaucgacggcgucaagcucgaguccaugggcgucuaccagauccucgccaucuacuccaccgucgccuccucccucguccuccucgucucccucggcgccaucuccuucuggaugugcuccaacggcucccuccagugccgcaucugcaucuga

SEQ ID NO: 98134 - RNA, 1698 nt, Artificial Sequence
  derived and/or modified CDS sequence (opt2) from hemagglutinin__InfluenzaA__ABW71393
augaaggucaagcuccucguccuccucugcaccuucaccgccaccuacgccgacaccaucugcaucggcuaccacgccaacaacuccaccgacaccgucgacaccguccucgagaagaacgucaccgucacccacuccgucaaccuccucgaggacucccacaacggcaagcucugccuccucaagggcaucgccccccuccagcucggcaacugcuccgucgccggcuggauccucggcaaccccgagugcgagcuccucaucuccaaggaguccugguccuacaucgucgagacccccaaccccgagaacggcaccugcuaccccggcuacuucaccgacuacgaggagcuccgcgagcagcucuccuccgucuccuccuucgagcgcuucgagaucuuccccaaggaguccuccuggcccaaccacaccgucaccggcgucuccgccuccugcucccacaacggcaaguccuccuucuaccgcaaccuccucuggcucaccggcaagaacggccucuaccccaaccucuccaaguccuacgccaacaacaaggagaaggagguccucguccucuggggcguccaccacccccccaacaucggcgaccagcgcgcccucuaccacaccgagaacgccuacgucuccgucgucuccucccacuacucccgccgcuucacccccgagaucgccaagcgccccaagguccgcgaccaggagggccgcaucaacuacuacuggacccuccucgagcccggcgacaccaucaucuucgaggccaacggcaaccucaucgccccccgcuucgccuucgcccucucccgcggcuucggcuccggcaucaucaccuccaacgcccccaugggcgagugcgacgccaagugccagaccccccagggcgccaucaacuccucccuccccuuccagaacguccaccccgucaccaucggcgagugccccaaguacguccgcuccgccaagcuccgcauggucaccggccuccgcaacauccccuccauccagucccgcggccucuucggcgccaucgccggcuucaucgagggcggcuggaccggcauggucgacggcugguacggcuaccaccaccagaacgagcagggcuccggcuacgccgccgaccagaaguccacccagaacgccaucaacggcaucaccaacaaggucaacuccgucaucgagaagaugaacacccaguucaccgccgucggcaaggaguucaacaagcucgagcgccgcauggagaaccucaacaagaaggucgacgacggcuuccucgacaucuggaccuacaacgccgagcuccucguccuccucgagaacgagcgcacccucgacuuccacgacuccaacgucaagaaccucuacgagaaggucaagucccagcucaagaacaacgccaaggagaucggcaacggcugcuucgaguucuaccacaagugcaacgacgagugcauggaguccgucaagaacggcaccuacgacuaccccaaguacuccgaggaguccaagcucaaccgcgagaagaucgacggcgucaagcucgaguccaugggcgucuaccagauccucgccaucuacuccaccgucgccuccucccucguccuccucgucucccucggcgccaucuccuucuggaugugcuccaacggcucccuccagugccgcaucugcaucuga

SEQ ID NO: 98135 - RNA, 1698 nt, Artificial Sequence; identical to SEQ ID NO: 98095
  derived and/or modified CDS sequence (opt2) from hemagglutinin__InfluenzaA__ABW71404

SEQ ID NO: 98136 - RNA, 1698 nt, Artificial Sequence; identical to SEQ ID NO: 97983
  derived and/or modified CDS sequence (opt2) from hemagglutinin__InfluenzaA__ABW71415

SEQ ID NO: 98137 - RNA, 1698 nt, Artificial Sequence
  derived and/or modified CDS sequence (opt2) from hemagglutinin__InfluenzaA__ABW71426
augaaggccaagcuccucauccuccucugcaccuucaccgccaccuacgccgacaccaucugcaucggcuaccacgccaacaacuccaccgacaccgucgacaccguccucgagaagaacgucaccgucacccacuccgucaaccuccucgaggacucccacaacggcaagcucugccuccucaagggcaucgccccccuccagcucggcaacugcuccgucgccggcuggauccucggcaaccccgagugcgagcuccucaucuccaaggaguccugguccuacaucgucgagacccccaaccccgagaacggcaccugcuaccccggcuacuucgccgacuacgaggagcuccgcgagcagcucuccuccgucuccuccuucgagcgcuucgagaucuuccccaaggaguccuccuggcccaaccacaccgucaccggcgucuccgccuccugcucccacaacggcaaguccuccuucuaccgcaaccuccucuggcucaccggcaagaacggccucuaccccaaccucuccaaguccuacgccaacaacaaggagaaggagguccucguccucuggggcguccaccacccccccaacaucggcgaccagcgcgcccucuaccacaccgagaacgccuacgucuccgucgucuccucccacuacucccgccgcuucacccccgagaucgccaagcgccccaagguccgcgaccaggagggccgcaucaacuacuacuggacccuccucgagcccggcgacaccaucaucuucgaggccaacggcaaccucaucgccccccgcuucgccuucgcccucucccgcggcuucggcuccggcaucaucaccuccaacgcccccauggacgagugcgacgccaagugccagaccccccagggcgccaucaacuccucccuccccuuccagaacguccaccccgucaccaucggcgagugccccaaguacguccgcuccaccaagcuccgcauggucaccggccuccgcaacauccccuccauccagucccgcggccucuucggcgccaucgccggcuucaucgagggcggcuggaccggcauggucgacggcugguacggcuaccaccaccagaacgagcagggcuccggcuacgccgccgaccagaaguccacccagaacgccaucaacggcaucaccaacaaggucaacuccgucaucgagaagaugaacacccaguucaccgccgucggcaaggaguucaacaagcucgagcgccgcauggagaaccucaacaagaaggucgacgacggcuuccucgacaucuggaccuacaacgccgagcuccucguccuccucgagaacgagcgcacccucgacuuccacgacuccaacgucaagaaccucuacgagaaggucaagucccagcucaagaacaacgccaaggagaucggcaacggcugcuucgaguucuaccacaagugcaacgacgagugcauggaguccgucaagaacggcaccuacgacuaccccaaguacuccgaggaguccaagcucaaccgcgagaagaucgacggcgucaagcucgaguccaugggcgucuaccagauccucgccaucuacuccaccgucgccuccucccucguccuccucgucucccucggcgccaucuccuucuggaugugcuccaacggcucccuccagugccgcaucugcaucuga

SEQ ID NO: 98138 - RNA, 1698 nt, Artificial Sequence
  derived and/or modified CDS sequence (opt2) from hemagglutinin__InfluenzaA__ABW71448
augaaggucaagcuccucguccuccucugcaccuucaccgccaccuacgccgacaccaucugcaucggcuaccacgccaacaacuccaccgacaccgucgacaccguccucgagaagaacgucaccgucacccacuccgucaaccuccucgaggacucccacaacggcaagcucugccuccucaagggcaucgccccccuccagcucggcaacugcuccgucgccggcuggauccucggcaaccccgagugcgagcuccucaucuccaaggaguccugguccuacaucgucgagacccccaaccccgagaacggcaccugcuaccccggcuacuucgccgacuacgaggagcuccgcgagcagcucuccuccgucuccuccuucgagcgcuucgagaucuuccccaaggaguccuccuggcccaaccacaccgucaccggcgucuccgccuccugcucccacaacggcaaguccuccuucuaccgcaaccuccucuggcucaccggcaagaacggccucuaccccaaccucuccaaguccuacgccaacaacaaggagaaggagguccucguccucuggggcguccaccacccccccaacaucggcgaccagcgcgcccucuaccacaccgagaacgccuacgucuccgucgucuccucccacuacucccgccgcuucacccccgagaucgccaagcgccccaagguccgcgaccaggagggccgcaucaacuacuacuggacccuccucgagcccggcgacaccaucaucuucgaggccaacggcaaccucaucgccccccgcuucgccuucgcccucucccgcggcuucggcuccggcaucaucaccuccaacgcccccauggacgagugcgacgccaagugccagaccccccagggcgccaucaacuccucccuccccuuccagaacguccaccccgucaccaucggcgagugccccaaguacguccgcuccaccaagcuccgcauggucaccggccuccgcaacauccccuccauccagucccgcggccucuucggcgccaucgccggcuucaucgagggcggcuggaccggcauggucgacggcugguacggcuaccaccaccagaacgagcagggcuccggcuacgccgccgaccagaaguccacccagaacgccaucaacggcaucaccaacaaggucaacuccgucaucgagaagaugaacacccaguucaccgccgucggcaaggaguucaacaagcucgagcgccgcauggagaaccucaacaagaaggucgacgacggcuuccucgacaucuggaccuacaacgccgagcuccucguccuccucgagaacgagcgcacccucgacuuccacgacuccaacgucaagaaccucuacgagaaggucaagucccagcucaagaacaacgccaaggagaucggcaacggcugcuucgaguucuaccacaagugcaacgacgagugcauggaguccgucaagaacggcaccuacgacuaccccaaguacuccgaggaguccaagcucaaccgcgagaagaucgacggcgucaagcucgaguccaugggcgucuaccagauccucgccaucuacuccaccaucgccuccucccucguccuccucgucucccucggcgccaucuccuucuggaugugcuccaacggcucccuccagugccgcaucugcaucuga

SEQ ID NO: 98139 - RNA, 1698 nt, Artificial Sequence; identical to SEQ ID NO: 97966
  derived and/or modified CDS sequence (opt2) from hemagglutinin__InfluenzaA__ABW71459

SEQ ID NO: 98140 - RNA, 1698 nt, Artificial Sequence; identical to SEQ ID NO: 97950
  derived and/or modified CDS sequence (opt2) from hemagglutinin__InfluenzaA__ABW71470

SEQ ID NO: 98141 - RNA, 1707 nt, Artificial Sequence
  derived and/or modified CDS sequence (opt2) from hemagglutinin__InfluenzaA__ABW74702
auggagaagaucguccuccuccucgccaucgucucccucgucaaguccgaccagaucugcaucggcuaccacgccaacaacuccaccgagcaggucgacaccaucauggagaagaacgucaccgucacccacgcccaggacauccucgagaagacccacaacggcaagcucugcgaccucgacggcgucaagccccucauccuccgcgacugcuccgucgccggcuggcuccucggcaaccccaugugcgacgaguucaucaacguccccgagugguccuacaucgucgagaaggccaaccccaccaacgaccucugcuaccccggcuccuucaacgacuacgaggagcucaagcaccuccucucccgcaucaaccacuucgagaagauccagaucauccccaaguccuccugguccgaccacgaggccuccuccggcgucuccuccgccugccccuaccucggcuccuccuccuucuuccgcaacgucgucuggcucaucaagaagaacuccaccuaccccaccaucaagaaguccuacaacaacaccaaccaggaggaccuccucguccucuggggcauccaccaccccaacgacgccgccgagcagacccgccucuaccagaaccccaccaccuacaucuccaucggcaccuccacccucaaccagcgccucguccccaagaucgccacccgcuccaaggucaacggccaguccggccgcauggaguucuucuggaccauccucaagcccaacgacgccaucaacuucgaguccaacggcaacuucaucgcccccgaguacgccuacaagaucgucaagaagggcgacuccgccaucaugaaguccgagcucgaguacggcaacugcaacaccaagugccagacccccaugggcgccaucaacuccuccaugcccuuccacaacauccacccccucaccaucggcgagugccccaaguacgucaaguccaaccgccucguccucgccaccggccuccgcaacuccccccagcgcgagucccgccgcaagaagcgcggccucuucggcgccaucgccggcuucaucgagggcggcuggcagggcauggucgacggcugguacggcuaccaccacuccaacgagcagggcuccggcuacgccgccgacaaggaguccacccagaaggccaucgacggcgucaccaacaaggucaacuccaucaucgacaagaugaacacccaguucgaggccgucggccgcgaguucaacaaccucgagcgccgcaucgagaaccucaacaagaagauggaggacggcuuccucgacgucuggaccuacaacgccgagcuccucguccucauggagaacgagcgcacccucgacuuccacgacuccaacgucaagaaccucuacgacaagguccgccuccagcuccgcgacaacgccaaggagcucggcaacggcugcuucgaguucuaccacaagugcgacaacgagugcaucgaguccauccgcaacggcaccuacaacuacccccaguacuccgaggaggcccgccucaagcgcgaggagaucuccggcgucaagcucgaguccaucggcaccuaccagauccucuccaucuacuccaccgucgccuccucccucgcccucgccaucaugauggccggccucucccucuggaugugcuccaacggcucccuccagugccgcaucugcaucuga

SEQ ID NO: 98142 - RNA, 1707 nt, Artificial Sequence
  derived and/or modified CDS sequence (opt2) from hemagglutinin__InfluenzaA__ABW74703
auggagaagaucguccuccuccucgccaucgucucccucgucaaguccgaccagaucugcaucggcuaccacgccaacaacuccaccgagcaggucgacaccaucauggagaagaacgucaccgucacccacgcccaggacauccucgagaagacccacaacggcaagcucugcgaccucgacggcgucaagccccucauccucaaggacugcuccgucgccggcuggcuccucggcaaccccaugugcgacgaguucaucaacguccccgagugguccuacaucgucgagaaggccaaccccaccaacgaccucugcuaccccggcuccuucaacgacuacgaggagcucaagcaccuccucucccgcaucaaccacuucgagaagauccagaucauccccaaguccuccugguccgaccacgaggccuccuccggcgucuccuccgccugccccuaccucggcucccccuccuucuuccgcaacgucgucuggcucaucaagaagaacuccaccuaccccaccaucaagaaguccuacaacaacaccaaccaggaggaccuccucguccucuggggcauccaccaccccaacgacgccgccgagcagacccgccucuaccagaaccccaccaccuacaucuccaucggcaccuccacccucaaccagcgccucguccccaagaucgccacccgcuccaaggucaacggccaguccggccgcauggaguucuucuggaccauccucaagcccaacgacgccgucaacuucgaguccaacggcaacuucaucgcccccgaguacgccuacaagaucgucaagaagggcgacuccgccaucaugaaguccgagcucgaguacggcaacugcaacaccaagugccagacccccaugggcgccaucaacuccuccaugcccuuccacaacauccacccccucaccaucggcgagugccccaaguacgucaaguccaaccgccucguccucgccaccggccuccgcaacuccccccagcgcgagucccgccgcaagaagcgcggccucuucggcgccaucgccggcuucaucgagggcggcuggcagggcauggucgacggcugguacggcuaccaccacuccaacgagcagggcuccggcuacgccgccgacaaggaguccacccagaaggccaucgacggcgucaccaacaaggucaacuccaucaucgacaagaugaacacccaguucgaggccgucggccgcgaguucaacucccucgagcgccgcaucgagaaccucaacaagaagauggaggacggcuuccucgacgucuggaccuacaacgccgagcuccucguccucauggagaacgagcgcacccucgacuuccacgacuccaacgucaagaaccucuacgacaagguccgccuccagcuccgcgacaacgccaaggagcucggcaacggcugcuucgaguucuaccacaagugcgacaacgagugcauggaguccauccgcaacggcaccuacaacuacccccaguacuccgaggaggcccgccucaagcgcgaggagaucuccggcgucaagcucgaguccaucggcaccuaccagauccucuccaucuacuccaccgucgccuccucccucgcccucgccaucaugaucgccggccucucccucuggaugugcuccaacggcucccuccagugccgcaucugcaucuga

SEQ ID NO: 98143 - RNA, 1707 nt, Artificial Sequence
  derived and/or modified CDS sequence (opt2) from hemagglutinin__InfluenzaA__ABW74705
auggagaagaucguccuccuccucgccaucgucucccucgucaaguccgaccagaucugcaucggcuaccacgccaacaacuccaccgagcaggucgacaccaucauggagaagaacgucaccgucacccacgcccaggacauccucgagaagacccacaacggcaagcucugcgaccucgacggcgucaagccccucauccuccgcgacugcuccgucgccggcuggcuccucggcaaccccaugugcgacgaguucaucaacguccccgagugguccuacaucgucgagaaggccaaccccaccaacgaccucugcuaccccggcuccuucaacgacuacgaggagcucaagcaccuccucucccgcaucaaccacuucgagaagauccagaucauccccaaguccuccugguccgaccacgaggccuccuccggcgucuccuccgccugccccuaccucggcucccccuccuucuuccgcaacgucgucuggcucaucaagaagaacuccaccuaccccaccaucaagaaguccuacaacaacaccaaccaggaggaccuccucguccucuggggcauccaccaccccaacgacgccgccgagcagacccgccucuaccagaaccccaccaccuacaucuccaucggcaccuccacccucaaccagcgccucguccccaagaucgccacccgcuccaaggucaacggccaguccggccgcauggaguucuucuggaccauccucaagcccaacgacgccaucaacuucgaguccaacggcaacuucaucgcccccgaguacgccuacaagaucgucaagaagggcgacuccgccaucaugaaguccgagcucgaguacggcaacugcaacaccaagugccagacccccaugggcgccaucaacuccuccaugcccuuccacaacauccacccccucaccaucggcgagugccccaaguacgucaaguccaaccgccucguccucgccaccggccuccgcaacuccccccagcgcgagucccgccgcaagaagcgcggccucuucggcgccaucgccggcuucaucgagggcggcuggcagggcauggucgacggcugguacggcuaccaccacuccaacgagcagggcuccggcuacgccgccgacaaggaguccacccagaaggccaucgacggcgucaccaacaaggucaacuccaucaucgacaagaugaacacccaguucgaggccgucggccgcgaguucaacaaccucgagcgccgcaucgagaaccucaacaagaagauggaggacggcuuccucgacgucuggaccuacaacgccgagcuccucguccucauggagaacgagcgcacccucgacuuccacgacuccaacgucaagaaccucuacgacaagguccgccuccagcuccgcgacaacgccaaggagcucggcaacggcugcuucgaguucuaccacaagugcgacaacgagugcauggaguccauccgcaacggcaccuacaacuacccccaguacuccgaggaggcccgccucaagcgcgaggagaucuccggcgucaagcucgaguccaucggcaccuaccagauccucuccaucuacuccaccgucgccuccucccucgcccucgccaucaugaucgccggccucucccucuggaugugcuccaacggcucccuccagugccgcaucugcaucuga

SEQ ID NO: 98144 - RNA, 1707 nt, Artificial Sequence
  derived and/or modified CDS sequence (opt2) from hemagglutinin__InfluenzaA__ABW74707
auggagaagaucguccuccuccucgccaucgucucccucgucaaguccgaccagaucugcaucggcuaccacgccaacaacuccaccgagcaggucgacaccaucauggagaagaacgucaccgucacccacgcccaggacauccucgagaagacccacaacggcaagcucugcgaccucgacggcgucaagccccucauccuccgcgacugcuccgucgccggcuggcuccucggcaaccccaugugcgacgaguucaucaacguccccgagugguccuacaucgucgagaaggccaaccccaccaacgaccucugcuaccccggcuccuucaacgacuacgaggagcucaagcaccuccucucccgcaucaaccacuucgagaagauccagaucauccccaaguccuccugguccgaccacgaggccuccuccggcgucuccuccgccugccccuaccucggcucccccuccuucuuccgcaacgucgucuggcucaucaagaagaacuccaccuaccccaccaucaagaaguccuacaacaacaccaaccaggaggaccuccucguccucuggggcauccaccaccccaacgacgccgccgagcagacccgccucuaccagaaccccaccaccuacaucuccaucggcaccuccacccucaaccagcgccucguccccaagauggccacccgcuccaaggucaacggccaguccggccgcauggaguucuucuggaccauccucaagcccaacgacgccaucaacuucgaguccaacggcaacuucaucgcccccgaguacgccuacaagaucgucaagaagggcgacuccgccaucaugaaguccgagcucgaguacggcaacugcaacaccaagugccagacccccaugggcgccaucaacuccuccaugcccuuccacaacauccacccccucaccaucggcgagugccccaaguacgucaaguccaaccgccucguccucgccaccggccuccgcaacuccccccagcgcgagucccgccgcaagaagcgcggccucuucggcgccaucgccggcuucaucgagggcggcuggcagggcauggucgacggcugguacggcuaccaccacuccaacgagcagggcuccggcuacgccgccgacaaggaguccacccagaaggccaucgacggcgucaccaacaaggucaacuccaucaucgacaagaugaacacccaguucgaggccgucggccgcgaguucaacaaccucgagcgccgcaucgagaaccucaacaagaagauggaggacggcuuccucgacgucuggaccuacaacgccgagcuccucguccucauggagaacgagcgcacccucgacuuccacgacuccaacgucaagaaccucuacgacaagguccgccuccagcuccgcgacaacgccaaggagcucggcaacggcugcuucgaguucuaccacaagugcgacaacgagugcauggaguccauccgcaacggcaccuacaacuacccccaguacuccgaggaggcccgccucaagcgcgaggagaucuccggcgucaagcucgaguccaucggcaccuaccagauccucuccaucuacuccaccgucgccuccucccucgcccucgccaucaugaucgccggccucucccucuggaugugcuccaacggcucccuccagugccgcaucugcaucuga

SEQ ID NO: 98145 - RNA, 1707 nt, Artificial Sequence
  derived and/or modified CDS sequence (opt2) from hemagglutinin__InfluenzaA__ABW74708
auggagaagaucguccuccuccucgccaucgucucccucgucaaguccgaccagaucugcaucggcuaccacgccaacaacuccaccgagcaggucgacaccaucauggagaagaacgucaccgucacccacgcccaggacauccucgagaagacccacaacggcaagcucugcgaccucgacggcgucaagccccucauccuccgcgacugcuccgucgccggcuggcuccucggcaaccccaugugcgacgaguucaucaacguccccgagugguccuacaucgucgagaaggccaaccccaccaacgaccucugcuaccccggcuccuucaacgacuacgaggagcucaagcaccuccucucccgcaucaaccacuucgagaagauccagaucauccccaaguccuccugguccgaccacgaggccuccuccggcgucuccuccgccugccccuaccucggcucccccuccuucuuccgcaacgucgucuggcucaucaagaagaacuccaccuaccccaccaucaagaaguccuacaacaacaccaaccaggaggaccuccucguccucuggggcauccaccaccccaacgacgccgccgagcagacccgccucuaccagaaccccaccaccuacaucuccaucggcaccuccacccucaaccagcgccucguccccaagaucgccacccgcuccaaggucaacggccaguccggccgcauggaguucuucuggaccauccucaagcccaacgacgccaucaacuucgaguccaacggcaacuucaucgcccccgaguacgccuacaagaucgucaagaagggcgacuccgccaucaugaaguccgagcucgaguacggcaacugcaacaccaagugccagacccccaugggcgccaucaacuccuccaugcccuuccacaacauccacccccucaccaucggcgagugccccaaguacgucaaguccaaccgcuccguccucgccaccggccuccgcaacuccccccagcgcgagucccgccgcaagaagcgcggccucuucggcgccaucgccggcuucaucgagggcggcuggcagggcauggucgacggcugguacggcuaccaccacuccaacgagcagggcuccggcuacgccgccgacaaggaguccacccagaaggccaucgacggcgucaccaacaaggucaacuccaucaucgacaagaugaacacccaguucgaggccgucggccgcgaguucaacaaccucgagcgccgcaucgagaaccucaacaagaagauggaggacggcuuccucgacgucuggaccuacaacgccgagcuccucguccucauggagaacgagcgcacccucgacuuccacgacuccaacgucaagaaccucuacgacaagguccgccuccagcuccgcgacaacgccaaggagcucggcaacggcugcuucgaguucuaccacaagugcgacaacgagugcauggaguccauccgcaacggcaccuacaacuacccccaguacuccgaggaggcccgccucaagcgcgaggagaucuccggcgucaagcucgaguccaucggcaccuaccagauccucuccaucuacuccaccgucgccuccucccucgcccucgccaucaugauggccggccucucccucuggaugugcuccaacggcucccuccagugccgcaucugcaucuga

SEQ ID NO: 98146 - RNA, 1707 nt, Artificial Sequence; identical to SEQ ID NO: 98143
  derived and/or modified CDS sequence (opt2) from hemagglutinin__InfluenzaA__ABW74710

SEQ ID NO: 98147 - RNA, 1707 nt, Artificial Sequence; identical to SEQ ID NO: 98143
  derived and/or modified CDS sequence (opt2) from hemagglutinin__InfluenzaA__ABW74711

SEQ ID NO: 98148 - RNA, 1707 nt, Artificial Sequence
  derived and/or modified CDS sequence (opt2) from hemagglutinin__InfluenzaA__ABW74712
auggagaagaucguccuccuccucuccaucgucucccucgucaaguccgaccagaucugcaucggcuaccacgccaacaacuccaccgagcaggucgacaccaucauggagaagaacgucaccgucacccacgcccaggacauccucgagaagacccacaacggcaagcucugcgaccucgacggcgucaagccccucauccuccgcgacugcuccgucgccggcuggcuccucggcaaccccaugugcgacgaguucaucaacguccccgagugguccuacaucgucgagaaggccaaccccaccaacgaccucugcuaccccggcuccuucaacgacuacgaggagcucaagcaccuccucucccgcaucaaccacuucgagaagauccagaucauccccaaguccuccugguccgaccacgaggccuccuccggcgucuccuccgccugccccuaccucggcucccccuccuucuuccgcaacgucgucuggcucaucaagaagaacuccaccuaccccaccaucaagaaguccuacaacaacaccaaccaggaggaccuccucguccucuggggcauccaccaccccaacaacgaggaggagcagacccgccucuaccagaaccccaccaccuacaucuccaucggcaccuccacccucaaccagcgccucguccccaagaucgccacccgcuccaaggucaacggccaguccggccgcauggaguucuucuggaccauccucaagcccaacgacgccaucaacuucgaguccaacggcaacuucaucgcccccgaguacgccuacaagaucgucaagaagggcgacuccgccaucaugaaguccgagcucgaguacuccaacugcaacaccaagugccagacccccaugggcgccaucaacuccuccaugcccuuccacaacauccacccccucaccaucggcgagugccccaaguacgucaaguccucccgccucguccucgccaccggccuccgcaacuccccccagcgcgagucccgccgcaagaagcgcggccucuucggcgccaucgccggcuucaucgagggcggcuggcagggcauggucgacggcugguacggcuaccaccacuccaacgagcagggcuccggcuacgccgccgacaaggaguccacccagaaggccaucgacggcgucaccaacaaggucaacuccaucaucgacaagaugaacacccaguucgaggccgucggccgcgaguucaacaaccucgagcgccgcaucgagaaccucaacaagaagauggaggacggcuuccucgacgucuggaccuacaacgccgagcuccucguccucauggagaacgagcgcacccucgacuuccacgacuccaacgucaagaaccucuacgacaagguccgccuccagcuccgcgacaacgccaaggagcucggcaacggcugcuucgaguucuaccacaagugcgacaacgagugcauggaguccauccgcaacggcaccuacaacuacccccaguacuccgaggaggcccgccucaagcgcgaggagaucuccggcgucaagcucgaguccaucggcaccuaccagauccucuccaucuacuccaccgucgccuccucccucgcccucgccaucaugaucgccggccucucccucuggaugugcuccaacggcucccuccagugccgcaucugcaucuga

SEQ ID NO: 98149 - RNA, 1701 nt, Artificial Sequence
  derived and/or modified CDS sequence (opt2) from hemagglutinin__InfluenzaA__ABW80976
augaagaccaucaucgcccucuccuacauccucugccucgucuucgcccagaagcuccccggcaacgacaacuccaccgccacccucugccucggccaccacgccguccccaacggcacccucgucaagaccaucaccaacgaccagaucgaggucaccaacgccaccgagcucguccaguccuccuccaccucccgcaucugcgacuccccccaccagauccucgacggcgagaacugcacccucaucgacgcccuccucggcgacccccacugcgacggcuuccagaacaaggagugggaccucuucgucgagcgcuccaaggccuacuccaacugcuaccccuacgacguccccgacuacgucucccuccgcucccucgucgccuccuccggcacccucgaguucaacaacgaguccuucaacuggaccggcgucgcccagaacggcaccuccuccgccugcaagcgccgcuccgacaaguccuucuucucccgccucaacuggcuccaccagcucaaguacaaguaccccgcccucaacgucaccaugcccaacaacgagaaguucgacaagcucuacaucuggggcguccaccaccccggcaccgacuccgaccagaucuccaucuacgcccaggccuccggccgcgucaccgucuccaccaagcgcucccagcagaccgucauccccaacaucggcucccgccccuggguccgcggcgucuccuccggcaucuccaucuacuggaccaucgucaagcccggcgacauccuccucaucaacuccaccggcaaccucaucgccccccgcggcuacuucaagauccgcuccggcaaguccuccaucaugcgcuccgacgcccccaucggcaagugcaacuccgagugcaucacccccaacggcuccauccccaacgacaagcccuuccagaacgucaaccgcaucaccuacggcgccugcccccgcuacgucaagcagaacacccucaagcucgccaccggcaugcgcaacguccccgagaagcagacccgcggcaucuucggcgccaucgccggcuucaucgagaacggcugggagggcaugauggacggcugguacggcuuccgccaccagaacuccgagggcaccggccaggccgccgaccucaaguccacccaggccgccaucaaccagaucaacggcaagcucaaccgccucaucgagaagaccaacgagaaguuccaccagaucgagaaggaguucuccgaggucgagggccgcauccaggaccucgagaaguacgucgaggacaccaagaucgaccucugguccuacaacgccgagcuccucgucgcccucgagaaccagcacaccaucgaccucaccgacuccgagaugaacaagcucuucgagcgcaccaagaagcagcuccgcgagaacgccgaggacaugggcaacggcugcuucaagaucuaccacaagugcgacaacgccugcaucggcuccauccgcaacggcaccuacgaccacgacgucuaccgcgacgaggcccucaacaaccgcuuccagaucaagggcgucgagcucaaguccggcuacaaggacuggauccucuggaucuccuucgccaucuccugcuuccuccucugcaucguccuccucggcuucaucaugugggccugccagaagggcaacauccgcugcaacaucugcaucuga

SEQ ID NO: 98150 - RNA, 1701 nt, Artificial Sequence
  derived and/or modified CDS sequence (opt2) from hemagglutinin__InfluenzaA__ABW80977
augaagaccaucaucgcccucuccuacauccucugccucgucuucgcccagaagcuccccggcaacgacaacuccaccgccacccucugccucggccaccacgccguccccaacggcaccaucgucaagaccaucaccaacgaccagaucgaggucaccaacgccaccgagcucguccaguccuccuccaccggcggcaucugcgacuccccccaccagauccucgacggcgagaacugcacccucaucgacgcccuccucggcgacccccagugcgacggcuuccagaacaagaagugggaccucuucgucgagcgcuccaaggccuacuccaacugcuaccccuacgacguccccgacuacgccucccuccgcucccucgucgccuccuccggcacccucgaguucaacaacgaguccuucaacuggaccggcgucacccagaacggcaccuccuccgccugcaagcgccgcuccaacaaguccuucuucucccgccucaacuggcucacccaccucaaguucaaguaccccgcccucaacgucaccaugcccaacaacgagaaguucgacaagcucuacaucuggggcguccaccaccccggcaccgacaacgaccagaucaaccucuacgcccaggccuccggccgcaucaccgucuccaccaagcgcucccagcagaccgucauccccaacaucggcucccgcccccgcguccgcgacguccccucccgcaucuccaucuacuggaccaucgucaagcccggcgacauccuccucaucuccuccaccggcaaccucaucgccccccgcggcuacuucaagauccgcuccggcaaguccuccaucaugcgcuccgacgcccccaucggcaagugcaacuccgagugcaucacccccaacggcuccauccccaacgacaagcccuuccagaacgucaaccgcaucaccuacggcgccugcccccgcuacgucaagcagaacacccucaagcucgccaccggcaugcgcaacguccccgagaagcagacccgcggcaucuucggcgccaucgccggcuucaucgagaacggcugggagggcauggucgacggcugguacggcuuccgccaccagaacuccgagggcaccggccaggccgccgaccucaaguccacccaggccgccaucaaccagaucaacggcaagcucaaccgccucaucggcaagaccaacgagaaguuccaccagaucgagaaggaguucuccgaggucgagggccgcauccaggaccucgagaaguacgucgaggacaccaagaucgaccucugguccuacaacgccgagcuccucgucgcccucgagaaccagcacaccaucgaccucaccgacuccgagaugaacaagcucuucgagcgcaccaagaagcagcuccgcgagaacgccgaggacaugggcaacggcugcuucaagaucuaccacaagugcgacaacgccugcaucggcuccauccgcaacggcaccuacgaccacgacgucuaccgcgacgaggcccucaacaaccgcuuccagaucaagggcgucgagcucaaguccggcuacaaggacuggauccucuggaucuccuucgccaucuccugcuuccuccucugcgucgcccuccucggcuucaucaugugggccugccagaagggcaacauccgcugcaacaucugcaucuga

SEQ ID NO: 98151 - RNA, 1698 nt, Artificial Sequence
  derived and/or modified CDS sequence (opt2) from hemagglutinin__InfluenzaA__ABW80979
augaaggccaagcuccucguccuccucugcaccuucaccgccaccuacgccgacaccaucugcaucggcuaccacgccaacaacuccaccgacaccgucgacaccguccucgagaagaacgucaccgucacccacuccgucaaccuccucgaggacucccacaacggcaagcucugccuccucaagggcaucgccccccuccagcucggcaacugcuccgucgccggcuggauccucggcaaccccgagugcgagcuccucaucuccaaggaguccugguccuacaucgucgagacccccaaccccgagaacggcaccugcuaccccggcuacuucgccgacuacgaggagcuccgcgagcagcucuccuccgucuccuccuucgagcgcuucgagaucuuccccaaggaguccuccuggcccaaccacaccgucaccggcgucuccgccuccugcucccacaacggcaaguccuccuucuaccgcaaccuccucuggcucaccggcaagaacggccucuaccccaaccucuccaaguccuacgucaacaacaaggagaaggagguccucguccucuggggcguccaccacccccccaacaucggcaaccagcgcgcccucuaccacaccgagaacgccuacgucuccgucgucuccucccacuacucccgccgcuucacccccgagaucgccaagcgccccaagguccgcgaccaggagggccgcaucaacuacuacuggacccuccucgagcccggcgacaccaucaucuucgaggccaacggcaaccucaucgcccccugguacgccuucgcccucucccgcggcuucggcuccggcaucaucaccuccaacgcccccauggacgagugcgacgccaagugccagaccccccagggcgccaucaacuccucccuccccuuccagaacguccaccccgucaccaucggcgagugccccaaguacguccgcuccgccaagcuccgcauggucaccggccuccgcaacauccccuccauccagucccgcggccucuucggcgccaucgccggcuucaucgagggcggcuggaccggcauggucgacggcugguacggcuaccaccaccagaacgagcagggcuccggcuacgccgccgaccagaaguccacccagaacgccaucaacggcaucaccaacaaggucaacuccgucaucgagaagaugaacacccaguucaccgccgucggcaaggaguucaacaagcucgagcgccgcauggagaaccucaacaagaaggucgacgacggcuuccucgacaucuggaccuacaacgccgagcuccucguccuccucgagaacgagcgcacccucgacuuccacgacuccaacgucaagaaccucuacgagaaggucaagucccagcucaagaacaacgccaaggagaucggcaacggcugcuucgaguucuaccacaagugcaacaacgagugcauggaguccgucaagaacggcaccuacgacuaccccaaguacuccgaggaguccaagcucaaccgcgagaagaucgacggcgucaagcucgaguccaugggcgucuaccagauccucgccaucuacuccaccgucgccuccucccucguccuccucgucucccucggcgccaucuccuucuggaugugcuccaacggcucccuccagugccgcaucugcaucuga

SEQ ID NO: 98152 - RNA, 1701 nt, Artificial Sequence
  derived and/or modified CDS sequence (opt2) from hemagglutinin__InfluenzaA__ABW81505
augaaggccaagcuccucguccuccucugcaccuucaccgccaccuacgccgacaccaucugcaucggcuaccacgccaacaacuccaccgacaccgucgacaccguccucgagaagaacgucaccgucacccacuccgucaaccuccucgaggacucccacaacggcaagcucugccgccucaagggcaccgccccccuccagcucggcaacugcuccaucgccggcuggauccucggcaaccccgagugcgagucccucuucuccaaggaguccugguccuacaucgccgagacccccaaccccaagaacggcaccugcuaccccggcuacuucgccgacuacgaggagcuccgcgagcagcucuccuccgucuccuccuucgagcgcuucgagaucuuccccaaggacuccuccuggcccaaccacaccgucaccaagggcgucaccgccuccugcucccacaacggcaaguccuccuucuacaagaaccuccucuggcucaccgagaagaacggccucuaccccaaccucuccaaguccuacgucaacaagaagggcaaggagguccucguccucuggggcguccaccaccccuccaacaugggcgaccagcgcgccaucuaccacaaggagaacgccuacgucuccguccucuccucccacuacucccgccgcuucacccccgagaucgccaagcgccccaagguccgcgaccaggagggccgcaucaacuacuacuggacccuccucgagcccggcgacaccaucaucuucgaggccaacggcaaccucaucgcccccugguacgccuucgcccucucccgcggcuucggcuccggcaucaucaucuccaacgccuccaugggcgagugcgacgccaagugccagaccccccagggcgccaucaacuccucccuccccuuccagaacguccaccccgucaccaucggcgagugccccaaguacguccgcuccaccaagcuccgcauggucaccggccuccgcaacguccccuccauccagucccgcggccucuucggcgccaucgccggcuucaucgagggcggcuggaccggcaugaucgacggcugguacggcuaccaccaccagaacgagcagggcuccggcuacgccgccgaccagaaguccacccagaacgccaucaacggcaucaccaacaaggucaacuccaucaucgagaagaugaacacccaguucaccgccgucggcaaggaguucaacaagcucgagcgccgcauggagaaccucaacaagaaggucgacgacggcuuccucgacaucuggaccuacaacgccgagcuccucguccuccucgagaacgagcgcacccucgacuuccacgacuccaacgucaagaaccucuacgagaaggucaagacccagcucaagaacaacgccaaggagaucggcaacggcugcuucgaguucuaccacaagugcaacaacgagugcauggaguccgucaagaacggcaccuacgacuaccccaaguacuccaaggaguccaagcucaaccgcgagaagaucgacggcgucaagcucgaguccaugggcgucuaccagauccucgccaucuacuccaccgucgccuccucccucguccuccucgucucccucggcgccaucuccuucuggaugugcuccaacggcucccuccagugccgcaucugcaucuga

SEQ ID NO: 98153 - RNA, 1698 nt, Artificial Sequence
  derived and/or modified CDS sequence (opt2) from hemagglutinin__InfluenzaA__ABW81506
augaaggucaagcuccucguccuccucugcaccuucaccgccaccuacgccgacaccaucugcaucggcuaccacgccaacaacuccaccgacaccgucgacaccguccucgagaagaacgucaccgucacccacuccgucaaccuccucgaggacucccacaacggcaagcucugccuccucaagggcaucgccccccuccagcucggcaacugcuccgucgccggcuggauccucggcaaccccgagugcgagcuccucaucuccaaggaguccugguccuacaucgucgagacccccaaccccgagaacggcaccugcuaccccggcuacuucgccgacuacgaggagcuccgcgagcagcucuccuccgucuccuccuucgagcgcuucgagaucuuccccaaggaguccuccuggcccaaccacaccgucaccggcgucuccgccuccugcucccacaacggcaaguccuccuucuaccgcaaccuccucuggcucaccggcaagaacggccucuaccccaaccucuccaaguccuacgccaacaacaaggagaaggagguccucguccucuggggcguccaccacccccccaacaucggcaaccagcgcgcccucuaccacaccgagaacgccuacgucuccgucgucuccucccacuacucccgccgcuucacccccgagaucgccaagcgccccaagguccgcgaccaggagggccgcaucaacuacuacuggacccuccucgagcccggcgacaccaucaucuucgaggccaacggcaaccucaucgcccccugguacgccuucgcccucucccgcggcuucggcuccggcaucaucaccuccaacgcccccauggacgagugcgacgccaagugccagaccccccagggcgccaucaacuccucccuccccuuccagaacguccaccccgucaccaucggcgagugccccaaguacguccgcuccgccaagcuccgcauggucaccggccuccgcaacauccccuccauccagucccgcggccucuucggcgccaucgccggcuucaucgagggcggcuggaccggcauggucgacggcugguacggcuaccaccaccagaacgagcagggcuccggcuacgccgccgaccagaaguccacccagaacgccaucaacggcaucaccaacaaggucaacuccgucaucgagaagaugaacacccaguucaccgccgucggcaaggaguucaacaagcucgagcgccgcauggagaaccucaacaagaaggucgacgacggcuuccucgacaucuggaccuacaacgccgagcuccucguccuccucgagaacgagcgcacccucgacuuccacgacuccaacgucaagaaccucuacgagaaggucaagucccagcucaagaacaacgccaaggagaucggcaacggcugcuucgaguucuaccacaagugcaacaacgagugcauggaguccgucaagaacggcaccuacgacuaccccaaguacuccgaggaguccaagcucaaccgcgagaagaucgacggcgucaagcucgaguccaugggcaucuaccagauccucgccaucuacuccaccgucgccuccucccucguccuccucgucucccucggcgccaucuccuucuggaugugcuccaacggcucccuccagugccgcaucugcaucuga

SEQ ID NO: 98154 - RNA, 1701 nt, Artificial Sequence
  derived and/or modified CDS sequence (opt2) from hemagglutinin__InfluenzaA__ABW81507
augaaggccaagcuccucguccuccucugcaccuucaccgccaccuacgccgacaccaucugcaucggcuaccacgccaacaacuccaccgacaccgucgacaccguccucgagaagaacgucaccgucacccacuccgucaaccuccucgaggacucccacaacggcaagcucugccgccucaagggcaccgucccccuccagcucggcaacugcuccaucgccggcuggauccucggcaaccccgagugcgagucccucuucuccaaggaguccugguccuacaucgccgagacccccaaccccaagaacggcaccugcuaccccggcuacuucgccgacuacgaggagcuccgcgagcagcucuccuccgucuccuccuucgagcgcuucgagaucuuccccaaggacuccuccuggcccaaccacaccgucaccaagggcgucaccgccuccugcucccacaacggcaaguccuccuucuacaagaaccuccucuggcucaccgagaagaacggccucuaccccaaccucuccaaguccuacgucaacaagaagggcaaggagguccucguccucuggggcguccaccaccccuccaacaugggcgaccagcgcgccaucuaccacaaggagaacgccuacgucuccguccucuccucccacuacucccgccgcuucacccccgagaucgccaagcgccccaagguccgcgaccaggagggccgcaucaacuacuacuggacccuccucgagcccggcgacaccaucaucuucgaggccaacggcaaccucaucgcccccugguacgccuucgcccucucccgcggcuucggcuccggcaucaucaucuccaacgccuccaugggcgagugcgacgccaagugccagaccccccagggcgccaucaacuccucccuccccuuccagaacguccaccccgucaccaucggcgagugccccaaguacguccgcuccaccaagcuccgcauggucaccggccuccgcaacguccccuccauccagucccgcggccucuucggcgccaucgccggcuucaucgagggcggcuggaccggcaugaucgacggcugguacggcuaccaccaccagaacgagcagggcuccggcuacgccgccgaccagaaguccacccagaacgccaucaacggcaucaccaacaaggucaacuccaucaucgagaagaugaacacccaguucaccgccgucggcaaggaguucaacaagcucgagcgccgcauggagaaccucaacaagaaggucgacgacggcuuccucgacaucuggaccuacaacgccgagcuccucguccuccucgagaacgagcgcacccucgacuuccacgacuccaacgucaagaaccucuacgagaaggucaagacccagcucaagaacaacgccaaggagaucggcaacggcugcuucgaguucuaccacaagugcaacaacgagugcauggaguccgucaagaacggcaccuacgacuaccccaaguacuccaaggaguccaagcucaaccgcgagaagaucgacggcgucaagcucgaguccaugggcgucuaccagauccucgccaucuacuccaccgucgccuccucccucguccuccucgucucccucggcgccaucuccuucuggaugugcuccaacggcucccuccagugccgcaucugcaucuga

SEQ ID NO: 98155 - RNA, 1698 nt, Artificial Sequence
  derived and/or modified CDS sequence (opt2) from hemagglutinin__InfluenzaA__ABW81508
augaaggucaagcuccucguccuccucugcaccuucaccgccaccuacgccgacaccaucugcaucggcuaccacgccaacaacuccaccgacaccgucgacaccguccucgagaagaacgucaccgucacccacuccgucaaccuccucgaggacucccacaacggcaagcucugccuccucaagggcaucgccccccuccagcucggcaacugcuccgucgccggcuggauccucggcaaccccgagugcgagcuccucaucuccaaggaguccugguccuacaucgucgagacccccaaccccgagaacggcaccugcuaccccggcuacuucgccgacuacgaggagcuccgcgagcagcucuccuccgucuccuccuucgagcgcuucgagaucuuccccaaggaguccuccuggcccaaccacaccgucaccggcgucuccgccuccugcucccacaacggcaaguccuccuucuaccgcaaccuccucuggcucacccgcaagaacggccucuaccccaaccucuccaaguccuacgccaacaacaaggagaaggagguccucguccucuggggcguccaccacccccccaacaucggcgaccagcgcgcccucuaccacaccgagaacgccuacgucuccgucgucuccucccacuacucccgccgcuucacccccgagaucgccaagcgccccaagguccgcgaccaggagggccgcaucaacuacuacuggacccuccucgagcccggcgacaccaucaucuucgaggccaacggcaaccucaucgccccccgcuacgccuucgcccucucccgcggcuucggcuccggcaucaucaccuccaacgcccccauggacgagugcgacgccaagugccagaccccccagggcgccaucaacuccucccuccccuuccagaacguccaccccgucaccaucggcgagugccccaaguacguccgcuccgccaagcuccgcauggucaccggccuccgcaacauccccuccauccagucccgcggccucuucggcgccaucgccggcuucaucgagggcggcuggaccggcauggucgacggcugguacggcuaccaccaccagaacgagcagggcuccggcuacgccgccgaccagaaguccacccagaacgccaucaacggcaucaccaacaaggucaacuccgucaucgagaagaugaacacccaguucaccgccgucggcaaggaguucaacaagcucgagcgccgcauggagaaccucaacaagaaggucgacgacggcuuccucgacaucuggaccuacaacgccgagcuccucguccuccucgagaacgagcgcacccucgacuuccacgacuccaacgucaagaaccucuacgagaaggucaagucccagcucaagaacaacgccaaggagaucggcaacggcugcuucgaguucuaccacaagugcaacgacgagugcauggaguccgucaagaacggcaccuacgacuaccccaaguacuccgaggaguccaagcucaaccgcgagaagaucgacggcgucaagcucgaguccaugggcgucuaccagauccucgccaucuacuccaccgucgccuccucccucguccuccucgucucccucggcgccaucuccuucuggaugugcuccaacggcucccuccagugccgcaucugcaucuga

SEQ ID NO: 98156 - RNA, 1701 nt, Artificial Sequence; identical to SEQ ID NO: 98152
  derived and/or modified CDS sequence (opt2) from hemagglutinin__InfluenzaA__ABW81509

SEQ ID NO: 98157 - RNA, 1698 nt, Artificial Sequence
  derived and/or modified CDS sequence (opt2) from hemagglutinin__InfluenzaA__ABW81511
augaaggccaagcuccucguccuccucugcaccuucaccgccaccuacgccgacaccaucugcaucggcuaccacgccaacaacuccaccgacaccgucgacaccguccucgagaagaacgucaccgucacccacuccgucaaccuccucgaggacucccacaacggcaagcucugccuccucaagggcaucgccccccuccagcucggcaacugcuccgucgccggcuggauccucggcaaccccgagugcgagcuccucaucuccaaggaguccugguccuacaucgucgagacccccaaccccgagaacggcaccugcuaccccggcuacuucgccgacuacgaggagcuccgcgagcagcucuccuccgucuccuccuucgagcgcuucgagaucuuccccaagggcuccuccuggcccaaccacaccgucaccggcgucuccgccuccugcucccacaacggcaaguccuccuucuaccgcaaccuccucuggcucaccggcaagaacggccucuaccccaaccucuccauguccuacgucaacaacaaggagaaggagguccucguccucuggggcguccaccacccccccaacaucggcaaccagcgcgcccucuaccacaccgagaacgccuacgucuccgucgucuccucccacuacucccgccgcuucacccccgagaucgccaagcgccccaagguccgcgaccaggagggccgcaucaacuacuacuggacccuccucgagcccggcgacuccaucaucuucgaggccaacggcaaccucaucgcccccugguacgccuucgcccucucccgcggcuucggcuccggcaucaucaccuccaacgcccccauggacgagugcgacgccaagugccagaccccccagggcgccaucaacuccucccuccccuuccagaacguccaccccgucaccaucggcgagugccccaaguacguccgcuccgccaagcuccgcauggucaccggccuccgcaacauccccuccauccagucccgcggccucuucggcgccaucgccggcuucaucgagggcggcuggaccggcauggucgacggcugguacggcuaccaccaccagaacgagcagggcuccggcuacgccgccgaccagaaguccacccagaacgccaucaacggcaucaccaacaaggucaacuccgucaucgagaagaugaacacccaguucaccgccgucggcaaggaguucaacaagcucgagcgccgcauggagaaccucaacaagaaggucgacgacggcuuccucgacaucuggaccuacaacgccgagcuccucguccuccucgagaacgagcgcacccucgacuuccacgacuccaacgucaagaaccucuacgagaaggucaagucccagcucaagaacaacgccaaggagaucggcaacggcugcuucgaguucuaccacaagugcaacaacgagugcauggaguccgucaagaacggcaccuacgacuaccccaaguacuccgaggaguccaagcucaaccgcgagaagaucgacggcgucaagcucgaguccaugggcgucuaccagauccucgccaucuacuccaccgucgccuccucccucguccuccucgucucccucggcgccaucuccuucuggaugugcuccaacggcucccuccagugccgcaucugcaucuga

SEQ ID NO: 98158 - RNA, 1698 nt, Artificial Sequence; identical to SEQ ID NO: 96332
  derived and/or modified CDS sequence (opt2) from hemagglutinin__InfluenzaA__ABW81512

SEQ ID NO: 98159 - RNA, 1698 nt, Artificial Sequence; identical to SEQ ID NO: 97421
  derived and/or modified CDS sequence (opt2) from hemagglutinin__InfluenzaA__ABW81513

SEQ ID NO: 98160 - RNA, 1698 nt, Artificial Sequence
  derived and/or modified CDS sequence (opt2) from hemagglutinin__InfluenzaA__ABW81514
augaaggucaagcuccucguccuccucugcaccuucaccgccaccuacgccgacaccaucugcaucuccuaccacgccaacaacuccaccgacaccgucgacaccguccucgagaagaacgucaccgucacccacuccgucaaccuccucgaggacucccacaacggcaagcucugccuccucaagggcaucgccccccuccagcucggcaacugcuccgucgccggcuggauccucggcaaccccgagugcgagcuccucaucuccaaggaguccugguccuacaucgucgagacccccaaccccgagaacggcaccugcuaccccggcuacuucgccgacuacgaggagcuccgcgagcagcucuccuccgucuccuccuucgagcgcuucgagaucuuccccaaggaguccuccuggcccaaccacaccgucaccggcgucuccgccuccugcucccacaacggcaaguccuccuucuaccgcaaccuccucuggcucaccggcaagaacggccucuaccccaaccucuccaaguccuacgccaacaacaaggagaaggagguccucguccucuggggcguccaccacccccccaacaucggcgaccagcgcgcccucuaccacaccgagaacgccuacgucuccgucgucuccucccacuacucccgccgcuucacccccgagaucgccaagcgccccaagguccgcgaccaggagggccgcaucaacuacuacuggacccuccucgagcccggcgacaccaucaucuucgaggccaacggcaaccucaucgccccccgcuucgccuucgcccucucccgcggcuucggcuccggcaucaucaccuccaacgcccccauggacgagugcgacgccaagugccagaccccccagggcgccaucaacuccucccuccccuuccagaacguccaccccgucaccaucggcgagugccccaaguacguccgcuccgccaagcuccgcauggccaccggccuccgcaacauccccuccauccagucccgcggccucuucggcgccaucgccggcuucaucgagggcggcuggaccggcauggucgacggcugguacggcuaccaccaccagaacgagcagggcuccggcuacgccgccgaccagaaguccacccagaacgccaucaacggcaucaccaacaaggucaacuccgucaucgagaagaugaacacccaguucaccgccgucggcaaggaguucuccaagcucgagcgccgcauggagaaccucaacaagaaggucgacgacggcuuccucgacaucuggaccuacaacgccgagcuccucguccuccucgagaacgagcgcacccucgacuuccacgacuccaacgucaagaaccucuacgagaaggucaagucccagcucaagaacaacgccaaggagaucggcaacggcugcuucgaguucuaccacaagugcaacgacgagugcauggaguccgucaagaacggcaccuacgacuaccccaaguacuccgaggaguccaagcucaaccgcgagaagaucgacggcgucaagcucgaguccaugggcgucuaccagauccucgccaucuacuccaccgucgccuccucccucguccuccucgucucccucggcgccaucuccuucuggaugugcuccaacggcucccuccagugccgcaucugcaucuga

SEQ ID NO: 98161 - RNA, 1698 nt, Artificial Sequence; identical to SEQ ID NO: 97421
  derived and/or modified CDS sequence (opt2) from hemagglutinin__InfluenzaA__ABW81515

SEQ ID NO: 98162 - RNA, 1698 nt, Artificial Sequence; identical to SEQ ID NO: 97421
  derived and/or modified CDS sequence (opt2) from hemagglutinin__InfluenzaA__ABW81516

SEQ ID NO: 98163 - RNA, 1698 nt, Artificial Sequence
  derived and/or modified CDS sequence (opt2) from hemagglutinin__InfluenzaA__ABW81517
augaaggucaagcuccucguccuccucugcaccuucaccgccaccuacgccgacaccaucugcaucggcuaccacgccaacaacuccaccgacaccgucgacaccguccucgagaagaacgucaccgucacccacuccgucaaccuccucgaggacucccacaacggcaagcucugccuccucaagggcaucgccccccuccagcucggcaacugcuccgucgccggcuggauccucggcaaccccgagugcgagcuccucaucuccaaggaguccugguccuacaucgucgagacccccaaccccgagaacggcaccugcuaccccggcuacuucgccgacuacgaggagcuccgcgagcagcucuccuccaucuccuccuucgagcgcuucgagaucuuccccaaggaguccuccuggcccaaccacaccgucaccggcgucuccgccuccugcucccacaacggcaaguccuccuucuaccgcaaccuccucuggcucaccggcaagaacggccucuaccccaaccucuccaaguccuacgccaacaacaaggagaaggagguccucguccucuggggcguccaccacccccccaacaucggcgaccagcgcgcccucuaccacaccgagaacgccuacgucuccgucgucuccucccacuacucccgccgcuucacccccgagaucgccaagcgccccaagguccgcgaccaggagggccgcaucaacuacuacuggacccuccucgagcccggcgacaccaucaucuucgaggccaacggcaaccucaucgccccccgcuucgccuucgcccucucccgcggcuucggcuccggcaucaucaccuccaacgcccccauggacgagugcgacgccaagugccagaccccccagggcgccaucaacuccucccuccccuuccagaacguccaccccgucaccaucggcgagugccccaaguacguccgcuccgccaagcuccgcauggccaccggccuccgcaacauccccuccauccagucccgcggccucuucggcgccaucgccggcuucaucgagggcggcuggaccggcauggucgacggcugguacggcuaccaccaccagaacgagcagggcuccggcuacgccgccgaccagaaguccacccagaacgccaucaacggcaucaccaacaaggucaacuccgucaucgagaagaugaacacccaguucaccgccgucggcaaggaguucuccaagcucgagcgccgcauggagaaccucaacaagaaggucgacgacggcuuccucgacaucuggaccuacaacgccgagcuccucguccuccucgagaacgagcgcacccucgacuuccacgacuccaacgucaagaaccucuacgagaaggucaagucccagcucaagaacaacgccaaggagaucggcaacggcugcuucgaguucuaccacaagugcaacgacgagugcauggaguccgucaagaacggcaccuacgacuaccccaaguacuccgaggaguccaagcucaaccgcgagaagaucgacggcgucaagcucgaguccaugggcgucuaccagauccucgccaucuacuccaccgucgccuccucccucguccuccucgucucccucggcgccaucuccuucuggaugugcuccaacggcucccuccagugccgcaucugcaucuga

SEQ ID NO: 98164 - RNA, 1698 nt, Artificial Sequence
  derived and/or modified CDS sequence (opt2) from hemagglutinin__InfluenzaA__ABW81518
augaaggucaagcuccucguccuccucugcaccuacaccgccaccuacgccgacaccaucugcaucggcuaccacgccaacaacuccaccgacaccgucgacaccguccucgagaagaacgucaccgucacccacuccgucaaccuccucgaggacucccacaacggcaagcucugccuccucaagggcaucgccccccuccagcucggcaacugcuccgucgccggcuggauccucggcaaccccgagugcgagcuccucaucuccaaggaguccugguccuacaucgucgagacccccaaccccgagaacggcaccugcuaccccggcuacuucgccgacuacgaggagcuccgcgagcagcucuccuccgucuccuccuucgagcgcuucgagaucuuccccaaggaguccuccuggcccaaccacaccgucaccggcgucuccgccuccugcucccacaacggcaaguccuccuucuaccgcaaccuccucuggcucaccggcaagaacggccucuaccccaaccucuccaaguccuacgccaacaacaaggagaaggagguccucguccucuggggcguccaccacccccccaacaucggcgaccagcgcgcccucuaccacaccgagaacgccuacgucuccgucgucuccucccacuacucccgccgcuucacccccgagaucgccaagcgccccaagguccgcgaccaggagggccgcaucaacuacuacuggacccuccucgagcccggcgacaccaucaucuucgaggccaacggcaaccucaucgccccccgcuucgccuucgcccucucccgcggcuucggcuccggcaucaucaccuccaacgcccccauggacgagugcgacgccaagugccagaccccccagggcgccaucaacuccucccuccccuuccagaacguccaccccgucaccaucggcgagugccccaaguacguccgcuccgccaagcuccgcauggccaccggccuccgcaacauccccuccauccagucccgcggccucuucggcgccaucgccggcuucaucgagggcggcuggaccggcauggucgacggcugguacggcuaccaccaccagaacgagcagggcuccggcuacgccgccgaccagaaguccacccagaacgccaucaacggcaucaccaacaaggucaacuccgucaucgagaagaugaacacccaguucaccgccgucggcaaggaguucuccaagcucgagcgccgcauggagaaccucaacaagaaggucgacgacggcuuccucgacaucuggaccuacaacgccgagcuccucguccuccucgagaacgagcgcacccucgacuuccacgacuccaacgucaagaaccucuacgagaaggucaagucccagcucaagaacaacgccaaggagaucggcaacggcugcuucgaguucuaccacaagugcaacgacgagugcauggaguccgucaagaacggcaccuacgacuaccccaaguacuccgaggaguccaagcucaaccgcgagaagaucgacggcgucaagcucgaguccaugggcgucuaccagauccucgccaucuacuccaccgucgccuccucccucguccuccucgucucccucggcgccaucuccuucuggaugugcuccaacggcucccuccagugccgcaucugcaucuga

SEQ ID NO: 98165 - RNA, 1698 nt, Artificial Sequence
  derived and/or modified CDS sequence (opt2) from hemagglutinin__InfluenzaA__ABW81519
augaaggucaagcuccucguccuccucugcaccuucaccgccaccuacgccgacaccaucugcaucggcuaccacgccaacaacuccaccgacaccgucgacaccguccucgagaagaacgucaccgucacccacuccgucaaccuccucgaggacucccacaacggcaagcucugccuccucaagggcaucgccccccuccagcucggcaacugcuccgucgccggcuggauccucggcaaccccgagugcgagcuccucaucuccaaggaguccugguccuacaucgucgagacccccaaccccgagaacggcaccugcuaccccggcuacuucgccgacuacgaggagcuccgcgagcagcucuccuccgucuccuccuucgagcgcuucgagaucuuccccaaggaguccuccuggcccaaccacaccgucaccggcgucuccgccuccugcucccacaacggcaaguccuccuucuaccgcaaccuccucuggcucaccggcaagaacggccucuaccccaaccucuccaaguccuacgccaacaacaaggagaaggagguccucguccucuggggcguccaccacccccccaacaucggcgaccagcgcgcccucuaccacaccgagaacgcccacgucuccgucgucuccucccacuacucccgccgcuucacccccgagaucgccaagcgccccaagguccgcgaccaggagggccgcaucaacuacuacuggacccuccucgagcccggcgacaccaucaucuucgaggccaacggcaaccucaucgccccccgcuucgccuucgcccucucccgcggcuucggcuccggcaucaucaccuccaacgcccccauggacgagugcgacgccaagugccagaccccccagggcgccaucaacuccucccuccccuuccagaacguccaccccgucaccaucggcgagugccccaaguacguccgcuccgccaagcuccgcauggccaccggccuccgcaacauccccuccauccagucccgcggccucuucggcgccaucgccggcuucaucgagggcggcuggaccggcauggucgacggcugguacggcuaccaccaccagaacgagcagggcuccggcuacgccgccgaccagaaguccacccagaacgccaucaacggcaucaccaacaaggucaacuccgucaucgagaagaugaacacccaguucaccgccgucggcaaggaguucuccaagcucgagcgccgcauggagaaccucaacaagaaggucgacgacggcuuccucgacaucuggaccuacaacgccgagcuccucguccuccucgagaacgagcgcacccucgacuuccacgacuccaacgucaagaaccucuacgagaaggucaagucccagcucaagaacaacgccaaggagaucggcaacggcugcuucgaguucuaccacaagugcaacgacgagugcauggaguccgucaagaacggcaccuacgacuaccccaaguacuccgaggaguccaagcucaaccgcgagaagaucgacggcgucaagcucgaguccaugggcgucuaccagauccucgccaucuacuccaccgucgccuccucccucguccuccucgucucccucggcgccaucuccuucuggaugugcuccaacggcucccuccagugccgcaucugcaucuga

SEQ ID NO: 98166 - RNA, 1698 nt, Artificial Sequence
  derived and/or modified CDS sequence (opt2) from hemagglutinin__InfluenzaA__ABW81520
augaaggucaagcuccucguccuccucugcaccuucaccgccaccuacgccgacaccaucugcaucggcuaccacgccaacaacuccaccgacaccgucgacaccguccucgagaagaacgucaccgucacccacuccgucaaccuccucgaggacucccacaacggcaagcucugccuccucaagggcaucgccccccuccagcucggcuccugcuccgucgccggcuggauccucggcaaccccgagugcgagcuccucaucuccaaggaguccugguccuacaucgucgagacccccaaccccgagaacggcaccugcuaccccggcuacuucgccgacuacgaggagcuccgcgagcagcucuccuccgucuccuccuucgagcgcuucgagaucuuccccaaggaguccuccuggcccaaccacaccgucaccggcgucuccgccuccugcucccacaacggcaaguccuccuucuaccgcaaccuccucuggcucaccggcaagaacggccucuaccccaaccucuccaaguccuacgccaacaacaaggagaaggagguccucguccucuggggcguccaccacccccccaacaucggcgaccagcgcgcccucuaccacaccgagaacgccuacgucuccgucgucuccucccacuacucccgccgcuucacccccgagaucgccaagcgccccaagguccgcgaccaggagggccgcaucaacuacuacuggacccuccucgagcccggcgacaccaucaucuucgaggccaacggcaaccucaucgccccccgcuucgccuucgcccucucccgcggcuucggcuccggcaucaucaccuccaacgcccccauggacgagugcgacgccaagugccagaccccccagggcgccaucaacuccucccuccccuuccagaacguccaccccgucaccaucggcgagugccccaaguacguccgcuccgccaagcuccgcauggccaccggccuccgcaacauccccuccauccagucccgcggccucuucggcgccaucgccggcuucaucgagggcggcuggaccggcauggucgacggcugguacggcuaccaccaccagaacgagcagggcuccggcuacgccgccgaccagaaguccacccagaacgccaucaacggcaucaccaacaaggucaacuccgucaucgagaagaugaacacccaguucaccgccgucggcaaggaguucuccaagcucgagcgccgcauggagaaccucaacaagaaggucgacgacggcuuccucgacaucuggaccuacaacgccgagcuccucguccuccucgagaacgagcgcacccucgacuuccacgacuccaacgucaagaaccucuacgagaaggucaagucccagcucaagaacaacgccaaggagaucggcaacggcugcuucgaguucuaccacaagugcaacgacgagugcauggaguccgucaagaacggcaccuacgacuaccccaaguacuccgaggaguccaagcucaaccgcgagaagaucgacggcgucaagcucgaguccaugggcgucuaccagauccucgccaucuacuccaccgucgccuccucccucguccuccucgucucccucggcgccaucuccuucuggaugugcuccaacggcucccuccagugccgcaucugcaucuga

SEQ ID NO: 98167 - RNA, 1698 nt, Artificial Sequence
  derived and/or modified CDS sequence (opt2) from hemagglutinin__InfluenzaA__ABW81521
augaaggucaagcuccucguccuccucugcaccuucaccgccaccuacgccgacaccaucugcaucggcuaccacgccaacaacuccaccgacaccgucgacaccguccucgagaagaacgucaccgucacccacuccgucaaccuccucgaggacucccacaacggcaagcucugccuccucaagggcaucgccccccuccagcucggcaacugcuccgucgccggcuggauccucggcaaccccgagugcgagcuccucaucuccaaggaguccugguccuacaucgucgagacccccaaccccgagaacggcaccugcuaccccggcuacuucgccgacuacgaggagcuccgcgagcagcucuccuccgucuccuccuucgagcgcuucgagaucuuccccaaggaguccuccuggcccaaccacaccgucaccggcgucuccgccuccugcucccacaacggcaaguccuccuucuaccgcaaccuccucuggcucaccggcaagaacggccucuaccccaaccucuccaaguccuacgccaacaacaaggagaaggagguccucguccucuggggcguccaccacccccccaacaucggcgaccagcgcgcccucuaccacaccgagaacgccuacgucuccgucgucuccucccacuacucccgccgcuucacccccgagaucgccaagcgccccaagguccgcgaccaggagggccgcaucaacuacuacuggacccuccucgagcccggcgacaccaucaucuucgaggccaacggcaaccucaucgccccccgcuucgccuucgcccucucccgcggcuucggcuccggcaucaucuccuccaacgcccccauggacgagugcgacgccaagugccagaccccccagggcgccaucaacuccucccuccccuuccagaacguccaccccgucaccaucggcgagugccccaaguacguccgcuccgccaagcuccgcauggccaccggccuccgcaacauccccuccauccagucccgcggccucuucggcgccaucgccggcuucaucgagggcggcuggaccggcauggucgacggcugguacggcuaccaccaccagaacgagcagggcuccggcuacgccgccgaccagaaguccacccagaacgccaucaacggcaucaccaacaaggucaacuccgucaucgagaagaugaacacccaguucaccgccgucggcaaggaguucuccaagcucgagcgccgcauggagaaccucaacaagaaggucgacgacggcuuccucgacaucuggaccuacaacgccgagcuccucguccuccucgagaacgagcgcacccucgacuuccacgacuccaacgucaagaaccucuacgagaaggucaagucccagcucaagaacaacgccaaggagaucggcaacggcugcuucgaguucuaccacaagugcaacgacgagugcauggaguccgucaagaacggcaccuacgacuaccccaaguacuccgaggaguccaagcucaaccgcgagaagaucgacggcgucaagcucgaguccaugggcgucuaccagauccucgccaucuacuccaccgucgccuccucccucguccuccucgucucccucggcgccaucuccuucuggaugugcuccaacggcucccuccagugccgcaucugcaucuga

SEQ ID NO: 98168 - RNA, 1698 nt, Artificial Sequence; identical to SEQ ID NO: 97421
  derived and/or modified CDS sequence (opt2) from hemagglutinin__InfluenzaA__ABW81522

SEQ ID NO: 98169 - RNA, 1698 nt, Artificial Sequence; identical to SEQ ID NO: 97421
  derived and/or modified CDS sequence (opt2) from hemagglutinin__InfluenzaA__ABW81523

SEQ ID NO: 98170 - RNA, 1698 nt, Artificial Sequence
  derived and/or modified CDS sequence (opt2) from hemagglutinin__InfluenzaA__ABW81524
augaaggucaagcuccucguccuccucugcaccuucaccgccaccuacgccgacaccaucugcaucggcuaccacgccaacaacuccaccgacaccaucgacaccguccucgagaagaacgucaccgucacccacuccgucaaccuccucgaggacucccacaacggcaagcucugccuccucaagggcaucgccccccuccagcucggcaacugcuccgucgccggcuggauccucggcaaccccgagugcgagcuccucaucuccaaggaguccugguccuacaucgucgagacccccaaccccgagaacggcaccugcuaccccggcuacuucgccgacuacgaggagcuccgcgagcagcucuccuccgucuccuccuucgagcgcuucgagaucuuccccaaggaguccuccuggcccaaccacaccgucaccggcgucuccgccuccugcucccacaacggcaaguccuccuucuaccgcaaccuccucuggcucaccggcaagaacggccucuaccccaaccucuccaaguccuacgccaacaacaaggagaaggagguccucguccucuggggcguccaccacccccccaacaucggcgaccagcgcgcccucuaccacaccgagaacgccuacgucuccgucgucuccucccacuacucccgccgcuucacccccgagaucgccaagcgccccaagguccgcgaccaggagggccgcaucaacuacuacuggacccuccucgagcccggcgacaccaucaucuucgaggccaacggcaaccucaucgccccccgcuucgccuucgcccucucccgcggcuucggcuccggcaucaucaccuccaacgcccccauggacgagugcgacgccaagugccagaccccccagggcgccaucaacuccucccuccccuuccagaacguccaccccgucaccaucggcgagugccccaaguacguccgcuccgccaagcuccgcauggccaccggccuccgcaacauccccuccauccagucccgcggccucuucggcgccaucgccggcuucaucgagggcggcuggaccggcauggucgacggcugguacggcuaccaccaccagaacgagcagggcuccggcuacgccgccgaccagaaguccacccagaacgccaucaacggcaucaccaacaaggucaacuccgucaucgagaagaugaacacccaguucaccgccgucggcaaggaguucuccaagcucgagcgccgcauggagaaccucaacaagaaggucgacgacggcuuccucgacaucuggaccuacaacgccgagcuccucguccuccucgagaacgagcgcacccucgacuuccacgacuccaacgucaagaaccucuacgagaaggucaagucccagcucaagaacaacgccaaggagaucggcaacggcugcuucgaguucuaccacaagugcaacgacgagugcauggaguccgucaagaacggcaccuacgacuaccccaaguacuccgaggaguccaagcucaaccgcgagaagaucgacggcgucaagcucgaguccaugggcgucuaccagauccucgccaucuacuccaccgucgccuccucccucguccuccucgucucccucggcgccaucuccuucuggaugugcuccaacggcucccuccagugccgcaucugcaucuga

SEQ ID NO: 98171 - RNA, 1698 nt, Artificial Sequence
  derived and/or modified CDS sequence (opt2) from hemagglutinin__InfluenzaA__ABW81526
augaaggucaagcuccucguccuccucugcaccuucaccgccaccuacgccgacaccaucugcaucggcuaccacgccaacaacuccaccgacaccgucgacaccguccucgagaagaacgucaccgucacccacuccgucaaccuccucgaggacucccacaacggcaagcucugccuccucaagggcaucgccccccuccagcucggcaacugcuccgucgccggcuggauccucggcaaccccgagugcgagcuccucaucuccaaggaguccugguccuacaucgucgagaagcccaaccccgagaacggcaccugcuaccccggccacuucgccgacuacgaggagcuccgcgagcagcucuccuccgucuccuccuucgagcgcuucgagaucuuccccaaggaguccuccuggcccaaccacaccgucaccggcgucuccgccuccugcucccacaacggcaaguccuccuucuacaagaaccuccucuggcucaccggcaagaacggccucuaccccaaccucuccaaguccuacgccaacaacaaggagaaggagguccucguccucuggggcguccaccacccccccaacaucggcgaccagaaggcccucuaccacaccgagaacgccuacgucuccgucgucuccucccacuacucccgcaaguucacccccgagaucgccaagcgccccaagguccgcgaccaggagggccgcaucaacuacuacuggacccuccucgagcccggcgacaccaucaucuucgaggccaacggcaaccucaucgccccccgcuacgccuucgcccucucccgcggcuucggcuccggcaucaucaacuccaacgcccccaugggcaagugcgacgccaagugccagaccccccagggcgccaucaacuccucccuccccuuccagaacguccaccccgucaccaucggcgagugccccaaguacguccgcuccgccaagcuccgcauggucaccggccuccgcaacauccccuccauccagucccgcggccucuucggcgccaucgccggcuucaucgagggcggcuggaccggcauggucgacggcugguacggcuaccaccaccagaacgagcagggcuccggcuacgccgccgaccagaaguccacccagaacgccaucaacggcaucaccaacaaggucaacuccgucaucgagaagaugaacacccaguucaccgccgucggcaaggaguucaacaagcucgagcgccgcauggagaaccucaacaagaaggucgacgacggcuucaucgacaucuggaccuacaacgccgagcuccucguccuccucgagaacgagcgcacccucgaccuccacgacuccaacgucaagaaccucuacgagaaggucaagucccagcucaagaacaacgccaaggagaucggcaacggcugcuucgaguucuaccacaagugcaacgacgagugcauggaguccgucaagaacggcaccuacgacuaccccaaguacuccgaggaguccaagcucaaccgcgagaagaucgacggcgucaagcucgaguccaugggcgucuaccagauccucgccaucuacuccaccgucgccuccucccucguccuccucgucucccucggcgccaucuccuucuggaugugcuccaacggcucccuccagugccgcaucugcaucuga

SEQ ID NO: 98172 - RNA, 1698 nt, Artificial Sequence
  derived and/or modified CDS sequence (opt2) from hemagglutinin__InfluenzaA__ABW81527
augaaggucaagcuccucguccuccucugcaccuucaccgccaccuacgccgacaccaucugcaucggcuaccacgccaacaacuccaccgacaccgucgacaccguccucgagaagaacgucaccgucacccacuccgucaaccuccucgaggacucccacaacggcaagcucugccuccucaagggcaucgccccccuccagcucggcaacugcuccgucgccggcuggauccucggcaaccccgagugcgagcuccucaucuccaaggaguccugguccuacaucgucgagacccccaaccccgagaacggcaccugcuaccccggcuacuucgccgacuacgaggagcuccgcgagcagcucuccuccgucuccuccuucgagcgcuucgagaucuuccccaaggaguccuccuggcccaaccacaccgucaccggcgucuccgccuccugcucccacaacggcaaguccuccuucuaccgcaaccuccucuggcucaccggcaagaacggccucuaccccaaccucuccaaguccuacgccaacaacaaggagaaggagguccucguccucuggggcguccaccacccccccaacaucggcgaccagcgcgcccucuaccacaccgagaacgccuacgucuccgucgucuccucccacuacucccgccgcuucacccccgagaucgccaagcgccccaagguccgcaaccaggagggccgcaucaacuacuacuggacccuccucgagcccggcgacaccaucaucuucgaggccaacggcaaccucaucgccccccgcuucgccuucgcccucucccgcggcuucggcuccggcaucaucaccuccaacgcccccauggacgagugcgacgccaagugccagaccccccagggcgccaucaacuccucccuccccuuccagaacguccaccccgucaccaucggcgagugccccaaguacguccgcuccgccaagcuccgcauggccaccggccuccgcaacauccccuccauccagucccgcggccucuucggcgccaucgccggcuucaucgagggcggcuggaccggcauggucgacggcugguacggcuaccaccaccagaacgagcagggcuccggcuacgccgccgaccagaaguccacccagaacgccaucaacggcaucaccaacaaggucaacuccgucaucgagaagaugaacacccaguucaccgccgucggcaaggaguucuccaagcucgagcgccgcauggagaaccucaacaagaaggucgacgacggcuuccucgacaucuggaccuacaacgccgagcuccucguccuccucgagaacgagcgcacccucgacuuccacgacuccaacgucaagaaccucuacgagaaggucaagucccagcucaagaacaacgccaaggagaucggcaacggcugcuucgaguucuaccacaagugcaacgacgagugcauggaguccgucaagaacggcaccuacgacuaccccaaguacuccgaggaguccaagcucaaccgcgagaagaucgacggcgucaagcucgaguccaugggcgucuaccagauccucgccaucuacuccaccgucgccuccucccucguccuccucgucucccucggcgccaucuccuucuggaugugcuccaacggcucccuccagugccgcaucugcaucuga

SEQ ID NO: 98173 - RNA, 1698 nt, Artificial Sequence
  derived and/or modified CDS sequence (opt2) from hemagglutinin__InfluenzaA__ABW81528
augaaggucaagcuccucguccuccucugcaccuucaccgccaccuacgccgacaccaucugcaucggcuaccacgccaacaacuccaccgacaccgucgacaccguccucgagaagaacgucaccgucacccacuccgucaaccuccucgaggacucccacaacggcaagcucugccuccucaagggcaucgccccccuccagcucggcaacugcuccgucgccggcuggauccucggcaaccccgagugcgagcuccucaucuccaaggaguccugguccuacaucgucgagacccccaaccccgagaacggcaccugcuaccccggccacuucgccgacuacgaggagcuccgcgagcagcucuccuccgucuccuccuucgagcgcuucgagaucuuccccaaggaguccuccuggcccaaccacaccgucaccggcgucuccgccuccugcucccacaacggcaaguccuccuucuaccgcaaccuccucuggcucaccggcaagaacggccucuaccccaaccucuccaaguccuacgccaacaacaaggagaaggagguccucguccucuggggcauccaccacccccccaacaucggcgaccagcgcgcccucuaccacaccgagaacgccuacgucuccgucgucuccucccacuacucccgccgcuucacccccgagaucgccaagcgccccaagguccgcgaccaggagggccgcaucaacuacuacuggacccuccucgagccccgcgacaccaucaucuucgaggccaacggcaaccucaucgccccccgcuucgccuucgcccucucccgcggcuucggcuccggcaucaucaccuccaacgcccccauggacgagugcgacgccaagugccagaccccccagggcgccaucaacuccucccuccccuuccagaacguccaccccgucaccaucggcgagugccccaaguacguccgcuccgccaagcuccgcauggucaccggccuccgcaacauccccuccauccagucccgcggccucuucggcgccaucgccggcuucaucgagggcggcuggaccggcauggucgacggcugguacggcuaccaccaccagaacgagcagggcuccggcuacgccgccgaccagaaguccacccagaacgccaucaacggcaucaccaacaaggucaacuccgucaucgagaagaugaacacccaguucaccgccgucggcaaggaguucaacaagcucgagcgccgcauggagaaccucaacaagaaggucgacgacggcuuccucgacaucuggaccuacaacgccgagcuccucguccuccucgagaacgagcgcacccucgacuuccacgacuccaacgucaagaaccucuacgagaaggucaagucccagcucaagaacaacgccaaggagaucggcaacggcugcuucgaguucuaccacaagugcaacgacgagugcauggaguccgucaagaacggcaccuacgacuaccccaaguacuccgaggaguccaagcucaaccgcgagaagaucgacggcgucaagcucgaguccaugggcgucuaccagauccucgccaucuacuccaccgucgccuccucccucguccuccucgucucccucggcgccaucuccuucuggaugugcuccaacggcucccuccagugccgcaucugcaucuga

SEQ ID NO: 98174 - RNA, 1698 nt, Artificial Sequence
  derived and/or modified CDS sequence (opt2) from hemagglutinin__InfluenzaA__ABW81529
augaaggucaagcuccucauccuccucugcaccuucaccgccaccuacgccgacaccaucugcaucggcuaccacgccaacaacuccaccgacaccgucgacaccguccucgagaagaacgucaccgucacccacuccgucaaccuccucgaggacucccacaacggcaagcucugccuccucaagggcaucgccccccuccagcucggcaacugcuccgucgccggcuggauccucggcaaccccgagugcgagcuccucaucucccgcgaguccugguccuacaucgucgagacccccaaccccgagaacggcaccugcuaccccggcuacuucgccgacuacgaggagcuccgcgagcagcucuccuccgucuccuccuucgagcgcuucgagaucuuccccaaggaguccuccuggcccaaccacaccgucaccggcgucuccgccuccugcucccacaacggcaaguccuccuucuaccgcaaccuccucuggcucaccggcaagaacggccucuaccccaaccucuccaaguccuacgccaacaacaaggagaaggagguccucauccucuggggcguccaccacccccccaacauccgcgaccagaugacccucuaccacaccgagaacgccuacgucuccgucgucuccucccacuacucccgccgcuucacccccgagaucaccaagcgccccaagguccgcgaccaggagggccgcaucaacuacuacuggacccuccucgagcccggcgacaccaucaucuucgaggccaacggcaaccucaucgcccccugguacgccuucgcccucucccgcggcuucggcuccggcaucaucaccuccaacgcccccauggacgagugcgacgccaagugccagacccccaagggcgccaucaacuccucccuccccuuccagaacguccaccccgucaccaucggcgagugccccaaguacguccgcuccgccaagcuccgcauggucaccggccuccgcaacauccccuccauccagucccgcggccucuucggcgccaucgccggcuucaucgagggcggcuggaccggcauggucgacggcugguacggcuaccaccaccagaacgagcagggcuccggcuacgccgccgaccagaaguccacccagaacgccaucaacggcaucaccaacaaggucaacuccgucaucgagaagaugaacacccaguucaccgccgucggcaaggaguucaacaagcucgagcgccgcauggagaaccucaacaagaaggucgacgacggcuuccucgacaucuggaccuacaacgccgagcuccucguccuccucgagaacgagcgcacccucgacuuccacgacuccaacgucaagaaccucuacgagaaggucaagucccagcucaagaacaacgccaaggagaucggcaacggcugcuucgaguucuaccacaagugcaacaacgagugcauggaguccgucaagaacggcaccuacgacuaccccaaguacuccgaggaguccaagcucaaccgcgagaagaucgacggcgucaagcucgaguccaugggcgucuaccagauccucgccaucuacuccaccgucgccuccucccucguccuccucgucucccucggcgccaucuccuucuggaugugcuccaacggcucccuccagugccgcaucugcaucuga

SEQ ID NO: 98175 - RNA, 1698 nt, Artificial Sequence
  derived and/or modified CDS sequence (opt2) from hemagglutinin__InfluenzaA__ABW81530
augaaggucaagcuccucauccuccucugcaccuucaccgccaccuacgccgacaccaucugcaucggcuaccacgccaacaacuccaccgacaccgucgacaccguccucgagaagaacgucaccgucacccacuccgucaaccuccucgaggacucccacaacggcaagcucugccuccucaagggcaucgccccccuccagcucggcaacugcuccgucgccggcuggauccucggcaaccccgagugcgagcuccucaucuccaaggaguccugguccuacaucgucgagacccccaaccccgagaacggcgccugcuaccccggcuacuucgccgacuacgaggagcuccgcgagcagcucuccuccgucuccuccuucgagcgcuucgagaucuuccccaaggaguccuccuggcccaaccacaccgucaccggcgucuccgccuccugcucccacaacggcaaguccuccuucuaccgcaaccuccucuggcucaccggcaagaacggccucuaccccaaccucuccaaguccuacgccaacaacaaggagaaggagguccucauccucuggggcguccaccacccccccaacaucggcgaccagcgcacccucuaccacaccgagaacgccuacgucuccgucgucuccucccacuacucccgccgcuucacccccgagaucaccaagcgccccaagguccgcgaccaggagggccgcaucaacuacuacuggacccuccucgagcccggcgacaccaucaucuucgaggccaacggcaaccucaucgcccccugguacgccuucgcccucucccgcggcuucggcuccggcaucaucaccuccaacgcccccauggacgagugcgacgccaagugccagaccccccagggcgccaucaacuccucccuccccuuccagaacguccaccccgucaccaucggcgagugccccaaguacguccgcuccgccaagcuccgcauggucaccggccuccgcaacauccccuccauccagucccgcggccucuucggcgccaucgccggcuucaucgagggcggcuggaccggcauggucgacggcugguacggcuaccaccaccagaacgagcagggcuccggcuacgccgccgaccagaaguccacccagaacgccaucaaccgcaucaccaacaaggucaacuccgucaucgagaagaugaacacccaguucaccgccgucggcaaggaguucaacaagcucgagcgccgcauggagaaccucaacaagaaggucgacgacggcuuccucgacaucuggaccuacaacgccgagcuccucguccuccucgagaacgagcgcacccucgacuuccacgacuccaacgucaagaaccucuacgagaaggucaagucccagcucaagaacaacgccaaggagaucggcaacggcugcuucgaguucuaccacaagugcaacaacgagugcauggaguccgucaagaacggcaccuacgacuaccccaaguacuccgaggaguccaagcucaaccgcgagaagaucgacggcgucaagcucgacuccaugggcgucuaccagauccucgccaucuacuccaccgucgccuccucccucguccuccucgucucccucggcgccaucuccuucuggaugugcuccaacggcucccuccagugccgcaucugcaucuga

SEQ ID NO: 98176 - RNA, 1698 nt, Artificial Sequence; identical to SEQ ID NO: 96362
  derived and/or modified CDS sequence (opt2) from hemagglutinin__InfluenzaA__ABW81531

SEQ ID NO: 98177 - RNA, 1698 nt, Artificial Sequence
  derived and/or modified CDS sequence (opt2) from hemagglutinin__InfluenzaA__ABW81532
augaaggucaagcuccucauccuccucugcaccuucaccgccaccuacgccgacaccaucugcaucggcuaccacgccaacaacuccaccgacaccgucgacaccguccucgagaagaacgucaccgucacccacuccgucaaccuccucgaggacucccacaacggcaagcucugccuccucaagggcaucgccccccuccagcucggcaacugcuccgucgccggcuggauccucggcaaccccgagugcgagcuccucaucuccaaggaguccugguccuacaucgucgagacccccaaccccgagaacggcgccugcuaccccugguacuucgccgacuacgaggagcuccgcgagcagcucuccuccgucuccuccuucgagcgcuucgagaucuuccccaaggaguccuccuggcccaaccacaccgucaccggcgucuccgccuccugcucccacaacggcaaguccuccuucuaccgcaaccuccucuggcucaccggcaagaacggccucuaccccaaccucuccaaguccuacgccaacaacaaggagaaggagguccucauccucuggggcguccaccacccccccaacaucggcaaccagcgcacccucuaccacaccgagaacgccuacgucuccgucgucuccucccacuacucccgccgcuucacccccgagaucaccaagcgccccaagguccgcgaccaggagggccgcaucaacuacuacuggacccuccucgagcccggcgacaccaucaucuucgaggccaacggcaaccucaucgcccccugguacgccuucgcccucucccgcggcuucggcuccggcaucaucaccuccaacgcccccauggacgagugcgacgccaagugccagaccccccagggcgccaucaacuccucccuccccuuccagaacguccaccccgucaccaucggcgagugccccaaguacguccgcuccgccaagcuccgcauggucaccggccuccgcaacauccccuccauccagucccgcggccucuucggcgccaucgccggcuucaucgagggcggcuggaccggcauggucgacggcugguacggcuaccaccaccagaacgagcagggcuccggcuacgccgccgaccagaaguccacccagaacgccaucaacggcaucaccaacaaggucaacuccgucaucgagaagaugaacacccaguucaccgccgucggcaaggaguucaacaagcucgagcgccgcauggagaaccucaacaagaaggucgacgacggcuuccucgacaucuggaccuacaacgccgagcuccucguccuccucgagaacgagcgcacccucgacuuccacgacuccaacgucaagaaccucuacgagaaggucaagucccagcucaagaacaacgccaaggagaucggcaacggcugcuucgaguucuaccacaagugcaacaacgagugcauggaguccgucaagaacggcaccuacgacuaccccaaguacuccgaggaguccaagcucaaccgcgagaagaucgacggcgucaagcucgacuccaugggcgucuaccagauccucgccaucuacuccaccgucgccuccucccucguccuccucgucucccucggcgccaucuccuucuggaugugcuccaacggcucccuccagugccgcaucugcaucuga

SEQ ID NO: 98178 - RNA, 1698 nt, Artificial Sequence; identical to SEQ ID NO: 97992
  derived and/or modified CDS sequence (opt2) from hemagglutinin__InfluenzaA__ABW86321

SEQ ID NO: 98179 - RNA, 1698 nt, Artificial Sequence; identical to SEQ ID NO: 97957
  derived and/or modified CDS sequence (opt2) from hemagglutinin__InfluenzaA__ABW86332

SEQ ID NO: 98180 - RNA, 1698 nt, Artificial Sequence; identical to SEQ ID NO: 97946
  derived and/or modified CDS sequence (opt2) from hemagglutinin__InfluenzaA__ABW86343

SEQ ID NO: 98181 - RNA, 1698 nt, Artificial Sequence; identical to SEQ ID NO: 97950
  derived and/or modified CDS sequence (opt2) from hemagglutinin__InfluenzaA__ABW86354

SEQ ID NO: 98182 - RNA, 1698 nt, Artificial Sequence; identical to SEQ ID NO: 97950
  derived and/or modified CDS sequence (opt2) from hemagglutinin__InfluenzaA__ABW86365

SEQ ID NO: 98183 - RNA, 1698 nt, Artificial Sequence; identical to SEQ ID NO: 97966
  derived and/or modified CDS sequence (opt2) from hemagglutinin__InfluenzaA__ABW86376

SEQ ID NO: 98184 - RNA, 1698 nt, Artificial Sequence; identical to SEQ ID NO: 97950
  derived and/or modified CDS sequence (opt2) from hemagglutinin__InfluenzaA__ABW86387

SEQ ID NO: 98185 - RNA, 1698 nt, Artificial Sequence; identical to SEQ ID NO: 97946
  derived and/or modified CDS sequence (opt2) from hemagglutinin__InfluenzaA__ABW86409

SEQ ID NO: 98186 - RNA, 1698 nt, Artificial Sequence; identical to SEQ ID NO: 97946
  derived and/or modified CDS sequence (opt2) from hemagglutinin__InfluenzaA__ABW86431

SEQ ID NO: 98187 - RNA, 1698 nt, Artificial Sequence; identical to SEQ ID NO: 97950
  derived and/or modified CDS sequence (opt2) from hemagglutinin__InfluenzaA__ABW86442

SEQ ID NO: 98188 - RNA, 1698 nt, Artificial Sequence; identical to SEQ ID NO: 97966
  derived and/or modified CDS sequence (opt2) from hemagglutinin__InfluenzaA__ABW86453

SEQ ID NO: 98189 - RNA, 1698 nt, Artificial Sequence; identical to SEQ ID NO: 97950
  derived and/or modified CDS sequence (opt2) from hemagglutinin__InfluenzaA__ABW86464

SEQ ID NO: 98190 - RNA, 1698 nt, Artificial Sequence; identical to SEQ ID NO: 97966
  derived and/or modified CDS sequence (opt2) from hemagglutinin__InfluenzaA__ABW86475

SEQ ID NO: 98191 - RNA, 1698 nt, Artificial Sequence; identical to SEQ ID NO: 97946
  derived and/or modified CDS sequence (opt2) from hemagglutinin__InfluenzaA__ABW86486

SEQ ID NO: 98192 - RNA, 1698 nt, Artificial Sequence; identical to SEQ ID NO: 97992
  derived and/or modified CDS sequence (opt2) from hemagglutinin__InfluenzaA__ABW86497

SEQ ID NO: 98193 - RNA, 1698 nt, Artificial Sequence; identical to SEQ ID NO: 97950
  derived and/or modified CDS sequence (opt2) from hemagglutinin__InfluenzaA__ABW86508

SEQ ID NO: 98194 - RNA, 1698 nt, Artificial Sequence
  derived and/or modified CDS sequence (opt2) from hemagglutinin__InfluenzaA__ABW86519
augaaggucaagcuccucguccuccucugcaccuucaccgccaccuacgccgacaccaucugcaucggcuaccacgccaacaacuccaccgacaccgucgacaccguccucgagaagaacgucaccgucacccacuccgucaaccuccucgaggacucccacaacggcaagcucugccuccucaagggcaucgccccccuccagcucggcaacugcuccgucgccggcuggauccucggcaaccccgagugcgagcuccucaucuccaaggaguccugguccuacaucgucgagacccccaaccccgagaacggcaccugcuaccccggcuacuucgccgacuacgaggagcuccgcgagcagcucuccuccgucuccuccuucgagcgcuucgagaucuuccccaaggaguccuccuggcccaaccacaccgucaccggcgucuccgccuccugcucccacaacggcaaguccuccuucuaccgcaaccuccucuggcucaccggcaagaacggccucuaccccaaccucuccaaguccuacgccaacaacaaggagaaggagguccucguccucuggggcguccaccacccccccaacaucggcgaccagcgcgcccucuaccacaccgagaacgccuacgucuccgucgucuccucccacuacucccgccgcuucacccccgagaucgccaagcgccccaagguccgcaaccaggagggccgcaucaacuacuacuggacccuccucgagcccggcgacaccaucaucuucgaggccaacggcaaccucaucgccccccgcuucgccuucgcccucucccgcggcuucggcuccggcaucaucaccuccaacgcccccaugggcgagugcgacgccaagugccagaccccccagggcgccaucaacuccucccuccccuuccagaacguccaccccgucaccaucggcgagugccccaaguacguccgcuccgccaagcuccgcauggucaccggccuccgcaacauccccuccauccagucccgcggccucuucggcgccaucgccggcuucaucgagggcggcuggaccggcauggucgacggcugguacggcuaccaccaccagaacgagcagggcuccggcuacgccgccgaccagaaguccacccagaacgccaucaacggcaucaccaacaaggucaacuccgucaucgagaagaugaacacccaguucaccgccgucggcaaggaguucaacaagcucgagcgccgcauggagaaccucaacaagaaggucgacgacggcuuccucgacaucuggaccuacaacgccgagcuccucguccuccucgagaacgagcgcacccucgacuuccacgacuccaacgucaagaaccucuacgagaaggucaagucccagcucaagaacaacgccaaggagaucggcaacggcugcuucgaguucuaccacaagugcaacgacgagugcauggaguccgucaagaacggcaccuacgacuaccccaaguacuccgaggaguccaagcucaaccgcgagaagaucgacggcgucaagcucgaguccaugggcgucuaccagauccucgccaucuacuccaccgucgccuccucccucguccuccucgucucccucggcgccaucuccuucuggaugugcuccaacggcucccuccagugccgcaucugcaucuga

SEQ ID NO: 98195 - RNA, 1698 nt, Artificial Sequence; identical to SEQ ID NO: 97946
  derived and/or modified CDS sequence (opt2) from hemagglutinin__InfluenzaA__ABW86530

SEQ ID NO: 98196 - RNA, 1698 nt, Artificial Sequence
  derived and/or modified CDS sequence (opt2) from hemagglutinin__InfluenzaA__ABW86541
augaaggucaagcuccucguccuccucugcaccuucaccgccaccuacgccgacaccaucugcaucggcuaccacgccaacaacuccaccgacaccgucgacaccguccucgagaagaacgucaccgucacccacuccgucaaccuccucgaggacucccacaacggcaagcucugccuccucaagggcaucgccccccuccagcucggcaacugcuccgucgccggcuggauccucggcaaccccgagugcgagcuccucaucuccaaggaguccugguccuacaucgucgagacccccaaccccgagaacggcaccugcuaccccggcuacuucgccgacuacgaggagcuccgcgagcagcucuccuccgucuccuccuucgagcgcuucgagaucuuccccaaggaguccuccuggcucaaccacaccgucaccggcgucuccgccuccugcucccacaacggcaaguccuccuucuaccgcaaccuccucuggcucaccggcaagaacggccucuaccccaaccucuccaaguccuacgccaacaacaaggagaaggagguccucguccucuggggcguccaccacccccccaacaucggcgaccagcgcgcccucuaccacaccgagaacgccuacgucuccgucgucuccucccacuacucccgccgcuucacccccgagaucgccaagcgccccaagguccgcgaccaggagggccgcaucaacuacuacuggacccuccucgagcccggcgacaccaucaucuucgaggccaacggcaaccucaucgccccccgcuucgccuucgcccucucccgcggcuucggcuccggcaucaucaccuccaacgcccccaugggcgagugcgacgccaagugccagaccccccagggcgccaucaacuccucccuccccuuccagaacguccaccccgucaccaucggcgagugccccaaguacguccgcuccgccaagcuccgcauggucaccggccuccgcaacauccccuccauccagucccgcggccucuucggcgccaucgccggcuucaucgagggcggcuggaccggcauggucgacggcugguacggcuaccaccaccagaacgagcagggcuccggcuacgccgccgaccagaaguccacccagaacgccaucaacggcaucaccaacaaggucaacuccgucaucgagaagaugaacacccaguucaccgccgucggcaaggaguucaacaagcucgagcgccgcauggagaaccucaacaagaaggucgacgacggcuuccucgacaucuggaccuacaacgccgagcuccucguccuccucgagaacgagcgcacccucgacuuccacgacuccaacgucaagaaccucuacgagaaggucaagucccagcucaagaacaacgccaaggagaucggcaacggcugcuucgaguucuaccacaagugcaacgacgagugcauggaguccgucaagaacggcaccuacgacuaccccaaguacuccgaggaguccaagcucaaccgcgagaagaucgacggcgucaagcucgaguccaugggcgucuaccagauccucgccaucuacuccaccgucgccuccucccucguccuccucgucucccucggcgccaucuccuucuggaugugcuccaacggcucccuccagugccgcaucugcaucuga

SEQ ID NO: 98197 - RNA, 1698 nt, Artificial Sequence; identical to SEQ ID NO: 97946
  derived and/or modified CDS sequence (opt2) from hemagglutinin__InfluenzaA__ABW86552

SEQ ID NO: 98198 - RNA, 1701 nt, Artificial Sequence
  derived and/or modified CDS sequence (opt2) from hemagglutinin__InfluenzaA__ABW86563
augaagaccaucaucgcccucuccuacauccucugccucgucuucgcccagaagcuccccggcaacgacaacuccaccgccacccucugccucggccaccacgccguccccaacggcaccaucgucaagaccaucaccaacgaccagaucgaggucaccaacgccaccgagcucguccaguccuccuccaccggcgagaucugcgacuccccccaccagauccucgacggcgagaacugcacccucaucgacgcccuccucggcgacccccagugcgacggcuuccagaacaagaagugggaccucuucgucgagcgcuccaaggccuacuccaacugcuaccccuacgacguccccgacuacgccucccuccgcucccucgucgccuccuccggcacccucgaguucaacaacgaguccuucaacuggaccggcgucacccagaacggcaccuccuccgccugcauccgccgcuccaacaacuccuucuucucccgccucaacuggcucacccaccucaaguucaaguaccccgcccucaacgucaccaugcccaacaacgagaaguucgacaagcucuacaucuggggcguccaccaccccggcaccgacaacgaccagaucuuccucuacgcccaggccuccggccgcaucaccgucuccaccaagcgcucccagcagaccgucauccccaacaucggcucccgcccccgcguccgcaacauccccucccgcaucuccaucuacuggaccaucgucaagcccggcgacauccuccucaucaacuccaccggcaaccucaucgccccccgcggcuacuucaagauccgcuccggcaaguccuccaucaugcgcuccgacgcccccaucggcaagugcaacuccgagugcaucacccccaacggcuccauccccaacgacaagcccuuccagaacgucaaccgcaucaccuacggcgccugcccccgcuacgucaagcagaacacccucaagcucgccaccggcaugcgcaacguccccgagaagcagacccgcggcaucuucggcgccaucgccggcuucaucgagaacggcugggagggcauggucgacggcugguacggcuuccgccaccagaacuccgagggcaucggccaggccgccgaccucaaguccacccaggccgccaucgaccagaucaacggcaagcucaaccgccucaucggcaagaccaacgagaaguuccaccagaucgagaaggaguucuccgaggucgagggccgcauccaggaccucgagaaguacgucgaggacaccaagaucgaccucugguccuacaacgccgagcuccucgucgcccucgagaaccagcacaccaucgaccucaccgacuccgagaugaacaagcucuucgagaagaccaagaagcagcuccgcgagaacgccgaggacaugggcaacggcugcuucaagaucuaccacaagugcgacaacgccugcaucggcuccauccgcaacggcaccuacgaccacgacgucuaccgcgacgaggcccucaacaaccgcuuccagaucaagggcgucgagcucaaguccggccacaaggacuggauccucuggaucuccuucgccaucuccugcuuccuccucugcgucgcccuccucggcuucaucaugugggccugccagaagggcaacauccgcugcaacaucugcaucuga

SEQ ID NO: 98199 - RNA, 1698 nt, Artificial Sequence; identical to SEQ ID NO: 97983
  derived and/or modified CDS sequence (opt2) from hemagglutinin__InfluenzaA__ABW86606

SEQ ID NO: 98200 - RNA, 1701 nt, Artificial Sequence; identical to SEQ ID NO: 96957
  derived and/or modified CDS sequence (opt2) from hemagglutinin__InfluenzaA__ABW91185

SEQ ID NO: 98201 - RNA, 1701 nt, Artificial Sequence
  derived and/or modified CDS sequence (opt2) from hemagglutinin__InfluenzaA__ABW91196
augaagaccaucaucgcccucuccuacauccucugccucgucuucgcccagaagcuccccggcaacgacaacuccaccgccacccucugccucggccaccacgccguccccaacggcaccaucgucaagaccaucaccaacgaccagaucgaggucaccaacgccaccgagcucguccaguccuccuccaccggcgagaucugcaacuccccccaccagauccucgacggcgagaacugcacccucaucgacgcccuccucggcgacccccagugcgacggcuuccagaacaagaagugggaccucuucgucgagcgcuccaaggccuacuccaacugcuaccccuacgacguccccgacuacgccucccuccgcucccucgucgccuccuccggcacccucgaguucaacaacgaguccuucaacuggaccggcgucacccagaacggcaccuccuccgccugcauccgccgcuccaacaacuccuucuucucccgccucaacuggcucacccaccucaaguucaaguaccccgcccucaacgucaccaugcccaacaacgagaaguucgacaagcucuacaucuggggcguccaccaccccggcaccgacaacgaccagaucuuccucuacgcccaggccuccggccgcaucaccgucuccaccaagcgcucccagcagaccgucauccccaacaucggcucccgcccccgcguccgcaacauccccucccgcaucuccaucuacuggaccaucgucaagcccggcgacauccuccucaucaacuccaccggcaaccucaucgccccccgcggcuacuucaagauccgcuccggcaaguccuccaucaugcgcuccgacgcccccaucggcaagugcaacuccgagugcaucacccccaacggcuccauccccaacgacaagcccuuccagaacgucaaccgcaucaccuacggcgccugcccccgcuacgucaagcagaacacccucaagcucgccaccggcaugcgcaacguccccgagaagcagacccgcggcaucuucggcgccaucgccggcuucaucgagaacggcugggagggcauggucgacggcugguacggcuuccgccaccagaacuccgagggcaucggccaggccgccgaccucaaguccacccaggccgccaucgaccagaucaacggcaagcucaaccgccucaucggcaagaccaacgagaaguuccaccagaucgagaaggaguucuccgaggucgagggccgcauccaggaccucgagaaguacgucgaggacaccaagaucgaccucugguccuacaacgccgagcuccucgucgcccucgagaaccagcacaccaucgaccucaccgacuccgagaugaacaagcucuucgagaagaccaagaagcagcuccgcgagaacgccgaggacaugggcaacggcugcuucaagaucuaccacaagugcgacaacgccugcaucggcuccauccgcaacggcaccuacgaccacgacgucuaccgcgacgaggcccucaacaaccgcuuccagaucaagggcgucgagcucaaguccggcuacaaggacuggauccucuggaucuccuucgccaucuccugcuuccuccucugcgucgcccuccucggcuucaucaugugggccugccagaagggcaacauccgcugcaacaucugcaucuga

SEQ ID NO: 98202 - RNA, 1701 nt, Artificial Sequence; identical to SEQ ID NO: 98201
  derived and/or modified CDS sequence (opt2) from hemagglutinin__InfluenzaA__ABW91207

SEQ ID NO: 98203 - RNA, 1698 nt, Artificial Sequence; identical to SEQ ID NO: 97946
  derived and/or modified CDS sequence (opt2) from hemagglutinin__InfluenzaA__ABW91218

SEQ ID NO: 98204 - RNA, 1701 nt, Artificial Sequence; identical to SEQ ID NO: 97964
  derived and/or modified CDS sequence (opt2) from hemagglutinin__InfluenzaA__ABW91240

SEQ ID NO: 98205 - RNA, 1701 nt, Artificial Sequence
  derived and/or modified CDS sequence (opt2) from hemagglutinin__InfluenzaA__ABW91251
augaagaccaucaucgcccucuccuacauccucugccucgucuucgcccagaagcuccccggcaacgacaacuccaccgccacccucugccucggccaccacgccguccccaacggcaccaucgucaagaccaucaccaacgaccagaucgaggucaccaacgccaccgagcucguccaguccuccuccaccggcgagaucugcgacuccccccaccagauccucgacggcgagaacugcacccucaucgacgcccuccucggcgacccccagugcgacggcuuccagaacaagaagugggaccucuucgucgagcgcuccaaggccuacuccaacugcuaccccuacgacguccccgacuacgccucccuccgcucccucgucgccuccuccggcacccucgaguucaacaacgaguccuucaacuggaccggcgucacccagaacggcaccuccuccgccugcauccgccgcuccaacaacuccuucuucucccgccucaacuggcucacccaccucaaguucaaguaccccgcccucaacgucaccaugcccaacaacgagaaguucgacaagcucuacaucuggggcguccaccaccccggcaccgacaacgaccagaucuuccucuacgcccaggccuccggccgcaucaccgucuccaccaagcgcucccagcagaccgucauccccaacaucggcucccgcccccgcguccgcaacauccccucccgcaucuccaucuacuggaccaucgucaaguccggcgacauccuccucaucaacuccaccggcaaccucaucgccccccgcggcuacuucaagauccgcuccggcaaguccuccaucaugcgcuccgacgcccccaucggcaagugcaacuccgagugcaucacccccaacggcuccauccccaacgacaagcccuuccagaacgucaaccgcaucaccuacggcgccugcccccgcuacgucaagcagaacacccucaagcucgccaccggcaugcgcaacguccccgagaagcagacccgcggcaucuucggcgccaucgccggcuucaucgagaacggcugggagggcauggucgacggcugguacggcuuccgccaccagaacuccgagggcaucggccaggccgccgaccucaaguccacccaggccgccaucgaccagaucaacggcaagcucaaccgccucaucggcaagaccaacgagaaguuccaccagaucgagaaggaguucuccgaggucgagggccgcauccaggaccucgagaaguacgucgaggacaccaagaucgaccucugguccuacaacgccgagcuccucgucgcccucgagaaccagcacaccaucgaccucaccgacuccgagaugaacaagcucuucgagaagaccaagaagcagcuccgcgagaacgccgaggacaugggcaacggcugcuucaagaucuaccacaagugcgacaacgccugcaucggcuccauccgcaacggcaccuacgaccacgacgucuaccgcgacgaggcccucaacaaccgcuuccagaucaagggcgucgagcucaaguccggcuacaaggacuggauccucuggaucuccuucgccaucuccugcuuccuccucugcgucgcccuccucggcuucaucaugugggccugccagaagggcaacauccgcugcaacaucugcaucuga

SEQ ID NO: 98206 - RNA, 1701 nt, Artificial Sequence; identical to SEQ ID NO: 97964
  derived and/or modified CDS sequence (opt2) from hemagglutinin__InfluenzaA__ABW91262

SEQ ID NO: 98207 - RNA, 1698 nt, Artificial Sequence; identical to SEQ ID NO: 97981
  derived and/or modified CDS sequence (opt2) from hemagglutinin__InfluenzaA__ABW91273

SEQ ID NO: 98208 - RNA, 1698 nt, Artificial Sequence
  derived and/or modified CDS sequence (opt2) from hemagglutinin__InfluenzaA__ABW91284
augaaggucaagcuccucguccuccucugcaccuucaccgccaccuacgccgacaccaucugcaucggcuaccacgccaacaacuccaccgacaccgucgacaccguccucgagaagaacgucaccgucacccacuccgucaaccuccucgaggacucccacaacggcaagcucugccuccucaagggcaucgccccccuccagcucggcaacugcuccgucgccggcuggauccucggcaaccccgagugcgagcuccucaucucccgcgaguccugguccuacaucgucgagaagcccaaccccgagaacggcaccugcuaccccggccacuucgccgacuacgaggagcuccgcgagcagcucuccuccgucuccuccuucgagcgcuucgagaucuuccccaaggaguccuccuggcccaaccacaccaccaccggcgucuccgccuccugcucccacaacggcgaguccuccuucuacaagaaccuccucuggcucaccggcaagaacggccucuaccccaaccucuccaaguccuacgccaacaacaaggagaaggagguccucguccucuggggcguccaccacccccccaacaucggcgaccagcgcgcccucuaccacaccgagaacgccuacgucuccgucgucuccucccacuacucccgcaaguucacccccgagaucgccaagcgccccaagguccgcgaccaggagggccgcaucaacuacuacuggacccuccucgagcccggcgacaccaucaucuucgaggccaacggcaaccucaucgccccccgcuacgccuucgcccucucccgcggcuucggcuccggcaucaucaacuccaacgccuccaugggcgagugcgacgccaagugccagaccccccagggcgccaucaacuccucccuccccuuccagaacguccaccccgucaccaucggcgagugccccaaguacguccgcuccgccaagcuccgcauggucaccggccuccgcaacauccccuccauccagucccgcggccucuucggcgccaucgccggcuucaucgagggcggcuggaccggcauggucgacggcugguacggcuaccaccaccagaacgagcagggcuccggcuacgccgccgaccagaaguccacccagaacgccaucaacggcaucaccaacaaggucaacuccgucaucgagaagaugaacacccaguucaccgccgucggcaaggaguucaacaagcucgagcgccgcauggagaaccucaacaagaaggucgacgacggcuucaucgacaucuggaccuacaacgccgagcuccucguccuccucgagaacgagcgcacccucgacuuccacgacuccaacgucaagaaccucuacgagaaggucaagucccagcucaagaacaacgccaaggagaucggcaacggcugcuucgaguucuaccacaagugcaacgacgagugcauggaguccgucaagaacggcaccuacgacuaccccaaguacuccgaggaguccaagcucaaccgcgagaagaucgacggcgucaagcucgaguccaugggcgucuaccagauccucgccaucuacuccaccgucgccuccucccucguccuccucgucucccucggcgccaucuccuucuggaugugcuccaacggcucccuccagugccgcaucugcaucuga

SEQ ID NO: 98209 - RNA, 1698 nt, Artificial Sequence; identical to SEQ ID NO: 97981
  derived and/or modified CDS sequence (opt2) from hemagglutinin__InfluenzaA__ABW91295

SEQ ID NO: 98210 - RNA, 1698 nt, Artificial Sequence; identical to SEQ ID NO: 97950
  derived and/or modified CDS sequence (opt2) from hemagglutinin__InfluenzaA__ABW91306

SEQ ID NO: 98211 - RNA, 1698 nt, Artificial Sequence; identical to SEQ ID NO: 97950
  derived and/or modified CDS sequence (opt2) from hemagglutinin__InfluenzaA__ABW91317

SEQ ID NO: 98212 - RNA, 1698 nt, Artificial Sequence
  derived and/or modified CDS sequence (opt2) from hemagglutinin__InfluenzaA__ABW91328
augaaggucaagcuccucauccuccucugcaccuucaccgccaccuacgccgacaccaucugcaucggcuaccacgccaacaacuccaccgacaccgucgacaccguccucgagaagaacgucaccgucacccacuccgucaaccuccucgaggacucccacaacggcaagcucugccuccucaagggcaucgccccccuccagcucggcaacugcuccgucgccggcuggauccucggcaaccccgagugcgagcuccucaucuccaaggaguccugguccuacaucgucgagacccccaaccccgagaacggcaccugcuaccccggcuacuucgccgacuacgaggagcuccgcgagcagcucuccuccgucuccuccuucgagcgcuucgagaucuuccccaaggaguccuccuggcccaaccacaccgucaccggcgucuccgccuccugcucccacaacggcaaguccuccuucuaccgcaaccuccucuggcucaccggcaagaacggccucuaccccaaccucuccaaguccuacgccaacaacaaggagaaggagguccucguccucuggggcguccaccacccccccaacaucggcgaccagcgcgcccucuaccacaccgagaacgccuacgucuccgucgucuccucccacuacucccgccgcuucacccccgagaucgccaagcgccccaagguccgcgaccaggagggccgcaucaacuacuacuggacccuccucgagcccggcgacaccaucaucuucgaggccaacggcaaccucaucgccccccgcuucgccuucgcccucucccgcggcuucggcuccggcaucaucaccuccaacgcccccauggacgagugcgacgccaagugccagaccccccagggcgccaucaacuccucccuccccuuccagaacguccaccccgucaccaucggcgagugccccaaguacguccgcuccaccaagcuccgcauggucaccggccuccgcaacauccccuccauccagucccgcggccucuucggcgccaucgccggcuucaucgagggcggcuggaccggcauggucgacggcugguacggcuaccaccaccagaacgagcagggcuccggcuacgccgccgaccagaaguccacccagaacgccaucaacggcaucaccaacaaggucaacuccgucaucgagaagaugaacacccaguucaccgccgucggcaaggaguucaacaagcucgagcgccgcauggagaaccucaacaagaaggucgacgacggcuuccucgacaucuggaccuacaacgccgagcuccucguccuccucgagaacgagcgcacccucgacuuccacgacuccaacgucaagaaccucuacgagaagguccgcucccagcucaagaacaacgccaaggagaucggcaacggcugcuucgaguucuaccacaagugcaacgacgagugcauggaguccgucaagaacggcaccuacgacuaccccaaguacuccgaggaguccaagcucaaccgcgagaagaucgacggcgucaagcucgaguccaugggcgucuaccagauccucgccaucuacuccaccgucgccuccucccucguccuccucgucucccucggcgccaucuccuucuggaugugcuccaacggcucccuccagugccgcaucugcaucuga

SEQ ID NO: 98213 - RNA, 1698 nt, Artificial Sequence; identical to SEQ ID NO: 97950
  derived and/or modified CDS sequence (opt2) from hemagglutinin__InfluenzaA__ABW91339

SEQ ID NO: 98214 - RNA, 1698 nt, Artificial Sequence; identical to SEQ ID NO: 97950
  derived and/or modified CDS sequence (opt2) from hemagglutinin__InfluenzaA__ABW91350

SEQ ID NO: 98215 - RNA, 1698 nt, Artificial Sequence
  derived and/or modified CDS sequence (opt2) from hemagglutinin__InfluenzaA__ABW91361
augaaggucaagcuccucguccuccucugcaccuucaccgccaccuacgccgacaccaucugcaucggcuaccacgccaacaacuccaccgacaccgucgacaccguccucgagaagaacgucaccgucacccacuccgucaaccuccucgaggacucccacaacggcaagcucugccuccucaagggcaucgccccccuccagcucggcaacugcuccgucgccggcuggauccucggcaaccccgagugcgagcuccucaucuccaaggaguccugguccuacaucgucgagacccccaaccccgagaacggcaccugcuaccccggcuacuucgccgacuacgaggagcuccgcgagcagcucuccuccgucuccuccuucgagcgcuucgagaucuuccccaaggaguccuccuggcccaaccacaccgucaccggcgucuccgccuccugcucccacaacggcgaguccuccuucuaccgcaaccuccucuggcucaccggcaagaacggccucuaccccaaccucuccaaguccuacgccaacaacaaggagaaggagguccucguccucuggggcguccaccacccccccaacaucggcgaccagcgcgcccucuaccacaccgagaacgccuacgucuccgucgucuccucccacuacucccgccgcuucacccccgagaucgccaagcgccccaagguccgcgaccaggagggccgcaucaacuacuacuggacccuccucgagcccggcgacaccaucaucuucgaggccaacggcaaccucaucgccccccgcuucgccuucgcccucucccgcggcuucggcuccggcaucaucaccuccaacgcccccauggacaagugcgacgccaagugccagaccccccagggcgccaucaacuccucccuccccuuccagaacguccaccccgucaccaucggcgagugccccaaguacguccgcuccaccaagcuccgcauggucaccggccuccgcaacauccccuccauccagacccgcggccucuucggcgccaucgccggcuucaucgagggcggcuggaccggcauggucgacggcugguacggcuaccaccaccagaacgagcagggcuccggcuacgccgccgaccagaaguccacccagaacgccaucaacggcaucaccaacaaggucaacuccgucaucgagaagaugaacacccaguucaccgccgucggcaaggaguucaacaagcucgagcgccgcauggagaaccucaacaagaaggucgacgacggcuuccucgacaucuggaccuacaacgccgagcuccucguccuccucgagaacgagcgcacccucgacuuccacgacuccaacgucaagaaccucuacgagaaggucaagucccagcucaagaacaacgccaaggagaucggcaacggcugcuucgaguucuaccacaagugcaacgacgagugcauggaguccgucaagaacggcaccuacgacuaccccaaguacuccgaggaguccaagcucaaccgcgagaagaucgacggcgucaagcucgaguccaugggcgucuaccagauccucgccaucuacuccaccgucgccuccucccucguccuccucgucucccucggcgccaucuccuucuggaugugcuccaacggcucccuccagugccgcaucugcaucuga

SEQ ID NO: 98216 - RNA, 1698 nt, Artificial Sequence; identical to SEQ ID NO: 97950
  derived and/or modified CDS sequence (opt2) from hemagglutinin__InfluenzaA__ABW91372

SEQ ID NO: 98217 - RNA, 1698 nt, Artificial Sequence; identical to SEQ ID NO: 97983
  derived and/or modified CDS sequence (opt2) from hemagglutinin__InfluenzaA__ABW91383

SEQ ID NO: 98218 - RNA, 1701 nt, Artificial Sequence; identical to SEQ ID NO: 98023
  derived and/or modified CDS sequence (opt2) from hemagglutinin__InfluenzaA__ABW91394

SEQ ID NO: 98219 - RNA, 1698 nt, Artificial Sequence; identical to SEQ ID NO: 97992
  derived and/or modified CDS sequence (opt2) from hemagglutinin__InfluenzaA__ABW91405

SEQ ID NO: 98220 - RNA, 1698 nt, Artificial Sequence
  derived and/or modified CDS sequence (opt2) from hemagglutinin__InfluenzaA__ABW91416
augaaggucaagcuccucguccuccucugcaccuucaccgccaccuacgccgacaccaucugcaucggcuaccacgccaacaacuccaccgacaccgucgacaccguccucgagaagaacgucaccgucacccacuccgucaaccuccucgaggacucccacaacggcaagcucugccuccucaagggcaucgccccccuccagcucggcaacugcuccgucgccggcuggauccucggcaaccccgagugcgagcuccucaucuccaaggaguccugguccuacaucgucgagacccccaaccccgagaacggcaccugcuaccccggcuacuucgccgacuacgaggagcuccgcgagcagcucuccuccgucuccuccuucgagcgcuucgagaucuuccccaaggaguccuccuggcccaaccacaccgucaccggcgucuccgccuccugcucccacaacggcaaguccuccuucuaccgcaaccuccucuggcucaccggcaagaacggccucuaccccaaccucuccaaguccuacgccaacaacaaggagaaggagguccucguccucuggggcguccaccacccccccaacaucggcgaccagaaggcccucuaccacaccgagaacgccuacgucuccgucgucuccucccacuacucccgccgcuucacccccgagaucgccaagcgccccaagguccgcgaccaggagggccgcaucaacuacuacuggacccuccucgagcccggcgacaccaucaucuucgaggccaacggcaaccucaucgccccccgcuucgccuucgcccucucccgcggcuucggcuccggcaucaucaccuccaacgcccccaugggcgagugcgacgccaagugccagaccccccagggcgccaucaacuccucccuccccuuccagaacguccaccccgucaccaucggcgagugccccaaguacguccgcuccgccaagcuccgcauggucaccggccuccgcaacauccccuccauccagucccgcggccucuucggcgccaucgccggcuucaucgagggcggcuggaccggcauggucgacggcugguacggcuaccaccaccagaacgagcagggcuccggcuacgccgccgaccagaaguccacccagaacgccaucaacggcaucaccaacaaggucaacuccgucaucgagaagaugaacacccaguucaccgccgucggcaaggaguucaacaagcucgagcgccgcauggagaaccucaacaagaaggucgacgacggcuuccucgacaucuggaccuacaacgccgagcuccucguccuccucgagaacgagcgcacccucgacuuccacgacuccaacgucaagaaccucuacgagaaggucaagucccagcucaagaacaacgccaaggagaucggcaacggcugcuucgaguucuaccacaagugcaacgacgagugcauggaguccgucaagaacggcaccuacgacuaccccaaguacuccgaggaguccaagcucaaccgcgagaagaucgacggcgucaagcucgaguccaugggcgucuaccagauccucgccaucuacuccaccgucgccuccucccucguccuccucgucucccucggcgccaucuccuucuggaugugcuccaacggcucccuccagugccgcaucugcaucuga

SEQ ID NO: 98221 - RNA, 1698 nt, Artificial Sequence; identical to SEQ ID NO: 98095
  derived and/or modified CDS sequence (opt2) from hemagglutinin__InfluenzaA__ABW91427

SEQ ID NO: 98222 - RNA, 1701 nt, Artificial Sequence; identical to SEQ ID NO: 97964
  derived and/or modified CDS sequence (opt2) from hemagglutinin__InfluenzaA__ABW91438

SEQ ID NO: 98223 - RNA, 1698 nt, Artificial Sequence; identical to SEQ ID NO: 97992
  derived and/or modified CDS sequence (opt2) from hemagglutinin__InfluenzaA__ABW91449

SEQ ID NO: 98224 - RNA, 1698 nt, Artificial Sequence; identical to SEQ ID NO: 97992
  derived and/or modified CDS sequence (opt2) from hemagglutinin__InfluenzaA__ABW91460

SEQ ID NO: 98225 - RNA, 1698 nt, Artificial Sequence
  derived and/or modified CDS sequence (opt2) from hemagglutinin__InfluenzaA__ABW91471
augaaggucaagcuccucguccuccucugcaccuucaccgccaccuacgccgacaccaucugcaucggcuaccacgccaacaacuccaccgacaccgucgacaccguccucgagaagaacgucaccgucacccacuccgucaaccuccucgaggacucccacaacggcaagcucugccuccucaagggcgucgccccccuccagcucggcaacugcuccgucgccggcuggauccucggcaaccccgagugcgagcuccucaucuccaaggaguccugguccuacaucgucgagacccccaaccccgagaacggcaccugcuaccccggcuacuucgccgacuacgaggagcuccgcgagcagcucuccuccgucuccuccuucgagcgcuucgagaucuuccccaaggaguccuccuggcccaaccacaccgucaccggcgucuccgccuccugcucccacaacggcaaguccuccuucuaccgcaaccuccucuggcucaccggcaagaacggccucuaccccaaccucuccaaguccuacgccaacaacaaggagaaggagguccucguccucuggggcguccaccacccccccaacaucggcgaccagcgcgcccucuaccacaccgagaacgccuacgucuccgucgucuccucccacuacucccgccgcuucacccccgagaucgccaagcgccccaagguccgcgaccaggagggccgcaucaacuacuacuggacccuccucgagcccggcgacaccaucaucuucgaggccaacggcaaccucaucgccccccgcuucgccuucgcccucucccgcggcuucggcuccggcaucaucaccuccaacgcccccauggacgagugcgacgccaagugccagaccccccagggcgccaucaacuccucccuccccuuccagaacguccaccccgucaccaucggcgagugccccaaguacguccgcuccaccaagcuccgcauggucaccggccuccgcaacauccccuccauccagucccgcggccucuucggcgccaucgccggcuucaucgagggcggcuggaccggcauggucgacggcugguacggcuaccaccaccagaacgagcagggcuccggcuacgccgccgaccagaaguccacccagaacgccaucaacggcaucaccaacaaggucaacuccgucaucgagaagaugaacacccaguucaccgccgucggcaaggaguucaacaagcucgagcgccgcauggagaaccucaacaagaaggucgacgacggcuuccucgacaucuggaccuacaacgccgagcuccucguccuccucgagaacgagcgcacccucgacuuccacgacuccaacgucaagaaccucuacgagaaggucaagucccagcucaagaacaacgccaaggagaucggcaacggcugcuucgaguucuaccacaagugcaacgacgagugcauggaguccgucaagaacggcaccuacgacuaccccaaguacuccgaggaguccaagcucaaccgcgagaagaucgacggcgucaagcucgaguccaugggcgucuaccagauccucgccaucuacuccaccgucgccuccucccucguccuccucgucucccucggcgccaucuccuucuggaugugcuccaacggcucccuccagugccgcaucugcaucuga

SEQ ID NO: 98226 - RNA, 1698 nt, Artificial Sequence
  derived and/or modified CDS sequence (opt2) from hemagglutinin__InfluenzaA__ABW91482
augaaggucaagcuccucguccuccucugcaccuucaccgccaccuacgccgacaccaucugcaucggcuaccacgccaacaacuccaccgacaccgucgacaccguccucgagaagaacgucaccgucacccacuccgucaaccuccucgaggaccgccacaacggcaagcucugccuccucaagggcaucgccccccuccagcucggcaacugcuccgucgccggcuggauccucggcaaccccgagugcgagcuccucaucuccaaggaguccugguccuacaucgucgagacccccaaccccgagaacggcaccugcuaccccggcuacuucgccgacuacgaggagcuccgcgagcagcucuccuccgucuccuccuucgagcgcuucgagaucuuccccaaggaguccuccuggcccaaccacaccgucaccggcgucuccgccuccugcucccacaacggccgcuccuccuucuaccgcaaccuccucuggcucaccggcaagaacggccucuaccccaaccucucccgcuccuacgccaacaacaaggagaaggagguccucguccucuggggcguccaccacccccccaacaucggcgaccagcgcgcccucuaccacaccgagaacgccuacgucuccgucgucuccucccacuacucccgccgcuucacccccgagaucgccaagcgccccaagguccgcgaccaggagggccgcaucaacuacuacuggacccuccucgagcccggcgacaccaucaucuucgaggccaacggcaaccucaucgccccccgcuucgccuucgcccucucccgcggcuucggcuccggcaucaucaccuccaacgcccccauggacgagugcgacgccaagugccagaccccccagggcgccaucaacuccucccuccccuuccagaacguccaccccgucaccaucggcgagugccccaaguacguccgcuccgccaagcuccgcauggucaccggccuccgcaacauccccuccauccagucccgcggccucuucggcgccaucgccggcuucaucgagggcggcuggaccggcauggucgacggcugguacggcuaccaccaccagaacgagcagggcuccggcuacgccgccgaccagaaguccacccagaacgccaucaacggcaucaccaacaaggucaacuccgucaucgagaagaugaacacccaguucaccgccgucggcaaggaguucaacaagcucgagcgccgcauggagaaccucaacaagaaggucgacgacggcuuccucgacaucuggaccuacaacgccgagcuccucguccuccucgagaacgagcgcacccucgacuuccacgacuccaacgucaagaaccucuacgagaaggucaagucccagcucaagaacaacgccaaggagaucggcaacggcugcuucgaguucuaccacaagugcaacgacgagugcauggaguccgucaagaacggcaccuacgacuaccccaaguacuccgaggaguccaagcucaaccgcgagaagaucgacggcgucaagcucgaguccaugggcgucuaccagauccucgccaucuacuccaccgucgccuccucccucguccuccucgucucccucggcgccaucuccuucuggaugugcuccaacggcucccuccagugccgcaucugcaucuga

SEQ ID NO: 98227 - RNA, 1698 nt, Artificial Sequence
  derived and/or modified CDS sequence (opt2) from hemagglutinin__InfluenzaA__ABW91493
augaaggucaagcuccucauccuccucugcaccuucaccgccaccuacgccgacaccaucugcaucggcuaccacgccaacaacuccaccgacaccgucgacaccguccucgagaagaacgucaccgucacccacuccgucaaccuccucgaggacucccacaacggcaagcucugccuccucaagggcaucgccccccuccagcucggcaacugcuccgucgccggcuggauccucggcaaccccgagugcgagcuccucaucuccaaggaguccugguccuacaucgucgagacccccaaccccgagaacggcaccugcuaccccggcuacuucgccgacuacgaggagcuccgcgagcagcucuccuccgucuccuccuucgagcgcuucgagaucuuccccaaggaguccuccuggcccaaccacaccgucaccggcgucuccgccuccugcucccacaacggcaaguccuccuucuaccgcaaccuccucuggcucaccggcaagaacggccucuaccccaaccucuccaaguccuacgccaacaacaaggagaaggagguccucguccucuggggcguccaccacccccccaacaucggcgaccagcgcgcccucuaccacaccgagaacgccuacgucuccgucgucuccucccacuacucccgccgcuucacccccgagaucgccaagcgccccaagguccgcgaccaggagggccgcaucaacuacuacuggacccuccucgagcccggcgacaccaucaucuucgaggccaacggcaaccucaucgccccccgcuucgccuucgcccucucccgcggcuucggcuccggcaucaucaccuccaacgcccccauggacgagugcgacgccaagugccagaccccccagggcgccaucaacuccucccuccccuuccagaacguccaccccgucaccaucggcgagugccccaaguacguccgcuccaccaagcuccgcauggucaccggccuccgcaacauccccuccauccagucccgcggccucuucggcgccaucgccggcuucaucgagggcggcuggaccggcauggucgacggcugguacggcuaccaccaccagaacgagcagggcuccggcuacgccgccgaccagaaguccacccagaacgccaucaacggcaucaccaacaaggucaacuccgucaucgagaagaugaacacccaguucaccgccgucggcaaggaguucaacaagcucgagaagcgcauggagaaccucaacaagaaggucgacgacggcuuccucgacaucuggaccuacaacgccgagcuccucguccuccucgagaacgagcgcacccucgacuuccacgacuccaacgucaagaaccucuacgagaaggucaagucccagcucaagaacaacgccaaggagaucggcaacggcugcuucgaguucuaccacaagugcaacgacgagugcauggaguccgucaagaacggcaccuacgacuaccccaaguacuccgaggaguccaagcucaaccgcgagaagaucgacggcgucaagcucgaguccaugggcgucuaccagauccucgccaucuacuccaccgucgccuccucccucguccuccucgucucccucggcgccaucuccuucuggaugugcuccaacggcucccuccagugccgcaucugcaucuga

SEQ ID NO: 98228 - RNA, 1698 nt, Artificial Sequence; identical to SEQ ID NO: 97966
  derived and/or modified CDS sequence (opt2) from hemagglutinin__InfluenzaA__ABW91504

SEQ ID NO: 98229 - RNA, 1698 nt, Artificial Sequence
  derived and/or modified CDS sequence (opt2) from hemagglutinin__InfluenzaA__ABW91515
augaaggucaagcuccucguccuccucugcaccuucaccgccaccuacgccgacaccaucugcaucggcuaccacgccaacaacuccaccgacaccgucgacaccguccucgagaagaacgucaccgucacccacuccgucaaccuccucgaggaccgccacaacggcaagcucugccuccucaagggcaucgccccccuccagcucggcaacugcuccgucgccggcuggauccucggcaaccccgagugcgagcuccucaucuccaaggaguccugguccuacgucgucgagacccccaaccccgagaacggcaccugcuaccccggcuacuucgccgacuacgaggagcuccgcgagcagcucuccuccgucuccuccuucgagcgcuucgagaucuuccccaaggaguccuccuggcccaaccacaccgucaccggcgucuccgccuccugcucccacaacggcaaguccuccuucuaccgcaaccuccucuggcucaccggcaagaacggccucuaccccaaccucuccaaguccuacgccaacaacaaggagaaggagguccucguccucuggggcguccaccacccccccaacaucggcgaccagcgcgcccucuaccacaccgagaacgccuacgucuccgucgucuccucccacuacucccgccgcuucacccccgagaucgccaagcgccccaagguccgcgaccaggagggccgcaucaacuacuacuggacccuccucgagcccggcgacaccaucaucuucgaggccaacggcaaccucaucgccccccgcuucgccuucgcccucucccgcggcuucggcuccggcaucaucaccuccaacgcccccauggacgagugcgacgccaagugccagaccccccagggcgccaucaacuccucccuccccuuccagaacguccaccccgucaccaucggcgagugccccaaguacguccgcuccgccaagcuccgcauggucaccggccuccgcaacauccccuccauccagucccgcggccucuucggcgccaucgccggcuucaucgagggcggcuggaccggcauggucgacggcugguacggcuaccaccaccagaacgagcagggcuccggcuacgccgccgaccagaaguccacccagaacgccaucaacggcaucaccaacaaggucaacuccgucaucgagaagaugaacacccaguucaccgccgucggcaaggaguucaacaagcucgagcgccgcauggagaaccucaacaagaaggucgacgacggcuuccucgacaucuggaccuacaacgccgagcuccucguccuccucgagaacgagcgcacccucgacuuccacgacuccaacgucaagaaccucuacgagaaggucaagucccagcucaagaacaacgccaaggagaucggcaacggcugcuucgaguucuaccacaagugcaacgacgagugcauggaguccgucaagaacggcaccuacgacuaccccaaguacuccgaggaguccaagcucaaccgcgagaagaucgacggcgucaagcucgaguccaugggcgucuaccagauccucgccaucuacuccaccgucgccuccucccucguccuccucgucucccucggcgccaucuccuucuggaugugcuccaacggcucccuccagugccgcaucugcaucuga

SEQ ID NO: 98230 - RNA, 1698 nt, Artificial Sequence
  derived and/or modified CDS sequence (opt2) from hemagglutinin__InfluenzaA__ABW91526
augaaggucaagcuccucguccuccucugcaccuucaccgccaccuacgccgacaccaucugcaucggcuaccacgccaacaacuccaccgacaccgucgacaccguccucgagaagaacgucaccgucacccacuccgucaaccuccucgaggacucccacaacggcaagcucugccuccucaagggcaucgccccccuccagcucggcaacugcuccgucgccggcuggauccucggcaaccccgagugcgagcuccucaucuccaaggaguccugguccuacaucgucgagacccccaaccccgagaacggcaccugcuaccccggcuacuucgccgacuacgaggagcuccgcgagcagcucuccuccgucuccuccuucgagcgcuucgagaucuuccccaaggaguccuccuggcccaaccacaccgucaccggcgucuccgccuccugcucccacaacggcaaguccuccuucuaccgcaaccuccucuggcucaccggcaagaacggccucuaccccaaccucuccaaguccuacgccaacaacaaggagaaggagguccucguccucuggggcguccaccacccccccaacaucggcgaccagcgcgcccucuaccacaccgagaacgccuacgucuccgucgucuccucccacuacucccgccgcuucacccccgagaucgccaagcgccccaagguccgcgagcaggagggccgcaucaacuacuacuggacccuccucgagcccggcgacaccaucaucuucgaggccaacggcaaccucaucgccccccgcuucgccuucgcccucucccgcggcuucggcuccggcaucaucaccuccaacgcccccauggacgagugcgacgccaagugccagaccccccagggcgccaucaacuccucccuccccuuccagaacguccaccccgucaccaucggcgagugccccaaguacguccgcuccacccgccuccgcauggucaccggccuccgcaacauccccuccauccagucccgcggccucuucggcgccaucgccggcuucaucgagggcggcuggaccggcauggucgacggcugguacggcuaccaccaccagaacgagcagggcuccggcuacgccgccgaccagaaguccacccagaacgccaucaacggcaucaccaacaaggucaacuccgucaucgagaagaugaacacccaguucaccgccgucggcaaggaguucaacaagcucgagcgccgcauggagaaccucaacaagaaggucgacgacggcuuccucgacaucuggaccuacaacgccgagcuccucguccuccucgagaacgagcgcacccucgacuuccacgacuccaacgucaagaaccucuacgagaaggucaagucccagcucaagaacaacgccaaggagaucggcaacggcugcuucgaguucuaccacaagugcaacgacgagugcauggaguccgucaagaacggcaccuacgacuaccccaaguacuccgaggaguccaagcucaaccgcgagaagaucgacggcgucaagcucgaguccaugggcgucuaccagauccucgccaucuacuccaccgucgccuccucccucguccuccucgucucccucggcgccaucuccuucuggaugugcuccaacggcucccuccagugccgcaucugcaucuga

SEQ ID NO: 98231 - RNA, 1698 nt, Artificial Sequence; identical to SEQ ID NO: 97950
  derived and/or modified CDS sequence (opt2) from hemagglutinin__InfluenzaA__ABW91537

SEQ ID NO: 98232 - RNA, 1701 nt, Artificial Sequence; identical to SEQ ID NO: 98023
  derived and/or modified CDS sequence (opt2) from hemagglutinin__InfluenzaA__ABW91548

SEQ ID NO: 98233 - RNA, 1698 nt, Artificial Sequence
  derived and/or modified CDS sequence (opt2) from hemagglutinin__InfluenzaA__ABW91559
augaaggucaagcuccucauccuccucugcaccuucaccgccaccuacgccgacaccaucugcaucggcuaccacgccaacaacuccaccgacaccgucgacaccguccucgagaagaacgucaccgucacccacuccgucaaccuccucgaggacucccacaacggcaagcucugccuccucaagggcaucgccccccuccagcucggcaacugcuccgucgccggcuggauccucggcaaccccgagugcgagcuccucaucuccaaggaguccugguccuacaucgucgagacccccaaccccgagaacggcaccugcuaccccggcuacuucgccgacuacgaggagcuccgcgagcagcucuccuccgucuccuccuucgagcgcuucgagaucuuccccaaggaguccuccuggcccaaccacaccgucaccggcgucuccgccuccugcucccacaacggcaaguccuccuucuaccgcaaccuccucuggcucaccggcaagaacggccucuaccccaaccucuccaaguccuacgccaacaacaaggagaaggagguccucguccucuggggcguccaccacccccccaacaucggcgaccagcgcgcccucuaccacaccgagaacgccuacgucuccgucgucuccucccacuacucccgccgcuucacccccgagaucgccaagcgccccaagguccgcgaccaggagggccgcaucaacuacuacuggacccuccucgagcccggcgacaccaucaucuucgaggccaacggcaaccucaucgccccccgcuucgccuucgcccucucccgcggcuucggcuccggcaucaucaccuccaacgcccccauggacgagugcgacgccaagugccagaccccccagggcgccaucaacuccucccuccccuuccagaacguccaccccgucaccaucggcgagugccccaaguacguccgcuccaccaagcuccgcauggucaccggccuccgcaacauccccuccauccagucccgcggccucuucggcgccaucgccggcuucaucgagggcggcuggaccggcauggucgacggcugguacggcuaccaccaccagaacgagcagggcuccggcuacgccgccgaccagaaguccacccagaacgccaucaacggcaucaccaacaaggucaacuccgucaucgagaagaugaacacccaguucaccgccgucggcaaggaguucaacaagcucgagcgccgcauggagaaccucaacaagaaggucgacgacggcuuccucgacaucuggaccuacaacgccgagcuccucguccuccucgagaacgagcgcacccucgacuuccacgacuccaacgucaagaaccucuacgagaaggucaagucccagcucaagaacaacgccaaggagaucggcaacggcugcuucgaguucuaccacaagugcaacgacgagugcauggaguccgucaagaacggcaccuacgacuaccccaaguacuccgaggaguccaagcucuaccgcgagaagaucgacggcgucaagcucgaguccaugggcgucuaccagauccucgccaucuacuccaccgucgccuccucccucguccuccucgucucccucggcgccaucuccuucuggaugugcuccaacggcucccuccagugccgcaucugcaucuga

SEQ ID NO: 98234 - RNA, 1698 nt, Artificial Sequence; identical to SEQ ID NO: 98091
  derived and/or modified CDS sequence (opt2) from hemagglutinin__InfluenzaA__ABW91570

SEQ ID NO: 98235 - RNA, 1698 nt, Artificial Sequence; identical to SEQ ID NO: 97966
  derived and/or modified CDS sequence (opt2) from hemagglutinin__InfluenzaA__ABW91581

SEQ ID NO: 98236 - RNA, 1698 nt, Artificial Sequence; identical to SEQ ID NO: 97946
  derived and/or modified CDS sequence (opt2) from hemagglutinin__InfluenzaA__ABW91592

SEQ ID NO: 98237 - RNA, 1698 nt, Artificial Sequence; identical to SEQ ID NO: 97992
  derived and/or modified CDS sequence (opt2) from hemagglutinin__InfluenzaA__ABW91603

SEQ ID NO: 98238 - RNA, 1698 nt, Artificial Sequence
  derived and/or modified CDS sequence (opt2) from hemagglutinin__InfluenzaA__ABW91614
augaaggucaagcuccucguccuccucugcaccuucaccgccaccuacgccgacaccaucugcaucggcuaccacgccaacaacuccaccgacaccgucgacaccguccucgagaagaacgucaccgucacccacuccgucaaccuccucgaggacucccacaacggcaagcucugccuccucaagggcaucgccccccuccagcucggcaacugcuccgucgccggcuggauccucggcaaccccgagugcgagcuccucaucuccaaggaguccugguccuacaucgucgagacccccucccccgagaacggcaccugcuaccccggcuacuucgccgacuacgaggagcuccgcgagcagcucuccuccgucuccuccuucgagcgcuucgagaucuuccccaaggaguccuccuggcccaaccacaccgucaccggcgucuccgccuccugcucccacaacggcaaguccuccuucuaccgcaaccuccucuggcucaccggcaagaacggccucuaccccaaccucuccaaguccuacgccaacaacaaggagaaggagguccucguccucuggggcguccaccacccccccaacaucggcgaccagcgcgcccucuaccacaccgagaacgccuacgucuccgucgucuccucccacuacucccgccgcuucacccccgagaucgccaagcgccccaagguccgcgaccaggagggccgcaucaacuacuacuggacccuccucgagcccggcgacaccaucaucuucgaggccaacggcaaccucaucgccccccgcuucgccuucgcccucucccgcggcuucggcuccggcaucaucuccuccaacgcccccaugggcgagugcgacgccaagugccagaccccccagggcgccaucaacuccucccuccccuuccagaacguccaccccgucaccaucggcgagugccccaaguacguccgcuccgccaagcuccgcauggucaccggccuccgcaacauccccuccauccagucccgcggccucuucggcgccaucgccggcuucaucgagggcggcuggaccggcauggucgacggcugguacggcuaccaccaccagaacgagcagggcuccggcuacgccgccgaccagaaguccacccagaacgccaucaacggcaucaccaacaaggucaacuccgucaucgagaagaugaacacccaguucaccgccgucggcaaggaguucaacaagcucgagcgccgcauggagaaccucaacaagaaggucgacgacggcuuccucgacaucuggaccuacaacgccgagcuccucguccuccucgagaacgagcgcacccucgacuuccacgacuccaacgucaagaaccucuacgagaaggucaagucccagcucaagaacaacgccaaggagaucggcaacggcugcuucgaguucuaccacaagugcaacgacgagugcauggaguccgucaagaacggcaccuacgacuaccccaaguacuccgaggaguccaagcucaaccgcgagaagaucgacggcgucaagcucgaguccaugggcgucuaccagauccucgccaucuacuccaccgucgccuccucccucguccuccucgucucccucggcgccaucuccuucuggaugugcuccaacggcucccuccagugccgcaucugcaucuga

SEQ ID NO: 98239 - RNA, 1698 nt, Artificial Sequence; identical to SEQ ID NO: 97981
  derived and/or modified CDS sequence (opt2) from hemagglutinin__InfluenzaA__ABW91625

SEQ ID NO: 98240 - RNA, 1698 nt, Artificial Sequence; identical to SEQ ID NO: 97950
  derived and/or modified CDS sequence (opt2) from hemagglutinin__InfluenzaA__ABW91636

SEQ ID NO: 98241 - RNA, 1701 nt, Artificial Sequence; identical to SEQ ID NO: 98023
  derived and/or modified CDS sequence (opt2) from hemagglutinin__InfluenzaA__ABW91647

SEQ ID NO: 98242 - RNA, 1707 nt, Artificial Sequence
  derived and/or modified CDS sequence (opt2) from hemagglutinin__InfluenzaA__ABX10515
auggagaagaucguccuccucuucgccaucgucucccucgucaaguccgaccagaucugcaucggcuaccacgccaacaacuccaccgagcaggucgacaccaucauggagaagaacgucaccgucacccacgcccaggacauccucgagaagacccacaacggcaagcucugcgaccucgacggcgucaagccccucauccuccgcgacugcuccgucgccggcuggcuccucggcaaccccaugugcgacgaguucaucaacguccccgagugguccuacaucgucgagaaggccaaccccgucaacgaccucugcuaccccggcgacuucaacgacuacgaggagcucaagcaccuccucucccgcaucaaccacuucgagaagauccagaucauccccaaguccuccugguccucccacgaggucucccucggcgucuccuccgccugccccuaccagggcaaguccuccuucuuccgcaacgucgucuggcucaucaagaagaacuccaccuaccccaccaucaagcgcuccuacaacaacaccaaccaggaggaccuccucguccucuggggcauccaccaccccaacgacgccgccgagcagaccaagcucuaccagaaccccaccaccuacaucuccgucggcaccuccacccucaaccagcgccucgucccccgcaucgccacccgcuccaaggucaacggccaguccggccgcauggaguucuucuggaccauccucaagcccaacgacgccaucaacuucgaguccaacggcaacuucaucgcccccgaguacgccuacaagaucgucaagaagggcgacuccaccaucaugaaguccgagcucgaguacggcaacugcaacaccaagugccagacccccaugggcgccaucaacuccuccaugcccuuccacaacauccacccccucaccaucggcgagugccccaaguacgucaaguccaaccgccucguccucgccaccggccuccgcaacuccccccagcgcgagcgccgccgcaagaagcgcggccucuucggcgccaucgccggcuucaucgagggcggcuggcagggcauggucgacggcugguacggcuaccaccacuccaacgagcagggcuccggcuacgccgccgacaaggaguccacccagaaggccaucgacggcgucaccaacaaggucaacuccaucaucgacaagaugaacacccaguucgaggccgucggccgcgaguucaacaaccucgagcgccgcaucgagaaccucaacaagaagauggaggacggcuuccucgacgucuggaccuacaacgccgagcuccucguccucauggagaacgagcgcacccucgacuuccacgacuccaacgucaagaaccucuacgacaagguccgccuccagcucaaggacaacgccaaggagcucggcaacggcugcuucgaguucuaccacaagugcgacaacgagugcauggaguccguccgcaacggcaccuacgacuacccccaguacuccgaggaggcccgccucaagcgcgaggagaucuccggcgucaagcucgaguccaucggcaucuaccagauccucuccaucuacuccaccgucgccuccucccucgcccucgccaucauggucgccggccucucccucuggaugugcuccaacggcucccuccagugccgcaucugcaucuga

SEQ ID NO: 98243 - RNA, 1701 nt, Artificial Sequence; identical to SEQ ID NO: 97892
  derived and/or modified CDS sequence (opt2) from hemagglutinin__InfluenzaA__ABX10525

SEQ ID NO: 98244 - RNA, 1698 nt, Artificial Sequence; identical to SEQ ID NO: 97950
  derived and/or modified CDS sequence (opt2) from hemagglutinin__InfluenzaA__ABX58239

SEQ ID NO: 98245 - RNA, 1698 nt, Artificial Sequence; identical to SEQ ID NO: 98050
  derived and/or modified CDS sequence (opt2) from hemagglutinin__InfluenzaA__ABX58250

SEQ ID NO: 98246 - RNA, 1698 nt, Artificial Sequence
  derived and/or modified CDS sequence (opt2) from hemagglutinin__InfluenzaA__ABX58261
augaaggucaagcuccucauccuccucugcaccuucaccgccaccuacgccgacaccaucugcaucggcuaccacgccaacaacuccaccgacaccgucgacaccguccucgagaagaacgucaccgucacccacuccgucaaccuccucgaggacucccacaacggcaagcucugccuccucaagggcaucgccccccuccagcucggcaacugcuccgucgccggcuggauccucggcaaccccgagugcgagcuccucaucuccaaggaguccugguccuacaucgucgagacccccaaccccgagaacggcaccugcuaccccggcuacuucgccgacuacgaggagcuccgcgagcagcucuccuccgucuccuccuucgagcgcuucgagaucuuccccaaggaguccuccuggcccaaccacaccgucaccggcgucuccgccuccugcucccacaacggcaaguccuccuucuaccgcaaccuccucuggcucaccggcaagaacggccucuaccccaaccucuccaaguccuacgccaacaacaaggagaaggagguccucguccucuggggcguccaccacccccccaacaucggcgaccagcgcgcccucuaccacaccgagaacgccuacgucuccgucgucuccucccacuacucccgccgcuucacccccgagaucgccaagcgccccaagguccgcgaccaggagggccgcaucaacuacuacuggucccuccucgagcccggcgacaccaucaucuucgaggccaacggcaaccucaucgccccccgcuucgccuucgcccucucccgcggcuucggcuccggcaucaucaccuccaacgcccccauggacgagugcgacgccaagugccagaccccccagggcgccaucaacuccucccuccccuuccagaacguccaccccgucaccaucggcgagugccccaaguacguccgcuccaccaagcuccgcauggucaccggccuccgcaacauccccuccauccagucccgcggccucuucggcgccaucgccggcuucaucgagggcggcuggaccggcauggucgacggcugguacggcuaccaccaccagaacgagcagggcuccggcuacgccgccgaccagaaguccacccagaacgccaucaacggcaucaccaacaaggucaacuccgucaucgagaagaugaacacccaguucaccgccgucggcaaggaguucaacaagcucgagcgccgcauggagaaccucaacaagaaggucgacgacggcuuccucgacaucuggaccuacaacgccgagcuccucguccuccucgagaacgagcgcacccucgacuuccacgacuccaacgucaagaaccucuacgagaaggucaagucccagcucaagaacaacgccaaggagaucggcaacggcugcuucgaguucuaccacaagugcaacgacgagugcauggaguccgucaagaacggcaccuacgacuaccccaaguacuccgaggaguccaagcucaaccgcgagaagaucgacggcgucaagcucgaguccaugggcgucuaccagauccucgccaucuacuccaccgucgccuccucccucguccuccucgucucccucggcgccaucuccuucuggaugugcuccaacggcucccuccagugccgcaucugcaucuga

SEQ ID NO: 98247 - RNA, 1698 nt, Artificial Sequence
  derived and/or modified CDS sequence (opt2) from hemagglutinin__InfluenzaA__ABX58272
augaaggucaagcuccucauccuccucugcaccuucaccgccaccuacgccgacaccaucugcaucggcuaccacgccaacaacuccaccgacaccgucgacaccguccucgagaagaacgucaccgucacccacuccgucaaccuccucgaggacucccacaacggcaagcucugccuccucaagggcaucgccccccuccagcucggcaacugcuccgucgccggcuggauccucggcaaccccgagugcgagcuccucaucuccaaggaguccugguccuacaucgucgagacccccaaccccgagaacggcaccugcuaccccggcuacuucgccgacuacgaggagcuccgcgagcagcucuccuccgucuccuccuucgagcgcuucgagaucuuccccaagaaguccuccuggcccaaccacaccgucaccggcgucuccgccuccugcucccacaacggcaaguccuccuucuaccgcaaccuccucuggcucaccggcaagaacggccucuaccccaaccucuccaaguccuacgccaacaacaaggagaaggagguccucguccucuggggcguccaccacccccccaacaucggcgaccagcgcgcccucuaccacaccgagaacgccuacgucuccgucgucuccucccacuacucccgccgcuucacccccgagaucgccaagcgccccaagguccgcgaccaggagggccgcaucaacuacuacuggacccuccucgagcccggcgacaccaucaucuucgaggccaacggcaaccucaucgccccccgcuucgccuucgcccucucccgcggcuucggcuccggcaucaucaccuccaacgcccccauggacgagugcgacgccaagugccagaccccccagggcgccaucaacuccucccuccccuuccagaacguccaccccgucaccaucggcgagugccccaaguacguccgcuccaccaagcuccgcauggucaccggccuccgcaacauccccuccauccagucccgcggccucuucggcgccaucgccggcuucaucgagggcggcuggaccggcauggucgacggcugguacggcuaccaccaccagaacgagcagggcuccggcuacgccgccgaccagaaguccacccagaacgccaucaacggcaucaccaacaaggucaacuccgucaucgagaagaugaacacccaguucaccgccgucggcaaggaguucaacaagcucgagcgccgcauggagaaccucaacaagaaggucgacgacggcuuccucgacaucuggaccuacaacgccgagcuccucguccuccucgagaacgagcgcacccucgacuuccacgacuccaacgucaagaaccucuacgagaaggucaagucccagcucaagaacaacgccaaggagaucggcaacggcugcuucgaguucuaccacaagugcaacgacgagugcauggaguccgucaagaacggcaccuacgacuaccccaaguacuccgaggaguccaagcucaaccgcgagaagaucgacggcgucaagcucgaguccaugggcgucuaccagauccucgccaucuacuccaccgucgccuccucccucguccuccucgucucccucggcgccaucuccuucuggaugugcuccaacggcucccuccagugccgcaucugcaucuga

SEQ ID NO: 98248 - RNA, 1698 nt, Artificial Sequence; identical to SEQ ID NO: 97950
  derived and/or modified CDS sequence (opt2) from hemagglutinin__InfluenzaA__ABX58283

SEQ ID NO: 98249 - RNA, 1698 nt, Artificial Sequence; identical to SEQ ID NO: 98091
  derived and/or modified CDS sequence (opt2) from hemagglutinin__InfluenzaA__ABX58294

SEQ ID NO: 98250 - RNA, 1698 nt, Artificial Sequence; identical to SEQ ID NO: 97946
  derived and/or modified CDS sequence (opt2) from hemagglutinin__InfluenzaA__ABX58316

SEQ ID NO: 98251 - RNA, 1698 nt, Artificial Sequence; identical to SEQ ID NO: 98095
  derived and/or modified CDS sequence (opt2) from hemagglutinin__InfluenzaA__ABX58327

SEQ ID NO: 98252 - RNA, 1698 nt, Artificial Sequence; identical to SEQ ID NO: 97946
  derived and/or modified CDS sequence (opt2) from hemagglutinin__InfluenzaA__ABX58338

SEQ ID NO: 98253 - RNA, 1698 nt, Artificial Sequence
  derived and/or modified CDS sequence (opt2) from hemagglutinin__InfluenzaA__ABX58360
augaaggucaagcuccucguccuccucugcaccuucaccgccaccuacgccgacaccaucugcaucggcuaccacgccaacaacuccaccgacaccgucgacaccguccucgagaagaacgucaccgucacccacuccgucaaccuccucgaggacucccacaacggcaagcucugccuccucaagggcaucgcccccauccagcucggcaacugcuccgucgccggcuggauccucggcaaccccgagugcgagcuccucaucuccaaggaguccugguccuacaucgucgagacccccaaccccgagaacggcaccugcuaccccggcuacuucgccgacuacgaggagcuccgcgagcagcucuccuccgucuccuccuucgagcgcuucgagaucuuccccaaggaguccuccuggcccaaccacaccgucaccggcgucuccgccuccugcucccacaacggcaaguccuccuucuaccgcaaccuccucuggcucaccggcaagaacggccucuaccccaaccucuccaaguccuacgccaacaacaaggagaaggagguccucguccucuggggcguccaccacccccccaacaucggcgaccagcgcgcccucuaccacaccgagaacgccuacgucuccgucgucuccucccacuacucccgccgcuucacccccgagaucgccaagcgccccaagguccgcgaccaggagggccgcaucaacuacuacuggacccuccucgagcccggcgacaccaucaucuucgaggccaacggcaaccucaucgccccccgcuucgccuucgcccucucccgcggcuucggcuccggcaucaucaccuccaacgcccccauggacgagugcgacgccaagugccagaccccccagggcgccaucaacuccucccuccccuuccagaacguccaccccgucaccaucggcgagugccccaaguacguccgcuccaccaagcuccgcauggucaccggccuccgcaacauccccuccauccagucccgcggccucuucggcgccaucgccggcuucaucgagggcggcuggaccggcauggucgacggcugguacggcuaccaccaccagaacgagcagggcuccggcuacgccgccgaccagaaguccacccagaacgccaucaacggcaucaccaacaaggucaacuccgucaucgagaagaugaacacccaguucaccgccgucggcaaggaguucaacaagcucgagcgccgcauggagaaccucaacaagaaggucgacgacggcuuccucgacaucuggaccuacaacgccgagcuccucguccuccucgagaacgagcgcacccucgacuuccacgacuccaacgucaagaaccucuacgagaaggucaagucccagcucaagaacaacgccaaggagaucggcaacggcugcuucgaguucuaccacaagugcaacgacggcugcauggaguccgucaagaacggcaccuacgacuaccccaaguacuccgaggaguccaagcucaaccgcgagaagaucgacggcgucaagcucgaguccaugggcgucuaccagauccucgccaucuacuccaccgucgccuccucccucguccuccucgucucccucggcgccaucuccuucuggaugugcuccaacggcucccuccagugccgcaucugcaucuga

SEQ ID NO: 98254 - RNA, 1698 nt, Artificial Sequence; identical to SEQ ID NO: 97950
  derived and/or modified CDS sequence (opt2) from hemagglutinin__InfluenzaA__ABX58371

SEQ ID NO: 98255 - RNA, 1698 nt, Artificial Sequence; identical to SEQ ID NO: 97950
  derived and/or modified CDS sequence (opt2) from hemagglutinin__InfluenzaA__ABX58382

SEQ ID NO: 98256 - RNA, 1698 nt, Artificial Sequence; identical to SEQ ID NO: 98091
  derived and/or modified CDS sequence (opt2) from hemagglutinin__InfluenzaA__ABX58393

SEQ ID NO: 98257 - RNA, 1698 nt, Artificial Sequence; identical to SEQ ID NO: 97950
  derived and/or modified CDS sequence (opt2) from hemagglutinin__InfluenzaA__ABX58404

SEQ ID NO: 98258 - RNA, 1698 nt, Artificial Sequence
  derived and/or modified CDS sequence (opt2) from hemagglutinin__InfluenzaA__ABX58415
augaaggucaagcuccucguccuccucugcaccuucaccgccaccuacgccgacaccaucugcaucggcuaccacgccaacaacuccaccgacaccgucgacaccguccucgagaagaacgucaccgucacccacuccgucaaccuccucgaggaccgccacaacggcaagcucugccuccucaagggcaucgccccccuccagcucggcaacugcuccgucgccggcuggauccucggcaaccccgagugcgagcuccucaucuccaagaaguccugguccuacaucgucgagacccccaaccccgagaacggcaccugcuaccccggcuacuucgccgacuacgaggagcuccgcgagcagcucuccuccgucuccuccuucgagcgcuucgagaucuuccccaaggaguccuccuggcccaaccacaccgucaccggcgucuccgccuccugcucccacaacggcaaguccuccuucuaccgcaaccuccucuggcucaccggcaagaacggccucuaccccaaccucucccgcuccuacgccaacaacaaggagaaggagguccucguccucuggggcguccaccacccccccaacaucggcgaccagcgcgcccucuaccacaccgagaacgccuacgucuccgucgucuccucccacuacucccgccgcuucacccccgagaucgccaagcgccccaagguccgcgaccaggagggccgcaucaacuacuacuggacccuccucgagcccggcgacaccaucaucuucgaggccaacggcaaccucaucgccccccgcuucgccuucgcccucucccgcggcuucggcuccggcaucaucaccuccaacgcccccauggacgagugcgacgccaagugccagaccccccagggcgccaucaacuccucccuccccuuccagaacguccaccccgucaccaucggcgagugccccaaguacguccgcuccgccaagcuccgcauggucaccggccuccgcaacauccccuccauccagucccgcggccucuucggcgccaucgccggcuucaucgagggcggcuggaccggcauggucgacggcugguacggcuaccaccaccagaacgagcagggcuccggcuacgccgccgaccagaaguccacccagaacgccaucaacggcaucaccaacaaggucaacuccgucaucgagaagaugaacacccaguucaccgccgucggcaaggaguucaacaagcucgagcgccgcauggagaaccucaacaagaaggucgacgacggcuuccucgacaucuggaccuacaacgccgagcuccucguccuccucgagaacgagcgcacccucgacuuccacgacuccaacgucaagaaccucuacgagaaggucaagucccagcucaagaacaacgccaaggagaucggcaacggcugcuucgaguucuaccacaagugcaacgacgagugcauggaguccgucaagaacggcaccuacgacuaccccaaguacuccgaggaguccaagcucaaccgcgagaagaucgacggcgucaagcucgaguccaugggcgucuaccagauccucgccaucuacuccaccgucgccuccucccucguccuccucgucucccucggcgccaucuccuucuggaugugcuccaacggcucccuccagugccgcaucugcaucuga

SEQ ID NO: 98259 - RNA, 1698 nt, Artificial Sequence; identical to SEQ ID NO: 97950
  derived and/or modified CDS sequence (opt2) from hemagglutinin__InfluenzaA__ABX58426

SEQ ID NO: 98260 - RNA, 1698 nt, Artificial Sequence; identical to SEQ ID NO: 97950
  derived and/or modified CDS sequence (opt2) from hemagglutinin__InfluenzaA__ABX58437

SEQ ID NO: 98261 - RNA, 1698 nt, Artificial Sequence; identical to SEQ ID NO: 97946
  derived and/or modified CDS sequence (opt2) from hemagglutinin__InfluenzaA__ABX58448

SEQ ID NO: 98262 - RNA, 1698 nt, Artificial Sequence; identical to SEQ ID NO: 97992
  derived and/or modified CDS sequence (opt2) from hemagglutinin__InfluenzaA__ABX58459

SEQ ID NO: 98263 - RNA, 1698 nt, Artificial Sequence; identical to SEQ ID NO: 98091
  derived and/or modified CDS sequence (opt2) from hemagglutinin__InfluenzaA__ABX58470

SEQ ID NO: 98264 - RNA, 1698 nt, Artificial Sequence; identical to SEQ ID NO: 97992
  derived and/or modified CDS sequence (opt2) from hemagglutinin__InfluenzaA__ABX58481

SEQ ID NO: 98265 - RNA, 1698 nt, Artificial Sequence; identical to SEQ ID NO: 97950
  derived and/or modified CDS sequence (opt2) from hemagglutinin__InfluenzaA__ABX58492

SEQ ID NO: 98266 - RNA, 1698 nt, Artificial Sequence; identical to SEQ ID NO: 97966
  derived and/or modified CDS sequence (opt2) from hemagglutinin__InfluenzaA__ABX58503

SEQ ID NO: 98267 - RNA, 1698 nt, Artificial Sequence; identical to SEQ ID NO: 97992
  derived and/or modified CDS sequence (opt2) from hemagglutinin__InfluenzaA__ABX58525

SEQ ID NO: 98268 - RNA, 1698 nt, Artificial Sequence
  derived and/or modified CDS sequence (opt2) from hemagglutinin__InfluenzaA__ABX58536
augaaggucaagcuccucguccuccucugcaccuucaccgccaccuacgccgacaccaucugcaucggcuaccacgccaacaacuccaccgacaccgucgacaccguccucgagaagaacgucaccgucacccacuccgucaaccuccucgaggaccgccacaacggcaagcucugccuccucaagggcaucgccccccuccagcucggcaacugcuccgucgccggcuggauccucggcaaccccgagugcgagcuccucaucuccaaggagcccugguccuacaucgucgagacccccaaccccgagaacggcaccugcuaccccggcuacuucgccgacuacgaggagcuccgcgagcagcucuccuccgucuccuccuucgagcgcuucgagaucuuccccaaggaguccuccuggcccaaccacaccgucaccggcgucuccgccuccugcucccacaacggcaaguccuccuucuaccgcaaccuccucuggcucaccggcaagaacggccucuaccccaaccucucccgcuccuacgccaacaacaaggagaaggagguccucguccucuggggcguccaccacccccccaacaucggcgaccagcgcgcccucuaccacaccgagaacgccuacgucuccgucgucuccucccacuacucccgccgcuucacccccgagaucgccaagcgccccaagguccgcgaccaggagggccgcaucaacuacuacuggacccuccucgagcccggcgacaccaucaucuucgaggccaacggcaaccucaucgccccccgcuucgccuucgcccucucccgcggcuucggcuccggcaucaucaccuccaacgcccccauggacgagugcgacgccaagugccagaccccccagggcgccaucaacuccucccuccccuuccagaacguccaccccgucaccaucggcgagugccccaaguacguccgcuccgccaagcuccgcauggucaccggccuccgcaacauccccuccauccagucccgcggccucuucggcgccaucgccggcuucaucgagggcggcuggaccggcauggucgacggcugguacggcuaccaccaccagaacgagcagggcuccggcuacgccgccgaccagaaguccacccagaacgccaucaacggcaucaccaacaaggucaacuccgucaucgagaagaugaacacccaguucaccgccgucggcaaggaguucaacaagcucgagcgccgcauggagaaccucaacaagaaggucgacgacggcuuccucgacaucuggaccuacaacgccgagcuccucguccuccucgagaacgagcgcacccucgacuuccacgacuccaacgucaagaaccucuacgagaaggucaagucccagcucaagaacaacgccaaggagaucggcaacggcugcuucgaguucuaccacaagugcaacgacgagugcauggaguccgucaagaacggcaccuacgacuaccccaaguacuccgaggaguccaagcucaaccgcgagaagaucgacggcgucaagcucgaguccaugggcgucuaccagauccucgccaucuacuccaccgucgccuccucccucguccuccucgucucccucggcgccaucuccuucuggaugugcuccaacggcucccuccagugccgcaucugcaucuga

SEQ ID NO: 98269 - RNA, 1698 nt, Artificial Sequence
  derived and/or modified CDS sequence (opt2) from hemagglutinin__InfluenzaA__ABX58547
augaaggucaagcuccucauccuccucugcaccuucaccgccaccuacgccgacaccaucugcaucggcuaccacgccaacaacuccaccgacaccgucgacaccguccucgagaagaacgucaccgucacccacuccgucaaccuccucgaggacucccacaacggcaagcucugccuccucaagggcaucgccccccuccagcucggcaacugcuccgucgccggcuggauccucggcaaccccgagugcgagcuccucaucuccaaggaguccugguccuacaucgucgagacccccaaccccgagaacggcaccugcuaccccggcuacuucgccgacuacgaggagcuccgcgagcagcucuccuccgucuccuccuucgagcgcuucgagaucuuccccaaggaguccuccuggcccaaccacaccgucaccggcgucuccgccuccugcucccacaacggcaaguccuccuucuaccgcaaccuccucuggcucaccggcaagaacggccucuaccccaaccucuccaaguccuacgccaacaacaaggagaaggagguccucguccucuggggcguccaccacccccccaacaucggcgaccagcgcgcccucuaccacaccgagaacgccuacgucuccgucgucuccucccacuacucccgccgcuucacccccgagaucgccaagcgccccaagguccgcgaccaggagggccgcaucaacuacuacuggacccuccucgagcccggcgacaccaucaucuucgaggccaacggcaaccucaucgccccccgcuucgccuucgcccucucccgcggcuucggcuccggcaucaucaccuccaacgcccccauggacgagugcgacgccaagugccagaccccccagggcgccaucaacuccucccuccccuuccagaacguccaccccgucaccaucggcgagugccccaaguacguccgcuccaccaagcuccgcauggucaccggccuccgcaacauccccuccauccagacccgcggccucuucggcgccaucgccggcuucaucgagggcggcuggaccggcauggucgacggcugguacggcuaccaccaccagaacgagcagggcuccggcuacgccgccgaccagaaguccacccagaacgccaucaacggcaucaccaacaaggucaacuccgucaucgagaagaugaacacccaguucaccgccgucggcaaggaguucaacaagcucgagcgccgcauggagaaccucaacaagaaggucgacgacggcuuccucgacaucuggaccuacaacgccgagcuccucguccuccucgagaacgagcgcacccucgacuuccacgacuccaacgucaagaaccucuacgagaaggucaagucccagcucaagaacaacgccaaggagaucggcaacggcugcuucgaguucuaccacaagugcaacgacgagugcauggaguccgucaagaacggcaccuacgacuaccccaaguacuccgaggaguccaagcucaaccgcgagaagaucgacggcgucaagcucgaguccaugggcgucuaccagauccucgccaucuacuccaccgucgccuccucccucguccuccucgucucccucggcgccaucuccuucuggaugugcuccaacggcucccuccagugccgcaucugcaucuga

SEQ ID NO: 98270 - RNA, 1698 nt, Artificial Sequence
  derived and/or modified CDS sequence (opt2) from hemagglutinin__InfluenzaA__ABX58558
augaaggucaagcuccucguccuccucugcaccuucaccgccaccuacgccgacaccaucugcaucggcuaccacgccaacaacuccaccgacaccgucgacaccguccucgagaagaacgucaccgucacccacuccgucaaccuccucgaggacucccacaacggcaagcucugccuccucaagggcaucgccccccuccagcucggcaacugcuccgucgccggcuggauccucggcaaccccgagugcgagcuccucaucuccaaggaguccugguccuacaucgucgagacccccaaccccgagaacggcaccugcuaccccggcuacuucgccgacuacgaggagcuccgcgagcagcucuccuccgucuccuccuucgagcgcuucgagaucuuccccaaggaguccuccuggcccaaccacaccgucaccggcgucuccgccuccugcucccacaacggccgcuccuccuucuaccgcaaccuccucuggcucaccggcaagaacggccucuaccccaaccucuccaaguccuacgccaacaacaaggagaaggagguccucguccucuggggcguccaccacccccccaacaucggcgaccagcgcgcccucuaccacaccgagaacgccuacgucuccgucgucuccucccacuacucccgccgcuucacccccgagaucgccaagcgccccaagguccgcgaccaggagggccgcaucaacuacuacuggacccuccucgagcccggcgacaccaucaucuucgaggccaacggcaaccucaucgccccccgcuucgccuucgcccucucccgcggcuucggcuccggcaucaucaccuccaacgcccccauggacaagugcgacgccaagugccagaccccccagggcgccaucaacuccucccuccccuuccagaacguccaccccgucaccaucggcgagugccccaaguacguccgcuccaccaagcuccgcauggucaccggccuccgcaacauccccuccauccagucccgcggccucuucggcgccaucgccggcuucaucgagggcggcuggaccggcauggucgacggcugguacggcuaccaccaccagaacgagcagggcuccggcuacgccgccgaccagaaguccacccagaacgccaucaacggcaucaccaacaaggucaacuccgucaucgagaagaugaacacccaguucaccgccgucggcaaggaguucaacaagcucgagcgccgcauggagaaccucaacaagaaggucgacgacggcuuccucgacaucuggaccuacaacgccgagcuccucguccuccucgagaacgagcgcacccucgacuuccacgacuccaacgucaagaaccucuacgagaaggucaagucccagcucaagaacaacgccaaggagaucggcaacggcugcuucgaguucuaccacaagugcaacgacgagugcauggaguccgucaagaacggcaccuacgacuaccccaaguacuccgaggaguccaagcucaaccgcgagaagaucgacggcgucaagcucgaguccaugggcgucuaccagauccucgccaucuacuccaccgucgccuccucccucguccuccucgucucccucggcgccaucuccuucuggaugugcuccaacggcucccuccagugccgcaucugcaucuga

SEQ ID NO: 98271 - RNA, 1698 nt, Artificial Sequence
  derived and/or modified CDS sequence (opt2) from hemagglutinin__InfluenzaA__ABX58569
augaaggucaagcuccucauccuccucugcaccuucaccgccaccuacgccgacaccaucugcaucggcuaccacgccaacaacuccaccgacaccgucgacaccguccucgagaagaacgucaccgucacccacuccgucaaccuccucgaggacucccacaacggcaagcucugccuccucaagggcaucgccccccuccagcucggcaacugcuccgucgccggcuggauccucggcaaccccgagugcgagcuccucaucuccaaggaguccugguccuacaucgucgagacccccaaccccgagaacggcaccugcuaccccggcuacuucgccgacuacgaggagcuccgcgagcagcucuccuccgucuccuccuucgagcgcuucgagaucuuccccaaggaguccuccuggcccaaccacaccgccaccggcgucuccgccuccugcucccacaacggcaaguccuccuucuaccgcaaccuccucuggcucaccggcaagaacggccucuaccccaaccucuccaaguccuacgccaacaacaaggagaaggagguccucguccucuggggcguccaccacccccccaacaucggcgaccagcgcgcccucuaccacaccgagaacgccuacgucuccgucgucuccucccacuacucccgccgcuucacccccgagaucgccaagcgccccaagguccgcgaccaggagggccgcaucaacuacuacuggacccuccucgagcccggcgacaccaucaucuucgaggccaacggcaaccucaucgccccccgcuucgccuucgcccucucccgcggcuucggcuccggcaucaucaccuccaacgcccccauggacgagugcgacgccaagugccagaccccccagggcgccaucaacuccucccuccccuuccagaacguccaccccgucaccaucggcgagugccccaaguacguccgcuccaccaagcuccgcauggucaccggccuccgcaacauccccuccauccagucccgcggccucuucggcgccaucgccggcuucaucgagggcggcuggaccggcauggucgacggcugguacggcuaccaccaccagaacgagcagggcuccggcuacgccgccgaccagaaguccacccagaacgccaucaacggcaucaccaacaaggucaacuccgucaucgagaagaugaacacccaguucaccgccgucggcaaggaguucaacaagcucgagcgccgcauggagaaccucaacaagaaggucgacgacggcuuccucgacaucuggaccuacaacgccgagcuccucguccuccucgagaacgagcgcacccucgacuuccacgacuccaacgucaagaaccucuacgagaaggucaagucccagcucaagaacaacgccaaggagaucggcaacggcugcuucgaguucuaccacaagugcaacgacgagugcauggaguccgucaagaacggcaccuacgacuaccccaaguacuccgaggaguccaagcucaaccgcgagaagaucgacggcgucaagcucgaguccaugggcgucuaccagauccucgccaucuacuccaccgucgccuccucccucguccuccucgucucccucggcgccaucuccuucuggaugugcuccaacggcucccuccagugccgcaucugcaucuga

SEQ ID NO: 98272 - RNA, 1698 nt, Artificial Sequence; identical to SEQ ID NO: 97946
  derived and/or modified CDS sequence (opt2) from hemagglutinin__InfluenzaA__ABX58580

SEQ ID NO: 98273 - RNA, 1698 nt, Artificial Sequence; identical to SEQ ID NO: 97950
  derived and/or modified CDS sequence (opt2) from hemagglutinin__InfluenzaA__ABX58591

SEQ ID NO: 98274 - RNA, 1698 nt, Artificial Sequence
  derived and/or modified CDS sequence (opt2) from hemagglutinin__InfluenzaA__ABX58602
augaaggucaagcuccucguccuccucugcaccuucaccgccaccuacgccgacaccaucugcaucggcuaccacgccaacaacuccaccgacaccgucgacaccguccucgagaagaacgucaccgucacccacuccgucaaccuccucgaggacucccacaacggcaagcucugccuccucgagggcaucgccccccuccagcucggcaacugcuccgucgccggcuggauccucggcaaccccgagugcgagcuccucaucuccaaggaguccugguccuacaucgucgagacccccaaccccgagaacggcaccugcuaccccggcuacuucgccgacuacgaggagcuccgcgagcagcucuccuccgucuccuccuucgagcgcuucgagaucuuccccaaggaguccuccuggcccaaccacaccgucaccggcgucuccgccuccugcucccacaacggcaaguccuccuucuaccgcaaccuccucuggcucaccggcaagaacggccucuaccccaaccucuccaaguccuacgccaacaacaaggagaaggagguccucguccucuggggcguccaccacccccccaacaucggcgaccagcgcgcccucuaccacaccgagaacgccuacgucuccgucgucuccucccacuacucccgccgcuucacccccgagaucgccaagcgccccaagguccgcgaccaggagggccgcaucaacuacuacuggacccuccucgagccccgcgacaccaucaucuucgaggccaacggcaaccucaucgccccccgcuucgccuucgcccucucccgcggcuucggcuccggcaucaucaccuccaacgcccccaugggcgagugcgacgccaagugccagaccccccagggcgccaucaacuccucccuccccuuccagaacguccaccccgucaccaucggcgagugccccaaguacguccgcuccgccaagcuccgcauggucaccggccuccgcaacauccccuccauccagucccgcggccucuucggcgccaucgccggcuucaucgagggcggcuggaccggcauggucgacggcugguacggcuaccaccaccagaacgagcagggcuccggcuacgccgccgaccagaaguccacccagaacgccaucaacggcaucaccaacaaggucaacuccgucaucgagaagaugaacacccaguucaccgccgucggcaaggaguucaacaagcucgagcgccgcauggagaaccucaacaagaaggucgacgacggcuuccucgacaucuggaccuacaacgccgagcuccucguccuccucgagaacgagcgcacccucgacuuccacgacuccaacgucaagaaccucuacgagaaggucaagucccagcucaagaacaacgccaaggagaucggcaacggcugcuucgaguucuaccacaagugcaacgacgagugcauggaguccgucaagaacggcaccuacgacuaccccaaguacuccgaggaguccaagcucaaccgcgagaagaucgacggcgucaagcucgaguccaugggcgucuaccagauccucgccaucuacuccaccgucgccuccucccucguccuccucgucucccucggcgccaucuccuucuggaugugcuccaacggcucccuccagugccgcaucugcaucuga

SEQ ID NO: 98275 - RNA, 1698 nt, Artificial Sequence; identical to SEQ ID NO: 97983
  derived and/or modified CDS sequence (opt2) from hemagglutinin__InfluenzaA__ABX58613

SEQ ID NO: 98276 - RNA, 1698 nt, Artificial Sequence; identical to SEQ ID NO: 97950
  derived and/or modified CDS sequence (opt2) from hemagglutinin__InfluenzaA__ABX58624

SEQ ID NO: 98277 - RNA, 1698 nt, Artificial Sequence
  derived and/or modified CDS sequence (opt2) from hemagglutinin__InfluenzaA__ABX58635
augaaggucaagcuccucguccuccucugcaccuucaccgccaccuacgccgacaccaucugcaucggcuaccacgccaacaacuccaccgacaccgucgacaccguccucgagaagaacgucaccgucacccacuccgucaaccuccucgaggacucccacaacggcaagcucugccuccucaagggcaucgccccccuccagcucggcaacugcuccgucgccggcuggauccucggcaaccccgagugcgagcuccucaucuccaaggaguccugguccuacaucgucgagacccccaaccccgagaacggcaccugcuaccccggcuacuucgccgacuacgaggagcuccgcgagcagcucuccuccgucuccuccuucgagcgcuucgagaucuuccccaaggaguccuccuggcccaaccacaccgucaccggcgucuccgccuccugcucccacaacggccgcuccuccuucuaccgcaaccuccucuggcucaccggcaagaacggccucuaccccucccucuccaaguccuacgccaacaacaaggagaaggagguccucguccucuggggcguccaccacccccccaacaucggcgaccagcgcgcccucuaccacaccgagaacgccuacgucuccgucgucuccucccacuacucccgccgcuucacccccgagaucgccaagcgccccaagguccgcgaccaggagggccgcaucaacuacuacuggacccuccucgagcccggcgacaccaucaucuucgaggccaacggcaaccucaucgccccccgcuucgccuucgcccucucccgcggcuucggcuccggcaucaucaccuccaacgcccccauggacgagugcgacgccaagugccagaccccccagggcgccaucaacuccucccuccccuuccagaacguccaccccgucaccaucggcgagugccccaaguacguccgcuccaccaagcuccgcauggucaccggccuccgcaacauccccuccauccagucccgcggccucuucggcgccaucgccggcuucaucgagggcggcuggaccggcauggucgacggcugguacggcuaccaccaccagaacgagcagggcuccggcuacgccgccgaccagaaguccacccagaacgccaucaacggcaucaccaacaaggucaacuccgucaucgagaagaugaacacccaguucaccgccgucggcaaggaguucaacaagcucgagcgccgcauggagaaccucaacaagaaggucgacgacggcuuccucgacaucuggaccuacaacgccgagcuccucguccuccucgagaacgagcgcacccucgacuuccacgacuccaacgucaagaaccucuacgagaaggucaagucccagcucaagaacaacgccaaggagaucggcaacggcugcuucgaguucuaccacaagugcaacgacgagugcauggaguccgucaagaacggcaccuacgacuaccccaaguacuccgaggaguccaagcucaaccgcgagaagaucgacggcgucaagcucgaguccaugggcgucuaccagauccucgccaucuacuccaccgucgccuccucccucguccuccucgucucccucggcgccaucuccuucuggaugugcuccaacggcucccuccagugccgcaucugcaucuga

SEQ ID NO: 98278 - RNA, 1698 nt, Artificial Sequence; identical to SEQ ID NO: 97946
  derived and/or modified CDS sequence (opt2) from hemagglutinin__InfluenzaA__ABX58679

SEQ ID NO: 98279 - RNA, 1698 nt, Artificial Sequence; identical to SEQ ID NO: 97992
  derived and/or modified CDS sequence (opt2) from hemagglutinin__InfluenzaA__ABX58701

SEQ ID NO: 98280 - RNA, 1698 nt, Artificial Sequence; identical to SEQ ID NO: 98050
  derived and/or modified CDS sequence (opt2) from hemagglutinin__InfluenzaA__ABX58712

SEQ ID NO: 98281 - RNA, 1704 nt, Artificial Sequence
  derived and/or modified CDS sequence (opt2) from hemagglutinin__InfluenzaA__ABY19417
auggagaagaucguccuccuccucgccaucaucucccucgucaaguccgaccagaucugcaucggcuaccacgccaacaacuccaccgagcaggucgacaccaucauggagaagaacgucaccgucacccacgcccaggacauccucgagaagacccacaacggcaagcucugcgaccucgacggcgucaagccccucauccuccgcgacugcuccgucgccggcuggcuccucggcaaccccaugugcgacgaguucaucaacguccccgagugguccuacaucgucgagaaggccaaccccgccaacgaccucugcuaccccggcaacuucaacgacuacgaggagcucaagcaccuccucucccgcaucaaccacuucgagaagauccagaucauccccaaguccuccugguccgaccacgaggccuccuccggcgucuccuccgccugccccuaccagggcguccccuccuucuuccgcaacgucgucuggcucaucaagaagaacaacaccuaccccaccaucaagcgcuccuacaacaacaccaaccaggaggaccuccucauccucuggggcauccaccacuccaacgacgccgccgagcagaccaagcucuaccagaaccccaccaccuacaucuccgucggcaccuccacccucaaccagcgccucguccccaagaucgccacccgcuccaaggucaacggccaguccggccgcauggacuucuucuggaccauccucaagcccaacgacgccaucaacuucgaguccaacggcaacuucaucgcccccgaguacgccuacaagaucgucaagaagggcgacuccgccaucaugaaguccgaggucgaguacggcaacugcaacaccaagugccagacccccaucggcgccaucaacuccuccaugcccuuccacaacauccacccccucaccaucggcgagugccccaaguacgucaaguccaacaagcucguccucgccaccggccuccgcaacuccccccuccgcgagcgccgccgcaagcgcggccucuucggcgccaucgccggcuucaucgagggcggcuggcagggcauggucgacggcugguacggcuaccaccacuccaacgagcagggcuccggcuacgccgccgacaaggaguccacccagaaggccaucgacggcgucaccaacaaggucaacuccaucaucgacaagaugaacacccaguucgaggccgucggccgcgaguucaacaaccucgagcgccgcaucgagaaccucaacaagaagauggaggacggcuuccucgacgucuggaccuacaacgccgagcuccucguccucauggagaacgagcgcacccucgacuuccacgacuccaacgucaagaaccucuacgacaagguccgccuccagcuccgcgacaacgccaaggagcucggcaacggcugcuucaaguucuaccacaagugcgacaacgagugcauggaguccguccgcaacggcaccuacgacuacccccaguacuccgaggaggcccgccucaagcgcgaggagaucuccggcgucaagcucgaguccaucggcaccuaccagauccucuccaucuacuccaccgucgccuccucccucgcccucgccaucauggucgccggccucucccucuggaugugcuccaacggcucccuccagugccgcauccgcaucuga

SEQ ID NO: 98282 - RNA, 1704 nt, Artificial Sequence
  derived and/or modified CDS sequence (opt2) from hemagglutinin__InfluenzaA__ABY19418
auggagaagaucguccuccuccucgccaucaucucccucgucaaguccgaccagaucugcaucggcuaccacgccaacaacuccaccgagcaggucgacaccaucauggagaagaacgucaccgucacccacgcccaggacauccucgagaagacccacaacggcaagcucugcgaccucgacggcgucaagccccucauccuccgcgacugcuccgucgccggcuggcuccucggcaaccccaugugcgacgaguucaucaacguccccgagugguccuacaucgucgagaaggccaaccccgccaacgaccucugcuaccccggcgacuucaacgacuacgaggagcucaagcaccuccucucccgcaucaaccacuucgagaagauccagaucauccccaaguccuccugguccgaccacgaggccuccuccggcgucuccuccgccugccccuaccagggcguccccuccuucuuccgcaacgucgucuggcucaucaagaagaacaacaccuaccccaccaucaagcgcuccuacaacaacaccaaccaggaggaccuccucauccucuggggcauccaccacuccaacgacgccgccgagcagaccaagcucuaccagaaccccaccaccuacaucuccgucggcaccuccacccucaaccagcgccucguccccaagaucgccacccgcuccaaggucaacggccaguccggccgcauggacuucuucuggaccauccucaagcccaacgacgccaucaacuucgaguccaacggcaacuucaucgcccccgaguacgccuacaagaucgucaagaagggcgacuccgccaucaugaaguccgaggucgaguacggcaacugcaacaccaagugccagacccccaucggcgccaucaacuccuccaugcccuuccacaacauccacccccucaccaucggcgagugccccaaguacgucaaguccaacaagcucguccucgccaccggccuccgcaacuccccccuccgcgagcgccgccgcaagcgcggccucuucggcgccaucgccggcuucaucgagggcggcuggcagggcauggucgacggcugguacggcuuccaccacuccaacgagcagggcuccggcuacgccgccgacaaggaguccacccagaaggccaucgacggcgucaccaacaaggucaacuccaucaucgacaagaugaacacccaguucgaggccgucggccgcgaguucaacaaccucgagcgccgcaucgagaaccucaacaagaagauggaggacggcuuccucgacgucuggaccuacaacgccgagcuccucguccucauggagaacgagcgcacccucgacuuccacgacuccaacgucaagaaccucuacgacaagguccgccuccagcuccgcgacaacgccaaggagcucggcaacggcugcuucgaguucuaccacaagugcgacaacgagugcauggaguccguccgcaacggcaccuacgacuacccccaguacuccgaggaggcccgccucaagcgcgaggagaucuccggcgucaagcucgaguccaucggcaccuaccagauccucuccaucuacuccaccgucgccuccucccucgcccucgccaucauggucgccggccucucccucuggaugugcuccaacggcucccuccagugccgcaucugcaucuga

SEQ ID NO: 98283 - RNA, 1704 nt, Artificial Sequence
  derived and/or modified CDS sequence (opt2) from hemagglutinin__InfluenzaA__ABY19419
auggagaagaucguccuccuccucgccaucaucucccucgucaaguccgaccagaucugcaucggcuaccacgccaacaacuccaccgagcaggucgacaccaucauggagaagaacgucaccgucacccacgcccaggacauccucgagaagacccacaacggcaagcucugcgaccucgacggcgucaagccccucauccuccgcgacugcuccgucgccggcuggcuccucggcaaccccaugugcgacgaguucaucaacguccccgagugguccuacaucgucgagaaggccaaccccgccaacgaccucugcuaccccggcaacuucaacgacuacgaggagcucaagcaccuccucucccgcaucaaccacuucgagaagauccagaucauccccaaguccuccugguccgaccacgaggccuccuccggcgucuccuccgccugccccuaccagggcguccccuccuucuuccgcaacgucgucuggcucaucaagaagaacaacaccuaccccaccaucaagcgcuccuacaacaacaccaaccaggaggaccuccucauccucuggggcauccaccacuccaacgacgccgccgagcagaccaagcucuaccagaaccccaccaccuacaucuccgucggcaccuccacccucaaccagcgccucguccccaagaucgccacccgcuccaaggucaacggccaguccggccgcauggacuucuucuggaccauccucaagcccaacgacgccaucaacuucgaguccaacggcaacuucaucgcccccgaguacgccuacaagaucgucaagaagggcgacuccgccaucaugaaguccgaggucgaguacggcaacugcaacaccaagugccagacccccaucggcgccaucaacuccuccaugcccuuccacaacauccacccccucaccaucggcgagugccccaaguacgucaaguccaacaagcucguccucgccaccggccuccgcaacuccccccuccgcgagcgccgccgcaagcgcggccucuucggcgccaucgccggcuucaucgagggcggcuggcagggcauggucgacggcugguacggcuaccaccacuccaacgagcagggcuccggcuacgccgccgacaaggaguccacccagaaggccaucgacggcgucaccaacaaggucaacuccaucaucgacaagaugaacacccaguucgaggccgucggccgcgaguucaacaaccucgagcgccgcaucgagaaccucaacaagaagauggaggacggcuuccucgacgucuggaccuacaacgccgagcuccucguccucauggagaacgagcgcacccucgacuuccacgacuccaacgucaagaaccucuacgacaagguccgccuccagcuccgcgacaacgccaaggagcucggcaacggcugcuucgaguucuaccacaagugcgacaacgagugcauggaguccguccgcaacggcaccuacgacuacccccaguacuccgaggaggcccgccucaagcgcgaggagaucuccggcgucaagcucgaguccaucggcaccuaccagauccucuccaucuacuccaccgucgccuccucccucgcccucgccaucauggucgccggccucucccucuggaugugcuccaacggcucccuccagugccgcaucugcaucuga

SEQ ID NO: 98284 - RNA, 1698 nt, Artificial Sequence; identical to SEQ ID NO: 98091
  derived and/or modified CDS sequence (opt2) from hemagglutinin__InfluenzaA__ABY51017

SEQ ID NO: 98285 - RNA, 1701 nt, Artificial Sequence; identical to SEQ ID NO: 97964
  derived and/or modified CDS sequence (opt2) from hemagglutinin__InfluenzaA__ABY51028

SEQ ID NO: 98286 - RNA, 1698 nt, Artificial Sequence
  derived and/or modified CDS sequence (opt2) from hemagglutinin__InfluenzaA__ABY51039
augaaggucaagcuccucguccuccucugcaccuucaccgccaccaacgccgacaccaucugcaucggcuaccacgccaacaacuccaccgacaccgucgacaccguccucgagaagaacgucaccgucacccacuccgucaaccuccucgagaacucccacaacggcaagcucugccuccucaagggcaucgccccccuccagcucggcaacugcuccgucgccggcuggauccucggcaaccccgagugcgagcuccucaucuccaaggaguccugguccuacaucgucgagacccccaaccccgagaacggcaccugcuaccccggccacuucgccgacuacgaggagcuccgcgagcagcucuccuccgucuccuccuucgagcgcuucgagaucuuccccaaggaguccuccuggcccaaccacaccgucaccggcgucuccgccuccugcucccacaacggcgaguccuccuucuaccgcaaccuccucuggcucaccggcaagaacggccucuaccccaaccucuccaaguccuacgccaacaacaaggagaaggagguccucguccucuggggcguccaccacccccccaacaucggcgaccagaaggcccucuaccacaccgagaacgccuacgucuccgucgucuccucccacuacucccgcaaguucacccccgagaucgccaagcgccccaagguccgcgaccaggagggccgcaucaacuacuacuggacccuccucgagcccggcgacaccaucaucuucgaggccaacggcaaccucaucgccccccgcuacgccuucgcccucucccgcggcuucggcuccggcaucaucaacuccaacgcccccauggacaagugcgacgccaagugccagaccccccagggcgccaucaacuccucccuccccuuccagaacguccaccccgucaccaucggcgagugccccaaguacguccgcuccgccaagcuccgcauggucaccggccuccgcaacauccccuccauccagucccgcggccucuucggcgccaucgccggcuucaucgagggcggcuggaccggcauggucgacggcugguacggcuaccaccaccagaacgagcagggcuccggcuacgccgccgaccagaaguccacccagaacgccaucaacggcaucaccaacaaggucaacuccgucaucgagaagaugaacacccaguucaccgccgucggcaaggaguucaacaagcucgagcgccgcauggagaaccucaacaagaaggucgacgacggcuucaucgacaucuggaccuacaacgccgagcuccucguccuccucgagaacgagcgcacccucgacuuccacgacuccaacgucaagaaccucuacgagaaggucaagggccagcucaagaacaacgccaaggagaucggcaacggcugcuucgaguucuaccacaagugcaacgacgagugcauggaguccgucaagaacggcaccuacgacuaccccaaguacuccgaggaguccaagcucaaccgcgagaagaucgacggcgucaagcucgaguccaugggcgucuaccagauccucgccaucuacuccaccgucgccuccucccucguccuccucgucucccucggcgccaucuccuucuggaugugcuccaacggcucccuccagugccgcaucugcaucuga

SEQ ID NO: 98287 - RNA, 1698 nt, Artificial Sequence
  derived and/or modified CDS sequence (opt2) from hemagglutinin__InfluenzaA__ABY51050
augaaggucaagcuccucguccuccucugcaccuucaccgccaccuacgccgacaccaucugcaucggcuaccacgccaacaacuccaccgacaccgucgacaccguccucgagaagaacgucaccgucacccacuccgucaaccuccucgagaacucccacaacggcaagcucugccuccucaagggcaucgccccccuccagcucggcaacugcuccgucgccggcuggauccucggcaaccccgagugcgagcuccucaucuccaaggaguccugguccuacaucgucgagaagcccaaccccgagaacggcaccugcuaccccggccacuucgccgacuacgaggagcuccgcgagcagcucuccuccgucuccuccuucgagcgcuucgagaucuuccccaaggaguccuccuggcccaaccacaccgucaccggcgucuccgccuccugcucccacaacggcgaguccuccuucuaccgcaaccuccucuggcucaccggcaagaacggccucuaccccaaccucuccaaguccuacgccaacaacaaggagaaggagguccucguccucuggggcguccaccacccccccaacaucggcgaccagaaggcccucuaccacaccgagaacgccuacgucuccgucgucuccucccacuacucccgcaaguucacccccgagaucgccaagcgccccaagguccgcgaccaggagggccgcaucaacuacuacuggacccuccucgagcccggcgacaccaucaucuucgaggccaacggcaaccucaucgccccccgcuacgccuucgcccucucccgcggcuucggcuccggcaucaucaacuccaacgcccccauggacaagugcgacuccaagugccagaccccccagggcgccaucaacuccucccuccccuuccagaacguccaccccgucaccaucggcgagugccccaaguacguccgcuccgccaagcuccgcauggucaccggccuccgcaacauccccuccauccagucccgcggccucuucggcgccaucgccggcuucaucgagggcggcuggaccggcauggucgacggcugguacggcuaccaccaccagaacgagcagggcuccggcuacgccgccgaccagaaguccacccagaacgccaucaacggcaucaccaacaaggucaacuccgucaucgagaagaugaacacccaguucaccgccgucggcaaggaguucaacaagcucgagcgccgcauggagaaccucaacaagaaggucgacgacggcuucaucgacaucuggaccuacaacgccgagcuccucguccuccucgagaacgagcgcacccucgacuuccacgacuccaacgucaagaaccucuacgagaaggucaagucccagcucaagaacaacgccaaggagaucggcaacggcugcuucgaguucuaccacaagugcaacgacgagugcauggaguccgucaagaacggcaccuacgacuaccccaaguacuccgaggaguccaagcucaaccgcgagaagaucgacggcgucaagcucgaguccaugggcgucuaccagauccucgccaucuacuccaccgucgccuccucccucguccuccucgucucccucggcgccaucuccuucuggaugugcuccaacggcucccuccagugccgcaucugcaucuga

SEQ ID NO: 98288 - RNA, 1698 nt, Artificial Sequence; identical to SEQ ID NO: 98050
  derived and/or modified CDS sequence (opt2) from hemagglutinin__InfluenzaA__ABY51061

SEQ ID NO: 98289 - RNA, 1698 nt, Artificial Sequence
  derived and/or modified CDS sequence (opt2) from hemagglutinin__InfluenzaA__ABY51072
augaaggucaagcuccucauccuccucugcaccuucaccgccaccuacgccgacaccaucugcaucggcuaccacgccaacaacuccaccgacaccgucgacaccguccucgagaagaacgucaccgucacccacuccgucaaccuccucgaggacucccacaacggcaagcucugccuccucaagggcaucgccccccuccagcucggcaacugcuccgucgccggcuggauccucggcaaccccgagugcgagcuccucaucuccaaggaguccugguccuacaucgucgagacccccaaccccgagaacggcaccugcuaccccggcuacuucgccgacuacgaggagcuccgcgagcagcucuccuccgucuccuccuucgagcgcuucgagaucuuccccaaggaguccuccuggcccaaccacaccgucaccggcgucuccgccuccugcucccacaacggcaaguccuccuucuaccgcaaccuccucuggcucaccggcaagaacggccucuaccccaaccucuccaaguccuacgccaacaacaaggagaaggagguccucguccucuggggcguccaccacccccccaacaucggcgaccagcgcgcccucuaccacaccgagaacgccuacgucuccgucgucuccucccacuacucccgccgcuucacccccgagaucgccaagcgccccaagguccgcgaccaggagggccgcaucaacuacuacuggacccuccucgagcccggcgacaccaucaucuucgaggccaacggcaaccucaucgccccccgcuucgccuucgcccucucccgcggcuucggcuccggcaucaucaccuccaacgcccccauggacgagugcgacgccaagugccagaccccccagggcgccaucaacuccucccuccccuuccagaacguccaccccgucaccaucggcgagugccccaaguacguccgcuccaccaagcuccgcauggucaccggccuccgcaacauccccuccauccagucccgcggccucuucggcgccaucgccggcuucaucgagggcggcuggaccggcauggucgacggcugguacggcuaccaccaccagaacgagcagggcuccggcuacgccgccgaccagaaguccacccagaacgccaucaacggcaucaccaacaaggucaacuccgucaucgagaagaugaacacccaguucaccgccgucggcaaggccuucaacaagcucgagcgccgcauggagaaccucaacaagaaggucgacgacggcuuccucgacaucuggaccuacaacgccgagcuccucguccuccucgagaacgagcgcacccucgacuuccacgacuccaacgucaagaaccucuacgagaaggucaagucccagcucaagaacaacgccaaggagaucggcaacggcugcuucgaguucuaccacaagugcaacgacgagugcauggaguccgucaagaacggcaccuacgacuaccccaaguacuccgaggaguccaagcucaaccgcgagaagaucgacggcgucaagcucgaguccaugggcgucuaccagauccucgccaucuacuccaccgucgccuccucccucguccuccucgucucccucggcgccaucuccuucuggaugugcuccaacggcucccuccagugccgcaucugcaucuga

SEQ ID NO: 98290 - RNA, 1698 nt, Artificial Sequence; identical to SEQ ID NO: 97992
  derived and/or modified CDS sequence (opt2) from hemagglutinin__InfluenzaA__ABY51083

SEQ ID NO: 98291 - RNA, 1698 nt, Artificial Sequence; identical to SEQ ID NO: 97950
  derived and/or modified CDS sequence (opt2) from hemagglutinin__InfluenzaA__ABY51094

SEQ ID NO: 98292 - RNA, 1698 nt, Artificial Sequence; identical to SEQ ID NO: 98091
  derived and/or modified CDS sequence (opt2) from hemagglutinin__InfluenzaA__ABY51105

SEQ ID NO: 98293 - RNA, 1698 nt, Artificial Sequence; identical to SEQ ID NO: 97950
  derived and/or modified CDS sequence (opt2) from hemagglutinin__InfluenzaA__ABY51116

SEQ ID NO: 98294 - RNA, 1701 nt, Artificial Sequence
  derived and/or modified CDS sequence (opt2) from hemagglutinin__InfluenzaA__ABY51127
augaagaccaucaucgcccucuccuacauccucugcauggucuucgcccagaagcuccccggcaacgacaacuccaccgccacccucugccucggccaccacgccguccccaacggcaccaucgucaagaccaucaccaacgaccagaucgaggucaccaacgccaccgagcucguccaguccuccuccaccggcgagaucugcgacuccccccaccagauccucgacggcgagaacugcacccucaucgacgcccuccucggcgacccccagugcgacggcuuccagaacaagaagugggaccucuucgucgagcgcuccaaggccuacuccaacugcuaccccuacgacguccccgacuacgccucccuccgcucccucgucgccuccuccggcacccucgaguucaacaacgaguccuucaacuggaccggcgucacccagaacggcaccuccuccgccugcauccgccgcuccaacaacuccuucuucucccgccucaacuggcucacccaccucaaguucaaguaccccgcccucaacgucaccaugcccaacaacgagaaguucgacaagcucuacaucuggggcguccaccaccccggcaccgacaacgaccaggucuuccucuacgcccaggccuccggccgcaucaccgucuccaccaagcgcucccagcagaccgucauccccaacaucggcucccgcccccgcguccgcaacauccccucccgcaucuccaucuacuggaccaucgucaagcccggcgacauccuccucaucaacuccaccggcaaccucaucgccccccgcggcuacuucaagauccgcuccggcaaguccuccaucaugcgcuccgacgcccccaucggcaagugcaacuccgagugcaucacccccaacggcuccauccccaacgacaagcccuuccagaacgucaaccgcaucaccuacggcgccugcccccgcuacgucaagcagaacacccucaagcucgccaccggcaugcgcaacguccccgagaagcagacccgcggcaucuucggcgccaucgccggcuucaucgagaacggcugggagggcauggucgacggcugguacggcuuccgccaccagaacuccgagggcaucggccaggccgccgaccucaaguccacccaggccgccaucgaccagaucaacggcaagcucaaccgccucaucggcaagaccaacgagaaguuccaccagaucgagaaggaguucuccgaggucgagggccgcauccaggaccucgagaaguacgucgaggacaccaagaucgaccucugguccuacaacgccgagcuccucgucgcccucgagaaccagcacaccaucgaccucaccgacuccgagaugaacaagcucuucgagaagaccaagaagcagcuccgcgagaacgccgaggacaugggcaacggcugcuucaagaucuaccacaagugcgacaacgccugcaucggcuccauccgcaacggcaccuacgaccacgacgucuaccgcgacgaggcccucaacaaccgcuuccagaucaagggcgucgagcucaaguccggcuacaaggacuggauccucuggaucuccuucgccaucuccugcuuccuccucugcgucgcccuccucggcuucaucaugugggccugccagaagggcaacauccgcugcaacaucugcaucuga

SEQ ID NO: 98295 - RNA, 1698 nt, Artificial Sequence
  derived and/or modified CDS sequence (opt2) from hemagglutinin__InfluenzaA__ABY51138
augaaggucaagcuccucguccuccucugcaccuucaccgccaccuacgccgacaccaucugcaucggcuaccacgccaacaacuccaccgacaccgucgacaccguccucgagaagaacgucaccgucacccacuccgucaaccuccucgaggaccgccacaacggcaagcucugccuccucaagggcaucgccccccuccagcucggcaacugcuccgucgccggcuggauccucggcaaccccgagugcgagcuccucaucuccaaggaguccugguccuacaucgucgagacccccaaccccgagaacggcaccugcuaccccggcuacuucgccgacuacgaggagcuccgcgagcagcucuccuccgucuccuccuucgagcgcuucgagaucuuccccaaggaguccuccuggcccaaccacaccgucaccggcgucuccgccuccugcucccacaacggcaaguccuccuucuaccgcaaccuccucuggcucaccggcaagaacggccucuaccccaaccucucccgcuccuacgccaacaacaaggagaaggagguccucguccucuggggcguccaccacccccccaacaucggcgaccagcgcgcccucuaccacaccgagaacgccuacgucuccgucgucuccucccacuacucccgccgcuucacccccgagaucgccaagcgccccaagguccgcgaccaggagggccgcaucaacuacuacuggacccuccucgagcccggcgacaccaucaucuucgaggccaacggcaaccucaucgccccccgcuucgccuucgcccucucccgcggcuucggcuccggcaucaucaccuccaacgcccccauggacgagugcgacgccaagugccagaccccccagggcgccaucaacuccucccuccccuuccagaacguccaccccgucaccaucggcgagugccccaaguacguccgcuccgccaagcuccgcauggucaccggccuccgcaacauccccuccauccagucccgcggccucuucggcgccaucgccggcuucaucgagggcggcuggaccggcauggucgacggcugguacggcuaccaccaccagaacgagcagggcuccggcuacgccgccgaccagaaguccacccagaacgccaucaacggcaucaccaacaaggucaacuccgucaucgagaagaugaacacccaguucaccgccgucggcaaggaguucaacaagcucgagcgccgcauggagaaccucaacaagaaggucgacgacggcuuccucgacaucuggaccuacaacgccgagcuccucguccuccucgagaacgagcgcacccucgacuuccacgacuccaacgucaagaaccucuacgagaaggucaagauccagcucaagaacaacgccaaggagaucggcaacggcugcuucgaguucuaccacaagugcaacgacgagugcauggaguccgucaagaacggcaccuacgacuaccccaaguacuccgaggaguccaagcucaaccgcgagaagaucgacggcgucaagcucgaguccaugggcgucuaccagauccucgccaucuacuccaccgucgccuccucccucguccuccucgucucccucggcgccaucuccuucuggaugugcuccaacggcucccuccagugccgcaucugcaucuga

SEQ ID NO: 98296 - RNA, 1698 nt, Artificial Sequence; identical to SEQ ID NO: 97950
  derived and/or modified CDS sequence (opt2) from hemagglutinin__InfluenzaA__ABY51149

SEQ ID NO: 98297 - RNA, 1698 nt, Artificial Sequence
  derived and/or modified CDS sequence (opt2) from hemagglutinin__InfluenzaA__ABY51160
augaaggucaagcuccucguccuccucugcaccuucaccgccaccuacgccgacaccaucugcaucggcuaccacgccaacaacuccaccgacaccgucgacaccguccucgagaagaacgucaccgucacccacuccgucaaccuccucgaggaccgccacaacggcaagcucugccuccucaagggcaucgccccccuccagcucggcaacugcuccgucgccggcuggauccucggcaaccccgagugcgagcuccucaucuccaaggaguccugguccuacaucgucgagacccccaaccccgagaacggcaccugcuaccccggcuacuucgccgacuacgaggagcuccgcgagcagcucuccuccgucuccuccuucgagcgcuucgagaucuuccccaaggaguccuccuggcccaaccacaccgucaccggcgucuccgccuccugcucccacaacggcaaguccuccuucuaccgcaaccuccucuggcucaccggcaagaacggccucuaccccaaccucuccaaguccuacgccaacaacaaggagaaggagguccucguccucuggggcguccaccacccccccaacaucggcgaccagcgcgcccucuaccacaccgagaacgccuacgucuccgucgucuccucccacuacucccgccgcuucacccccgagaucgccaagcgccccaagguccgcgaccaggagggccgcaucaacuacuacuggacccuccucgagcccggcgacaccaucaucuucgaggccaacggcaaccucaucgccccccgcuucgccuucgcccucucccgcggcuucggcuccggcaucaucaccuccaacgcccccauggacaagugcgacgccaagugccagaccccccagggcgccaucaacuccucccuccccuuccagaacguccaccccgucaccaucggcgagugccccaaguacguccgcuccgccaagcuccgcauggucaccggccuccgcaacauccccuccauccagucccgcggccucuucggcgccaucgccggcuucaucgagggcggcuggaccggcaugaucgacggcugguacggcuaccaccaccagaacgagcagggcuccggcuacgccgccgaccagaaguccacccagaacgccaucaacggcaucaccaacaaggucaacuccgucaucgagaagaugaacacccaguucaccgccgucggcaaggaguucaacaagcucgagcgccgcauggagaaccucaacaagaaggucgacgacggcuuccucgacaucuggaccuacaacgccgagcuccucguccuccucgagaacgagcgcacccucgacuuccacgacuccaacgucaagaaccucuacgagaaggucaagucccagcucaagaacaacgccaaggagaucggcaacggcugcuucgaguucuaccacaagugcaacgacgagugcauggaguccgucaagaacggcaccuacgacuaccccaaguacuccgaggaguccaagcucaaccgcgagaagaucgacggcgucaagcucgaguccaugggcgucuaccagauccucgccaucuacuccaccgucgccuccucccucguccuccucgucucccucggcgccaucuccuucuggaugugcuccaacggcucccuccagugccgcaucugcaucuga

SEQ ID NO: 98298 - RNA, 1698 nt, Artificial Sequence
  derived and/or modified CDS sequence (opt2) from hemagglutinin__InfluenzaA__ABY51171
augaaggucaagcuccucguccuccucugcaccuucaccgccaccuacgccgacaccaucugcaucggcuaccacgccaacaacuccaccgacaccgucgacaccguccucgagaagaacgucaccgucacccacuccgucaaccuccucgaggacucccacaacggcaagcucugccuccucaagggcaucgccccccuccagcucggcaacugcuccgucgccggcuggauccucggcaaccccgagugcgagcuccucaucuccaaggaguccugguccuacaucgucgagacccccaaccccgagaacggcaccugcuaccccggcuacuucgccgacuacgaggagcuccgcgagcagcucuccuccgucuccuccuucgagcgcuucgagaucuuccccaaggaguccuccuggcccaaccacaccgucaccggcgucuccgccuccugcucccacaacggcaaguccuccuucuaccgcaaccuccucuggcucaccggcaagaacggccucuaccccaaccucuccaaguccuacgccaacaacaaggagaaggagguccucguccucuggggcguccaccacccccccaacaucggcgaccagcgcgcccucuaccacaccgagaacgccuacgucuccgucgucuccucccacuacucccgccgcuucacccccgagaucgccaagcgccccaagguccgcgaccaggagggccgcaucaacuacuacuggacccuccucgagcccggcgacaccaucaucuucgaggccaacggcaaccucaucgccccccgcuucgccuucgcccucucccgcggcuucggcuccggcaucaucaccuccaacgcccccaugggcgagugcgacgccaagugccagaccccccagggcgccaucaacuccucccuccccuuccagaacguccaccccgucaccaucggcgagugccccaaguacguccgcuccgccaagcuccgcauggucaccggccuccgcaacauccccuccauccagucccgcggccucuucggcgccaucgccggcuucaucgagggcggcuggaccggcauggucgacggcugguacggcuaccaccaccagaacgagcagggcuccggcuacgccgccgaccagaaguccacccagaacgccaucaacggcaucaccaacaaggucaacuccgucaucgagaagaugaacacccaguucaccgccgucggcaaggaguucaacaagcucgagcgccgcauggagaaccucaacaagaaggucgacgacggcuuccucgacaucuggaccuacaacgccgagcuccucguccuccucgagaacgagcgcacccucgacuuccacgacuccaacgucaagaaccucuacgagaaggucaagucccagcucaagaacaacgccaaggagaucggcaacggcugcuucgaguucuaccacaagugcaacgacgagugcauggaguccgucaagaacggcaccuacgacuaccagaaguacuccgaggaguccaagcucaaccgcgagaagaucgacggcgucaagcucgaguccaugggcgucuaccagauccucgccaucuacuccaccgucgccuccucccucguccuccucgucucccucggcgccaucuccuucuggaugugcuccaacggcucccuccagugccgcaucugcaucuga

SEQ ID NO: 98299 - RNA, 1698 nt, Artificial Sequence; identical to SEQ ID NO: 97946
  derived and/or modified CDS sequence (opt2) from hemagglutinin__InfluenzaA__ABY51182

SEQ ID NO: 98300 - RNA, 1698 nt, Artificial Sequence; identical to SEQ ID NO: 97966
  derived and/or modified CDS sequence (opt2) from hemagglutinin__InfluenzaA__ABY51193

SEQ ID NO: 98301 - RNA, 1698 nt, Artificial Sequence; identical to SEQ ID NO: 97950
  derived and/or modified CDS sequence (opt2) from hemagglutinin__InfluenzaA__ABY51237

SEQ ID NO: 98302 - RNA, 1698 nt, Artificial Sequence; identical to SEQ ID NO: 97966
  derived and/or modified CDS sequence (opt2) from hemagglutinin__InfluenzaA__ABY51248

SEQ ID NO: 98303 - RNA, 1698 nt, Artificial Sequence; identical to SEQ ID NO: 97946
  derived and/or modified CDS sequence (opt2) from hemagglutinin__InfluenzaA__ABY51259

SEQ ID NO: 98304 - RNA, 1701 nt, Artificial Sequence; identical to SEQ ID NO: 98023
  derived and/or modified CDS sequence (opt2) from hemagglutinin__InfluenzaA__ABY51270

SEQ ID NO: 98305 - RNA, 1707 nt, Artificial Sequence
  derived and/or modified CDS sequence (opt2) from hemagglutinin__InfluenzaA__ABY76282
auggagaagaucguccuccuccucgccaucgucucccucgucaaguccgaccagaucugcaucggcuaccacgccaacaacuccaccgagcacgucgacaccaucauggagaagaacgucaccgucacccacgcccaggacauccucgagaaggcccacaacggccgccucugcgaccucgacggcgucaagccccucauccuccgcgacugcuccgucgccggcuggcuccucggcaaccccaugugcgacgaguuccucaacguccccgagugguccuacaucgucgagaagaacaaccccgccaacgaccucugcuaccccggcaacuucaacgacuacgaggagcucaagcaccuccucucccgcaucaaccacuucgagaagauccagaucauccccaaguccuccugguccgaccacgaggccuccuccggcgucuccuccgccugccccuaccagggccgcuccuccuucuuccgcaacgucgucuggcucaucaagaagaacgacgccuaccccaccaucaagcgcuccuacaacaacaccaaccaggaggaccuccucguccucuggggcauccaccaccccaacgacgccgccgagcagacccgccucuaccagaaccccaccaccuacaucuccgucggcaccuccacccucaaccagcgccucguccccaagaucgccacccgcuccaaggucaacggccaguccggccgcauggaguucuucuggaccauccucaagcccaacgacgccaucaacuucgaguccaacggcaacuucaucgcccccgagaacgccuacaagaucgucaagaagggcgacuccaccaucaugaaguccgagcucgaguacggcaacugcaacaccaagugccagacccccaucggcgccaucaacuccuccaugcccuuccacaacauccacccccucaccaucggcgagugccccaaguacgucaaguccaaccgccucguccucgccaccggccuccgcaacuccccccagggcgagcgccgccgcaagaagcgcggccucuucggcgccaucgccggcuucaucgagggcggcuggcagggcauggucgacggcugguacggcuaccaccacuccaacgagcagggcuccggcuacgccgccgacaaggaguccacccagaaggccaucgacggcgucaccaacaaggucaacuccaucaucgacaagaugaacacccaguucgaggccgucggccgcgaguucaacaaccucgagcgccgcaucgagaaccucaacaagaagauggaggacggcuuccucgacgucuggaccuacaacgccgagcuccucguccucauggagaacgagcgcacccucgacuuccacgacuccaacgucaagaaccucuacgacaagguccgccuccagcuccgcgacaacgccaaggagcucggcaacggcugcuucgaguucuaccaccgcugcgacaacgagugcauggaguccguccgcaacggcaccuacgacuacccccaguacuccgaggaggcccgccucaagcgcgaggagaucuccggcgucaagcucgaguccaucggcaccuaccagauccucuccaucuacuccaccgucgccuccucccucgcccucgccaucauggucgccggccucucccucuggaugugcuccaacggcucccuccagugccgcaucugcaucuga

SEQ ID NO: 98306 - RNA, 1701 nt, Artificial Sequence
  derived and/or modified CDS sequence (opt2) from hemagglutinin__InfluenzaA__ABY81349
augaaggccaagcuccucguccuccucugcgcccucuccgccaccgacgccgacaccaucugcaucggcuaccacgccaacaacuccaccgacaccgucgacaccguccucgagaagaacgucaccgucacccacuccgucaaccuccucgaggacucccacaacggcaagcucugccgccucaagggcaucgccccccuccagcucggcaagugcuccaucgccggcuggauccucggcaaccccgagugcgagucccucuucuccaagaaguccugguccuacaucgccgagacccccaacuccgagaacggcaccugcuaccccggcuacuucgccgacuacgaggagcuccgcgagcagcucuccuccgucuccuccuucgagcgcuucgagaucuuccccaaggagcgcuccuggcccaagcacaacgucacccgcggcgucaccgccgccugcucccacaagggcaaguccuccuucuaccgcaaccuccucuggcucaccgagaagaacggcuccuaccccaaccucuccaaguccuacgucaacaacaaggagaaggagguccucguccucuggggcguccaccaccccuccaacaucaaggaccagaagaccaucuaccagaaggagaacgccuacgucuccgucgucuccuccaacuacaaccgccgcuucacccccgagaucgccaagcgccccaagguccgcgaccaggagggccgcaucaacuacuacuggacccuccucgagcccggcgacaccaucaucuucgaggccaacggcaaccucaucgcccccugguacgccuucgcccucucccgcggcuucggcuccggcaucaucaccuccaacgccuccauggacgagugcgacaccaagugccagaccccccagggcgccaucaacuccucccuccccuuccagaacguccaccccgucaccaucggcgagugccccaaguacguccgcuccaccaagcuccgcauggucaccggccuccgcaacauccccuccauccagucccgcggccucuucggcgccaucgccggcuucaucgagggcggcuggaccggcaugaucgacggcugguacggcuaccaccaccagaacgagcagggcuccggcuacgccgccgaccagaaguccacccagaacgccaucaacggcaucaccaacaaggucaacuccgucaucgagaagaugaacacccaguucaccgccgucggcaaggaguucaacaagcucgagaagcgcauggagaaccucaacaagaaggucgacgacggcuuccucgacaucuggaccuacaacgccgagcuccucguccuccucgagaacgagcgcacccucgacuuccacgacuccaacgucaagaaccucuacgagaaggucaagucccagcucaagaacaacgccaaggaggucggcaacggcugcuucgaguucuaccacaagugcaacaacgagugcauggaguccgucaagaacggcaccuacgacuaccccaaguacuccgaggaguccaagcucaaccgcgagaagaucgacggcgucaagcucgaguccaugggcgucuaccagauccucgccaucuacuccaccgucgccuccucccucguccuccucgucucccucggcgccaucuccuucuggaugugcuccaacggcucccuccagugccgcaucugcaucuga

SEQ ID NO: 98307 - RNA, 1701 nt, Artificial Sequence; identical to SEQ ID NO: 97964
  derived and/or modified CDS sequence (opt2) from hemagglutinin__InfluenzaA__ABY81371

SEQ ID NO: 98308 - RNA, 1698 nt, Artificial Sequence; identical to SEQ ID NO: 97950
  derived and/or modified CDS sequence (opt2) from hemagglutinin__InfluenzaA__ABY81382

SEQ ID NO: 98309 - RNA, 1698 nt, Artificial Sequence; identical to SEQ ID NO: 97992
  derived and/or modified CDS sequence (opt2) from hemagglutinin__InfluenzaA__ABY81393

SEQ ID NO: 98310 - RNA, 1698 nt, Artificial Sequence
  derived and/or modified CDS sequence (opt2) from hemagglutinin__InfluenzaA__ABY81415
augaaggucaagcuccucguccuccucugcaccuucaccgccaccuacgccgacaccaucugcaucggcuaccacgccaacaacuccaccgacaccgucgacaccguccucgagaagaacgucaccgucacccacuccgucaaccuccucgaggacucccacaacggcaagcucugccuccucaagggcaucgccccccuccagcucggcaacugcuccgucgccggcuggauccucggcaaccccgagugcgagcuccucaucuccaaggaguccugguccuacaucgucgagacccccucccccgagaacggcaccugcuaccccggcuacuucgccgacuacgaggagcuccgcgagcagcucuccuccgucuccuccuucgagcgcuucgagaucuuccccaaggaguccuccuggcccaaccacaccgucaccggcgucuccgccuccugcucccacaacggcaaguccuccuucuaccgcaaccuccucuggcucaccggcaagaacggccucuaccccaaccucuccaaguccuacgccaacaacaaggagaaggagguccucguccucuggggcguccaccacccccccaacaucggcgaccagcgcgcccucuaccacaccgagaacgccuacgucuccgucgucuccucccacuacucccgccgcuucacccccgagaucgccaagcgccccaagguccgcgaccaggagggccgcaucaacuacuacuggacccuccucgagcccggcgacaccaucaucuucgaggccaacggcaaccucaucgccccccgcuucgccuucgcccucucccgcggcuucggcuccggcaucaucaccuccaacgcccccaugggcgagugcgacgccaagugccagaccccccagggcgccaucaacuccucccuccccuuccagaacguccaccccgucaccaucggcgagugccccaaguacguccgcuccgccaagcuccgcauggucaccggccuccgcaacauccccuccauccagucccgcggccucuucggcgccaucgccggcuucaucgagggcggcuggaccggcauggucgacggcugguacggcuaccaccaccagaacgagcagggcuccggcuacgccgccgaccagaaguccacccagaacgccaucaacggcaucaccaacaaggucaacuccgucaucgagaagaugaacacccaguucaccgccgucggcaaggaguucaacaagcucgagcgccgcauggagaaccucaacaagaaggucgacgacggcuuccucgacaucuggaccuacaacgccgagcuccucguccuccucgagaacgagcgcacccucgacuuccacgacuccaacgucaagaaccucuacgagaaggucaagucccagcucaagaacaacgccaaggagaucggcaacggcugcuucgaguucuaccacaagugcaacgacgagugcauggaguccgucaagaacggcaccuacgacuaccccaaguacuccgaggaguccaagcucaaccgcgagaagaucgacggcgucaagcucgaguccaugggcgucuaccagauccucgccaucuacuccaccgucgccuccucccucguccuccucgucucccucggcgccaucuccuucuggaugugcuccaacggcucccuccagugccgcaucugcaucuga

SEQ ID NO: 98311 - RNA, 1701 nt, Artificial Sequence; identical to SEQ ID NO: 97964
  derived and/or modified CDS sequence (opt2) from hemagglutinin__InfluenzaA__ACA24502

SEQ ID NO: 98312 - RNA, 1698 nt, Artificial Sequence
  derived and/or modified CDS sequence (opt2) from hemagglutinin__InfluenzaA__ACA24513
augaaggucaagcuccucauccuccucugcaccuucaccgccaccuacgccgacaccaucugcaucggcuaccacgccaacaacuccaccgacaccgucgacaccguccucgagaagaacgucaccgucacccacuccgucaaccuccucgaggacucccacaacggcaagcucugccuccucaagggcaucgccccccuccagcucggcaacugcuccgucgccggcuggauccucggcaaccccgagugcgagcuccucaucuccaaggaguccugguccuacaucgucgagacccccaaccccgagaacggcaccugcuaccccggcuacuucgccgacuacgaggagcuccgcgagcagcucaacuccgucuccuccuucgagcgcuucgagaucuuccccaaggaguccuccuggcccaaccacaccgucaccggcgucuccgccuccugcucccacaacggcaaguccuccuucuaccgcaaccuccucuggcucaccggcaagaacggccucuaccccaaccucuccaaguccuacgccaacaacaaggagaaggagguccucguccucuggggcguccaccacccccccaacaucggcgaccagcgcgcccucuaccacaccgagaacgccuacgucuccgucgucuccucccacuacucccgccgcuucacccccgagaucgccaagcgccccaagguccgcgaccaggagggccgcaucaacuacuacuggacccuccucgagccccgcgacaccaucaucuucgaggccaacggcaaccucaucgccccccgcuucgccuucgcccucucccgcggcuucggcuccggcaucaucaccuccaacgcccccauggacgagugcgacgccaagugccagaccccccagggcgccaucaacuccucccuccccuuccagaacguccaccccgucaccaucggcgagugccccaaguacguccgcuccaccaagcuccgcauggucaccggccuccgcaacauccccuccauccagucccgcggccucuucggcgccaucgccggcuucaucgagggcggcuggaccggcauggucgacggcugguacggcuaccaccaccagaacgagcagggcuccggcuacgccgccgaccagaaguccacccagaacgccaucaacggcaucaccaacaaggucaacuccgucaucgagaagaugaacacccaguucaccgccgucggcaaggaguucaacaagcucgagcgccgcauggagaaccucaacaagaaggucgacgacggcuuccucgacaucuggaccuacaacgccgagcuccucguccuccucgagaacgagcgcacccucgacuuccacgacuccaacgucaagaaccucuacgagaaggucaagucccagcucaagaacaacgccaaggagaucggcaacggcugcuucgaguucuaccacaagugcaacgacgagugcauggaguccgucaagaacggcaccuacgacuaccccaaguacuccgaggaguccaagcucaaccgcgagaagaucgacggcgucaagcucgaguccaugggcgucuaccagauccucgccaucuacuccaccgucgccuccucccucguccuccucgucucccucggcgccaucuccuucuggaugugcuccaacggcucccuccagugccgcaucugcaucuga

SEQ ID NO: 98313 - RNA, 1698 nt, Artificial Sequence; identical to SEQ ID NO: 97950
  derived and/or modified CDS sequence (opt2) from hemagglutinin__InfluenzaA__ACA24524

SEQ ID NO: 98314 - RNA, 1701 nt, Artificial Sequence
  derived and/or modified CDS sequence (opt2) from hemagglutinin__InfluenzaA__ACA24689
augaagaccaucaucgcccucuccuacauccucugccucgucuucgcccagaagcuccccggcaucgacaacuccaccgccacccucugccucggccaccacgccguccccaacggcaccaucgucaagaccaucaccaacgaccagaucgaggucaccaacgccaccgagcucguccagaacuccuccaccggcggcaucugcgacuccccccaccagaucaucgacggcgagaacugcacccucaucgacgcccuccucggcgacccccagugcgacggcuuccagaacaagaagugggaccucuucgucgagcgcuccaaggccuacuccaacugcuaccccuacgacguccccgacuacgccucccuccgcucccucgucgccuccuccggcacccucgaguucaacaacgaguccuucaacuggaccggcgucacccagaacggcaccuccuccgccugcaagcgcggcuccaacaacuccuucuucucccgccucaacuggcucacccacuccaaguucaaguaccccgcccucaacgucaccaugcccaacaacgaggaguucgacaagcucuacaucuggggcguccaccaccccggcaccgacaacgaccagaucuuccucuacgcccaggccuccggccgcaucaccgucuccaccaagcgcucccagcagaccgucauccccaacaucggcucccgcccccgcguccgcaacauccccucccgcaucuccaucuacuggaccaucgucaagcccggcgacauccuccucaucaacuccaccggcaaccucaucgccccccgcggcuacuucaagauccgcuccggcaaguccuccaucaugcgcuccgacgcccccaucggcaagugcaacuccgagugcaucacccccaacggcuccauccccaacgacaagcccuuccagaacgucaaccgcaucaccuacggcgccugcccccgcuacgucaagcagaacacccucaagcucgccaccggcaugcgcaacguccccgagaagcagacccgcggcaucuucggcgccaucgccggcuucaucgagaacggcugggagggcauggucgacggcugguacggcuuccgccaccagaacuccgagggcaucggccaggccgccgaccucaaguccacccaggccgccaucgaccagaucaacggcaagcucaaccgccucaucggcaagaccaacgagaaguuccaccagaucgagaaggaguucuccgaggucgagggccgcauccaggaccucgagaaguacgucgaggacaccaagaucgaccucugguccuacaacgccgagcuccucgucgcccucgagaaccagcacaccaucgaccucaccgacuccgagaugaacaagcucuucgagaagaccaagaagcagcuccgcgagaacgccgaggacaugggcaacggcugcuucaagaucuaccacaagugcgacaacgccugcaucggcuccauccgcaacggcaccuacgaccacuacgucuaccgcgacgaggcccucaacaaccgcuuccagaucaagggcaucgagcucaaguccggcuacaaggacuggauccucuggaucuccuucgccaucuccugcuuccuccucugcgucgcccuccucggcuucaucaugugggccugccagaagggcaacauccgcugcaacaucugcaucuga

SEQ ID NO: 98315 - RNA, 1701 nt, Artificial Sequence
  derived and/or modified CDS sequence (opt2) from hemagglutinin__InfluenzaA__ACA24700
augaagaccaucaucgcccucuccuacauccucugccucgucuucgcccagaagcuccccggcaucgacaacuccaccgccacccucugccucggccaccacgccguccccaacggcaccaucgucaagaccaucaccaacgaccagaucgaggucaccaacgccaccgagcucguccagaacuccuccaccggcggcaucugcgacuccccccaccagauccucgacggcgagaacugcacccucaucgacgcccuccucggcgacccccagugcgacggcuuccagaacaagaagugggaccucuucgucgagcgcucccaggccuacuccaacugcuaccccuacgacguccccgacuacgccucccuccgcucccucgucgccuccuccggcacccucgaguucaacaacgaguccuucaacuggaccggcgucacccagaacggcaccuccuccgccugcaagcgcggcuccaacaacuccuucuucucccgccucaacuggcucacccacuccaaguucaaguaccccgcccucaacgucaccaugcccaacaacgaggaguucgacaagcucuacaucuggggcguccaccaccccggcaccgacaacgaccagaucuuccucuacgcccaggccuccggccgcaucaccgucuccaccaagcgcucccagcagaccgucauccccaacaucggcucccgcccccgcguccgcaacauccccucccgcaucuccaucuacuggaccaucgucaagcccggcgacauccuccucaucaacuccaccggcaaccucaucgccccccgcggcuacuucaagauccgcuccggcaaguccuccaucaugcgcuccgacgcccccaucggcaagugcaacuccgagugcaucacccccaacggcuccauccccaacgacaagcccuuccagaacgucaaccgcaucaccuacggcgccugcccccgcuacgucaagcagaacacccucaagcucgccaccggcaugcgcaacguccccgagaagcagacccgcggcaucuucggcgccaucgccggcuucaucgagaacggcugggagggcauggucgacggcugguacggcuuccgccaccagaacuccgagggcaucggccaggccgccgaccucaaguccacccaggccgccaucgaccagaucaacggcaagcucaaccgccucaucggcaagaccaacgagaaguuccaccagaucgagaaggaguucuccgaggucgagggccgcauccaggaccucgagaaguacgucgaggacaccaagaucgaccucugguccuacaacgccgagcuccucgucgcccucgagaaccagcacaccaucgaccucaccgacuccgagaugaacaagcucuucgagaagaccaagaagcagcuccgcgagaacgccgaggacaugggcaacggcugcuucaagaucuaccacaagugcgacaacgccugcaucggcuccauccgcaacggcaccuacgaccacgacgucuaccgcgacgaggcccucaacaaccgcuuccagaucaagggcgucgagcucaaguccggcuacaaggacuggauccucuggaucuccuucgccaucuccugcuuccuccucugcgucgcccuccucggcuucaucaugugggccugccagaagggcaacauccgcugcaacaucugcaucuga

SEQ ID NO: 98316 - RNA, 1698 nt, Artificial Sequence
  derived and/or modified CDS sequence (opt2) from hemagglutinin__InfluenzaA__ACA28846
augaaggucaagcuccucguccuccucugcaccuucaccgccaccuacgccgacaccaucugcaucggcuaccacgccaacaacuccaccgacaccgucgacaccguccucgagaagaacgucaccgucacccacuccgucaaccuccucgagaacucccacaacggcaagcucugccuccucaagggcaucgccccccuccagcucggcaacugcuccgucgccggcuggauccucggcaaccccgagugcgagcuccucaucuccaaggaguccugguccuacaucgucgagaagcccaaccccgagaacggcaccugcuaccccggccacuucgccgacuacgaggagcuccgcgagcagcucuccuccgucuccuccuucgagcgcuucgagaucuuccccaaggaguccuccuggcccaaccacaccgucaccggcgucuccgccuccugcucccacaacggcgaguccuccuucuaccgcaaccuccucuggcucaccggcaagaacggccucuaccccaaccucuccaaguccuacgccaacaacaaggagaaggagguccucguccucuggggcguccaccacccccccaacaucggcauccagaaggcccucuaccacaccgagaacgccuacgucuccgucgucuccucccacuacucccgcaaguucacccccgagaucgccaagcgccccaagguccgcgaccaggagggccgcaucaacuacuacuggacccuccucgagcccggcgacaccaucaucuucgaggccaacggcaaccucaucgccccccgcuacgccuucgcccucucccgcggcuucggcuccggcaucaucaacuccaacgcccccauggacaagugcgacgccaagugccagaccccccagggcgccaucaacuccucccuccccuuccagaacguccaccccgucaccaucggcgagugccccaaguacguccgcuccgccaagcuccgcauggucaccggccuccgcaacauccccuccauccagucccgcggccucuucggcgccaucgccggcuucaucgagggcggcuggaccggcauggucgacggcugguacggcuaccaccaccagaacgagcagggcuccggcuacgccgccgaccagaaguccacccagaacgccaucaacggcaucaccaacaaggucaacuccgucaucgagaagaugaacacccaguucaccgccgucggcaaggaguucaacaagcucgagcgccgcauggagaaccucaacaagaaggucgacgacggcuucaucgacaucuggaccuacaacgccgagcuccucguccuccucgagaacgagcgcacccucgacuuccacgacuccaacgucaagaaccucuacgagaaggucaagucccagcucaagaacaacgccaaggagaucggcaacggcugcuucgaguucuaccacaagugcaacgacgagugcauggaguccgucaagaacggcaccuacgacuaccccaaguacuccgaggaguccaagcucaaccgcgagaagaucgacggcgucaagcucgaguccaugggcgucuaccagauccucgccaucuacuccaccgucgccuccucccucguccuccucgucucccucggcgccaucuccuucuggaugugcuccaacggcucccuccagugccgcaucugcaucuga

SEQ ID NO: 98317 - RNA, 1701 nt, Artificial Sequence
  derived and/or modified CDS sequence (opt2) from hemagglutinin__InfluenzaA__ACA33749
augaagaccaucaucgcccucuccuacauccucugccucgucuucgcccagaagcuccccggcaacgacaacuccaccgccacccucugccucggccaccacgccguccccaacggcaccaucgucaagaccaucaccaacgaccagaucgaggucaccaacgccaccgagcucguccaguccuccuccaccggcgagaucugcgacuccccccaccagauccucgacggcgagaacugcacccucaucgacgcccuccucggcgacccccagugcgacggcuuccagaacaagaagugggaccucuucgucgagcgcuccaaggccuacuccaacugcuaccccuacgacguccccgacuacgccucccuccgcucccucgucgccuccuccggcacccucgaguucaacaacgaguccuucaacuggaccggcgucacccagaacggcaccuccuccuccugcauccgccgcuccaacaacuccuucuucucccgccucaacuggcucacccaccucaaguucaaguaccccgcccucaacgucaccaugcccaacaacgagaaguucgacaagcucuacaucuggggcguccaccaccccggcaccgacaacgaccagaucuuccucuacgcccaggccuccggccgcaucaccgucuccaccaagcgcucccagcagaccgucauccccaacaucggcucccgcccccgcguccgcaacauccccucccgcaucuccaucuacuggaccaucgucaagcccggcgacauccuccucaucaacuccaccggcaaccucaucgccccccgcggcuacuucaagauccgcuccggcaaguccuccaucaugcgcuccgacgcccccaucggcaagugcaacuccgagugcaucacccccaacggcuccauccccaacgacaagcccuuccagaacgucaaccgcaucaccuacggcgccugcccccgcuacgucaagcagaacacccucaagcucgccaccggcaugcgcaacguccccgagaagcagacccgcggcaucuucggcgccaucgccggcuucaucgagaacggcugggagggcauggucgacggcugguacggcuuccgccaccagaacuccgagggcaucggccaggccgccgaccucaaguccacccaggccgccaucgaccagaucaacggcaagcucaaccgccucaucggcaagaccaacgagaaguuccaccagaucgagaaggaguucuccgaggucgagggccgcauccaggaccucgagaaguacgucgaggacaccaagaucgaccucugguccuacaacgccgagcuccucgucgcccucgagaaccagcacaccaucgaccucaccgacuccgagaugaacaagcucuucgagaagaccaagaagcagcuccgcgagaacgccgaggacaugggcaacggcugcuucaagaucuaccacaagugcgacaacgccugcaucggcuccauccgcaacggcaccuacgaccacgacgucuaccgcgacgaggcccucaacaaccgcuuccagaucaagggcgucgagcucaaguccggcuacaaggacuggauccucuggaucuccuucgccaucuccugcuuccuccucugcgucgcccuccucggcuucaucaugugggccugccagaagggcaacauccgcugcaacaucugcaucuga

SEQ ID NO: 98318 - RNA, 1698 nt, Artificial Sequence; identical to SEQ ID NO: 97946
  derived and/or modified CDS sequence (opt2) from hemagglutinin__InfluenzaA__ACA96519

SEQ ID NO: 98319 - RNA, 1659 nt, Artificial Sequence
  derived and/or modified CDS sequence (opt2) from hemagglutinin__InfluenzaA__ACC55270
augaacacccagauccucgccuucaucgccugcguccucaccggcgucaagggcgacaagaucugccucggccaccacgccgucgccaacggcaccaaggucaacacccucaccgagcgcggcaucgaggucgucaacgccaccgagaccgucgagaccaccaacaucaagaagaucugcacccagggcaagcgccccaccgaccucggccagugcggccuccucggcacccucaucggccccccccagugcgaccaguuccucgaguucuccuccgaccucaucaucgagcgccgcgagggcaccgacaucugcuaccccggccgcuucaccaacgaggagucccuccgccagauccuccgccgcuccggcggcaucggcaaggaguccaugggcuucaccuacuccggcauccgcaccaacggcgccaccuccgccugcacccgcuccggcuccuccuucuacgccgagaugaaguggcuccucuccaacuccgacaacgccgccuucccccagaugaccaaggccuaccgcaacccccgcaacaagcccgcccucaucaucuggggcguccaccacuccgaguccgucuccgagcagaccaagcucuacggcuccggcaacaagcucaucaccguccgcuccuccaaguaccagcaguccuucacccccaaccccggcgcccgccgcaucgacuuccacuggcuccuccucgaccccaacgacaccgucaccuucaccuucaacggcgccuucaucgcccccgaccgcaccuccuucuuccgcggcgagucccucggcguccaguccgacgccccccucgacuccuccugccgcggcgacugcuuccacuccggcggcaccaucgucuccucccuccccuuccagaacaucaacucccgcaccgucggcaagugcccccgcuacgucaagcagaagucccuccuccucgccaccggcaugcgcaacguccccgagaagcccaagccccgcggccucuucggcgccaucgccggcuucaucgagaacggcugggagggccucaucaacggcugguacggcuuccgccaccagaacgcccagggcgagggcaccgccgccgacuacaaguccacccaguccgccaucgaccagaucaccggcaagcucaaccgccucaucggcaagaccaaccagcaguucgagcucaucgacaacgaguucaacgagaucgagcagcagaucggcaacgucaucaacuggacccgcgacgccaugaccgagaucugguccuacaacgccgagcuccucgucgccauggagaaccagcacaccaucgaccucgccgacuccgagauguccaagcucuacgagcgcgucaagaagcagcuccgcgagaacgccgaggaggacggcaccggcugcuucgagaucuuccacaagugcgacgaccagugcauggaguccauccgcaacaacaccuacgaccacacccaguaccgcaccgagucccuccagaaccgcauccagaucgaccccgucaagcucuccuccggcuacaaggacaucauccucugguucuccuucggcgccuccugcuuccuccuccucgccaucgccaugggccucgucuucaucugcaucaagaacggcaacaugcagugcaccaucugcaucuga

SEQ ID NO: 98320 - RNA, 1698 nt, Artificial Sequence; identical to SEQ ID NO: 97950
  derived and/or modified CDS sequence (opt2) from hemagglutinin__InfluenzaA__ACC61964

SEQ ID NO: 98321 - RNA, 1698 nt, Artificial Sequence
  derived and/or modified CDS sequence (opt2) from hemagglutinin__InfluenzaA__ACC61975
augaaggucaagcuccucguccuccucugcaccuucaccgccuccuacgccgacaccaucugcaucggcuaccacgccaacaacuccaccgacaccgucgacaccguccucgagaagaacgucaccgucacccacuccgucaaccuccucgaggacucccacaacggcaagcucugccuccucaagggcaucgccccccuccagcucggcaacugcuccgucgccggcuggauccucggcaaccccgagugcgagcuccucaucuccaaggaguccugguccuacaucgucgagguccccaaccccgagaacggcaccugcuaccccggcuacuucgccgacuacgaggagcuccgcgagcagcucuccuccaucuccuccuucgagcgcuucgagaucuuccccaaggaguccuccuggcccaaccacaccgucaccggcgucuccgccuccugcucccacaacggcaaguccuccuucuaccgcaaccuccucuggcucaccggcaagaacggccucuaccccaaccucuccaaguccuacgccaacaacaaggagaaggagguccucguccucuggggcguccaccacccccccaacaucggcgaccagcgcgcccucuaccacaccgagaacgccuacgucuccgucgucuccucccacuacucccgccgcuucacccccgagaucgccaagcgccccaagguccgcgaccaggagggccgcaucaacuacuacuggacccuccucgagcccggcgacaccaucaucuucgaggccaacggcaaccucaucgccccccgcuucgccuucgcccucucccgcggccucggcuccggcaucaucaccuccaacgcccccauggacgagugcgacgccaagugccagaccccccagggcgccaucaacuccucccuccccuuccagaacguccaccccgucaccaucggcgagugccccaaguacguccgcuccgccaagcuccgcauggucaccggccuccgcaacauccccuccauccagucccgcggccucuucggcgccaucgccggcuucaucgagggcggcuggaccggcauggucgacggcugguacggcuaccaccaccagaacgagcagggcuccggcuacgccgccgaccagaaguccacccagaacgccaucaacggcaucaccaacaaggucaacuccgucaucgagaagaugaacacccaguucaccgccgucggcaaggaguucaacaagcucgagcgccgcauggagaaccucaacaagaaggucgacgacggcuuccucgacaucuggaccuacaacgccgagcuccucguccuccucgagaacgagcgcacccucgacuuccacgacuccaacgucaagaaccucuacgagaaggucaagucccagcucaagaacaacgccaaggagaucggcaacggcugcuucgaguucuaccacaagugcaacaacgagugcauggaguccgucaagaacggcaccuacgacuaccccaaguacuccgaggaguccaagcucaaccgcgagaagaucgacggcgucaagcucgaguccaugggcgucuaccagauccucgccaucuacuccaccgucgccuccucccucguccuccucgucucccucggcgccaucuccuucuggaugugcuccaacggcucccuccagugccgcaucugcaucuga

SEQ ID NO: 98322 - RNA, 1698 nt, Artificial Sequence; identical to SEQ ID NO: 97946
  derived and/or modified CDS sequence (opt2) from hemagglutinin__InfluenzaA__ACC61986

SEQ ID NO: 98323 - RNA, 1698 nt, Artificial Sequence
  derived and/or modified CDS sequence (opt2) from hemagglutinin__InfluenzaA__ACD37430
augaaggccaagcuccucguccuccucugcaccuucaccgccaccuacgccgacaccaucugcaucggcuaccacgccaacaacuccaccgacaccgucgacaccguccucgagaagaacgucaccgucacccacuccgucaaccuccucgaggacucccacaacggcaagcucugccuccucaagggcaucgccccccuccagcucggcaacugcuccgucgccggcuggauccucggcaaccccgagugcgagcuccucaucuccaaggaguccugguccuacaucgucgagacccccaaccccgagaacggcaccugcuaccccggcuacuucgccgacuacgaggagcuccgcgagcagcucuccuccgucuccuccuucgagcgcuucgagaucuuccccaaggaguccuccuggcccacccacaccgucaccggcgucuccgccuccugcucccacaacggcaaguccuccuucuaccgcaaccuccucuggcucaccggcaagaacggccucuaccccaaccucuccaaguccuacgucaacaacaaggagaaggagguccucguccucuggggcguccaccacccccccaacaucggcgaccagcgcgcccucuaccacaccgagaacgccuacgucuccgucgucuccucccacuacucccgccgcuucacccccgagaucgccaagcgccccaagguccgcgaccaggagggccgcaucaacuacuacuggacccuccucgagcccggcgacaccaucaucuucgaggccaacggcaaccucaucgcccccugguacgccuucgcccucucccgcggcuucggcuccggcaucaucaccuccaacgcccccauggacgagugcgacgccaagugccagaccccccagggcgccaucaacuccucccuccccuuccagaacguccaccccgucaccaucggcgagugccccaaguacguccgcuccgccaagcuccgcauggucaccggccuccgcaacauccccuccauccagucccgcggccucuucggcgccaucgccggcuucaucgagggcggcuggaccggcauggucgacggcugguacggcuaccaccaccagaacgagcagggcuccggcuacgccgccgaccagaaguccacccagaacgccaucaacggcaucaccaacaaggucaacuccgucaucgagaagaugaacacccaguucaccgccgucggcaaggaguucaacaagcucgagcgccgcauggagaaccucaacaagaaggucgacgacggcuuccucgacaucuggaccuacaacgccgagcuccucguccuccucgagaacgagcgcacccucgacuuccacgacuccaacgucaagaaccucuacgagaaggucaagucccagcucaagaacaacgccaaggagaucggcaacggcugcuucgaguucuaccacaagugcaacaacgagugcauggaguccgucaagaacggcaccuacgacuaccccaaguacuccgaggaguccaagcucaaccgcgagaagaucgacggcgucaagcucgaguccaugggcgucuaccagauccucgccaucuacuccaccgucgccuccucccucguccuccucgucucccucggcgccaucuccuucuggaugugcuccaacggcucccuccagugccgcaucugcaucuga

SEQ ID NO: 98324 - RNA, 1698 nt, Artificial Sequence
  derived and/or modified CDS sequence (opt2) from hemagglutinin__InfluenzaA__ACD37507
augaaggccaagcuccucguccuccucugcaccuucgccgccaccuacgccgacaccaucugcaucggcuaccacgccaacaacuccaccgacaccgucgacaccguccucgagaagaacgucaccgucacccacuccgucaaccuccucgagaacucccacaacggcaagcucugccuccucaagggcaucgccccccuccagcucggcaacugcuccgucgccggcuggauccucggcaaccccgagugcgagcuccucaucuccaaggaguccugguccuacaucgucgagaagcccaaccccgagaacggcaccugcuaccccggccacuucgccgacuacgaggagcuccgcgagcagcucuccuccgucuccuccuucgagcgcuucgagaucuuccccaaggaguccuccuggcccaaccacaccgucaccggcgucuccgccuccugcucccacaacggcgaguccuccuucuaccgcaaccuccucuggcucaccggcaagaacggccucuaccccaaccucuccaaguccuacgccaacaacaaggagaaggagguccucguccucuggggcguccaccacccccccaacaucggcaaccagaaggcccucuaccacaccgagaacgccuacgucuccgucgucuccucccacuacucccgcaaguucacccccgagaucgccaagcgccccaagguccgcgaccaggagggccgcaucaacuacuacuggacccuccucgagcccggcgacaccaucaucuucgaggccaacggcaaccucaucgccccccgcuacgccuucgcccucucccgcggcuucggcuccggcaucaucaacuccaacgcccccauggacaagugcgacgccaagugccagaccccccagggcgccaucaacuccucccuccccuuccagaacguccaccccgucaccaucggcgagugccccaaguacguccgcuccgccaagcuccgcauggucaccggccuccgcaacauccccuccauccagucccgcggccucuucggcgccaucgccggcuucaucgagggcggcuggaccggcauggucgacggcugguacggcuaccaccaccagaacgagcagggcuccggcuacgccgccgaccagaaguccacccagaacgccaucaacggcaucaccaacaaggucaacuccgucaucgagaagaugaacacccaguucaccgccgucggcaaggaguucaacaagcucgagcgccgcauggagaaccucaacaagaaggucgacgacggcuucaucgacaucuggaccuacaacgccgagcuccucguccuccucgagaacgagcgcacccucgacuuccacgacuccaacgucaagaaccucuacgagaaggucaagucccagcucaagaacaacgccaaggagaucggcaacggcugcuucgaguucuaccacaagugcaacgacgagugcauggaguccgucaagaacggcaccuacgacuaccccaaguacuccgaggaguccaagcucaaccgcgagaagaucgacggcgucaagcucgaguccaugggcgucuaccagauccucgccaucuacuccaccgucgccuccucccucguccuccucgucucccucggcgccaucuccuucuggaugugcuccaacggcucccuccagugccgcaucugcaucuga

SEQ ID NO: 98325 - RNA, 1698 nt, Artificial Sequence; identical to SEQ ID NO: 98091
  derived and/or modified CDS sequence (opt2) from hemagglutinin__InfluenzaA__ACD56113

SEQ ID NO: 98326 - RNA, 1698 nt, Artificial Sequence; identical to SEQ ID NO: 97950
  derived and/or modified CDS sequence (opt2) from hemagglutinin__InfluenzaA__ACD56124

SEQ ID NO: 98327 - RNA, 1701 nt, Artificial Sequence; identical to SEQ ID NO: 98023
  derived and/or modified CDS sequence (opt2) from hemagglutinin__InfluenzaA__ACD56258

SEQ ID NO: 98328 - RNA, 1701 nt, Artificial Sequence; identical to SEQ ID NO: 97765
  derived and/or modified CDS sequence (opt2) from hemagglutinin__InfluenzaA__ACD56269

SEQ ID NO: 98329 - RNA, 1698 nt, Artificial Sequence
  derived and/or modified CDS sequence (opt2) from hemagglutinin__InfluenzaA__ACD56280
augaaggucaagcuccucauccuccucugcaccuucaccgccaccuacgccgacaccaucugcaucggcuaccacgccaacaacuccaccgacaccgucgacaccguccucgagaagaacgucaccgucacccacuccgucaaccuccucgaggacucccacaacggcaagcucugccuccucaagggcaucgccccccuccagcucggcaacugcuccgucgccggcuggauccucggcaaccccgagugcgagcuccucaucuccaaggaguccugguccuacaucgucgagacccccaaccccggcaacggcaccugcuaccccggcuacuucgccgacuacgaggagcuccgcgagcagcucuccuccgucuccuccuucgagcgcuucgagaucuuccccaaggaguccuccuggcccaaccacaccgucaccggcgucuccgccuccugcucccacaacggcaaguccuccuucuaccgcaaccuccucuggcucaccggcaagaacggccucuaccccaaccucuccaaguccuacgccaacaacaaggagaaggagguccucguccucuggggcguccaccacccccccaacaucggcgaccagcgcgcccucuaccacaccgagaacgccuacgucuccgucgucuccucccacuacucccgccgcuucacccccgagaucgccaagcgccccaagguccgcgaccaggagggccgcaucaacuacuacuggacccuccucgagcccggcgacaccaucaucuucgaggccaacggcaaccucaucgccccccgcuucgccuucgcccucucccgcggcuucggcuccggcaucaucaccuccaacgcccccauggacgagugcgaggccaagugccagaccccccagggcgccaucaacuccucccuccccuuccagaacguccaccccgucaccaucggcgagugccccaaguacguccgcuccaccaagcuccgcauggucaccggccuccgcaacauccccuccauccagucccgcggccucuucggcgccaucgccggcuucaucgagggcggcuggaccggcauggucgacggcugguacggcuaccaccaccagaacgagcagggcuccggcuacgccgccgaccagaaguccacccagaacgccaucaacggcaucaccaacaaggucaacuccgucaucgagaagaugaacacccaguucaccgccgucggcaaggaguucaacaagcucgagcgccgcauggagaaccucaacaagaaggucgacgacggcuuccucgacaucuggaccuacaacgccgagcuccucguccuccucgagaacgagcgcacccucgacuuccacgacuccaacgucaagaaccucuacgagaaggucaagucccagcucaagaacaacgccaaggagaucggcaacggcugcuucgaguucuaccacaagugcaacgacgagugcauggaguccgucaagaacggcaccuacgacuaccccaaguacuccgaggaguccaagcucaaccgcgagaagaucgacggcgucaagcucgaguccaugggcgucuaccagauccucgccaucuacuccaccgucgccuccucccucguccuccucgucucccucggcgccaucuccuucuggaugugcuccaacggcucccuccagugccgcaucugcaucuga

SEQ ID NO: 98330 - RNA, 1689 nt, Artificial Sequence
  derived and/or modified CDS sequence (opt2) from hemagglutinin__InfluenzaA__ACD56324
auggccaucaucuaccucauccuccucuucaccgccguccgcggcgaccagaucugcaucggcuaccacgccaacaacuccaccgagaaggucgacaccauccucgagcgcaacgucaccgucacccacgccaagaacauccucgagaagacccacaacggccgccucugcaagcucaacggcauccccccccucgagcucggcgacugcuccaucgccggcuggcuccucggcaaccccgagugcgaccgccuccuccgcguccccgagugguccuacaucauggagaaggagaacccccgcaacggccucugcuaccccggcuccuucaacgacuacgaggagcucaagcaccuccucuccuccgucaagcacuucgagaagguccgcauccuccccaaggaccgcuggacccagcacaccaccaccggcuccucccgcgccugcgccgucuccggcaaccccuccuucuuccgcaacauggucuggcucaccaagaaggaguccaacuaccccgucgccaagggcuccuacaacaacaccuccggcgagcagaugcucaucaucuggggcguccaccaccccaucgacgagaccgagcagcgcacccucuaccagaacgucggcaccuacgucuccgucggcaccuccacccucaacaagcgcuccacccccgacaucgccacccgccccaaggucaacggccucggcucccgcauggaguucuccuggacccuccucgacaugugggacaccaucaacuucgaguccaccggcaaccucaucgcccccgaguacggcuucaagaucuccaagcgcggcuccuccggcaucaugaagaccgagcgcacccucgagaacugcgagaccaagugccagaccccccucggcgccaucaacaccacccuccccuuccacaacguccacccccucaccaucggcgagugccccaaguacgucaaguccgagaagcucguccucgccaccggccuccgcaacgucccccagaucgagccccgcggccucuucggcgccaucgccggcuucaucgagggcggcuggcagggcauggucgacggcugguacggcuaccaccacuccaacgaccagggcuccggcuacgccgccgacaaggaguccacccagaaggccuucgacggcaucaccaacaaggucaacuccgucaucgagaagaugaacacccaguucgaggccgucggcaaggaguucuccaaccucgagcgccgccucgagaaccucaacaagaagauggaggacggcuuccucgacgucuggaccuacaacgccgagcuccucguccucauggagaacgagcgcacccucgacuuccacgacuccaacgucaagaaccucuacgacaagguccgcaugcagcuccgcgacaacgucaaggagcucggcaacggcugcuucgaguucuaccacaagugcgacgacgagugcaugaacuccgucaagaacggcaccuacgacuaccccaaguacgaggaggaguccaagcucaaccgcaacgagaucaagggcgucaagcucuccuccaugggcgucuaccagauccucgccaucuacgccaccgucgccggcucccucucccucgccaucaugauggccggcaucuccuucuggaugugcuccaacggcucccuccagugccgcaucugcaucuga

SEQ ID NO: 98331 - RNA, 1689 nt, Artificial Sequence
  derived and/or modified CDS sequence (opt2) from hemagglutinin__InfluenzaA__ACD85187
auggccaucaucuaccucauccuccucuucaccgccguccgcggcgaccagaucugcaucggcuaccacgccaacaacuccaccgagaaggucgacaccauccucgagcgcaacgucaccgucacccacgccaaggacauccucgagaagacccacaacggcaagcucugcaagcucaacggcauccccccccucgagcucggcgacugcuccaucgccggcuggcuccucggcaaccccgagugcgaccgccuccuccgcguccccgagugguccuacaucauggagaaggagaacccccgcuacucccucugcuaccccggcuccuucaacgacuacgaggagcucaagcaccuccucuccuccgucaagcacuucgagaaggucaagauccuccccaaggaccgcuggacccagcacaccaccaccggcggcuccaaggccugcgccgucuccggcaagcccuccuucuuccgcaacauggucuggcucaccaagaagggccccaacuaccccgucgccaagggcuccuacaacaacaccuccggcgagcagaugcucaucaucuggggcguccaccaccccaaggacgaggccgagcagcgcgcccucuaccaggaggucggcaccuacgucuccgccuccaccuccacccucaacaagcgcuccacccccgagaucgccgcccgccccgaggucaacggccucggcucccgcauggaguucuccuggacccuccucgacgucugggacaccaucaacuucgaguccaccggcaaccucgucgcccccgaguacggcuucaagaucuccaagcgcggcuccuccggcaucaugaagaccgagggcacccucggcaacugcgagaccaagugccagaccccccucggcgccaucaacaccacccuccccuuccacaacguccacccccucaccaucggcgagugccccaaguacgucaaguccgagaagcucguccucgccaccggccuccgcaacgucccccagaucgagucccgcggccucuucggcgccaucgccggcuucaucgagggcggcuggcagggcauggucgacggcugguacggcuaccaccacuccaacgaccagggcuccggcuacgccgccgacaaggaguccacccagaaggccuucgacggcaucaccaacaaggucaacuccgucaucgagaagaugaacacccaguucgaggccgucggcaaggaguucaacaaccucgagaagcgccucgagaaccucaacaagaagauggaggacggcuuccucgacgucuggaccuacaacgccgagcuccucguccucauggagaacgagcgcacccucgacuuccacgacuccaacgucaagaaccucuacgacaagguccgcaugcagcuccgcgacaacgucaaggagcucggcaacggcugcuucgaguucuaccacaagugcgacgacgagugcaugaacuccgucaagaacggcaccuacgacuaccccaaguacgaggaggaguccaagcucaaccgcaacgagaucaagggcgucaagcucuccuccaugggcgucuaccagauccucgccaucuacgccaccgucgccggcucccucucccucgccaucaugauggccggcaucuccuucuggaugugcuccaacggcucccuccagugccgcaucugcaucuga

SEQ ID NO: 98332 - RNA, 1689 nt, Artificial Sequence
  derived and/or modified CDS sequence (opt2) from hemagglutinin__InfluenzaA__ACD85198
auggccaucaucuaccucauccuccucuucaccgccguccgcggcgaccagaucugcaucggcuaccacgccaacaacuccaccgagaaggucgacaccauccucgagcgcaacgucaccgucacccacgccaaggacauccucgagaagacccacaacggcaagcucugcaagcucaacggcauccccccccucgagcucggcgacugcuccaucgccggcuggcuccucggcaaccccgagugcgaccgccuccuccgcguccccgagugguccuacaucauggagaaggagaacccccgcuacucccucugcuaccccggcuccuucaacgacuacgaggagcucaagcaccuccucuccuccgucaagcacuucgagaaggucaagauccuccccaaggacggcuggacccagcacaccaccaccggcggcuccaaggccugcgccgucuccggcaagcccuccuucuuccgcaacauggucuggcucaccaagaagggccccaacuaccccgucgccaagcgcuccuacaacaacaccuccggcgagcagaugcucaucaucuggggcguccaccaccccaccgacgaggccgagcagcgcgcccucuaccaggaggucggcaccuacgucuccgccuccaccuccacccucaacaagcgcuccacccccgagaucgccgcccgccccgaggucaacggccuccgcucccgcauggaguucuccuggacccuccucgacgucugggacaccaucaacuucgaguccaccggcaaccucgucgcccccgaguacggcuucaagaucuccaagcgcggcuccuccggcaucaugaagaccgagggcacccucggcaacugcgagaccaagugccagaccccccucggcgccaucaacaccacccuccccuuccacaacguccacccccucaccaucggcgagugccccaaguacgucaaguccgagaagcucguccucgccaccggccuccgcaacgucccccagaucgagucccgcggccucuucggcgccaucgccggcuucaucgagggcggcuggcagggcauggucgacggcugguacggcuaccaccacuccaacgaccagggcuccggcuacgccgccgacaaggaguccacccagaaggccuucgaccgcaucaccaacaaggucaacuccgucaucgagaagaugaacacccaguucgaggccgucggcaaggaguucuccaaccucgagaagcgccucgagaaccucaacaagaagauggaggacggcuuccucgacgucuggaccuacaacgccgagcuccucguccucauggagaacgagcgcacccucggcuuccacgacuccaacgucaagaaccucuacgacaagguccgcaugcagcuccgcgacaacgucaaggagcucggcaacggcugcuucgaguucuaccacaagugcgacgacgagugcaugaacuccgucaagaacggcaccuacgacuaccccaaguacgaggaggaguccaagcucaagcgcaacgagaucaagggcgucaagcucuccuccaugggcgucuaccagauccucgccaucuacgccaccgucgccggcucccucucccucgccaucaugauggccggcaucuccuucuggaugugcuccaacggcucccuccagugccgcaucugcaucuga

SEQ ID NO: 98333 - RNA, 1689 nt, Artificial Sequence
  derived and/or modified CDS sequence (opt2) from hemagglutinin__InfluenzaA__ACD85209
auggccaucaucuaccucauccuccucuucaccgccguccgcggcgaccagaucugcaucggcuaccacgccaacaacuccaccgagaaggucgacaccauccucgagcgcaacgucaccgucacccacgccaaggacauccucgagaagacccacaacggcaagcucugcaagcucaacggcauccccccccucgagcucggcgacugcuccaucgccggcuggcuccucggcaaccccgagugcgaccgccuccucuccguccccgagugguccuacaucauggagaaggagaacccccgcgacggccucugcuaccccggcuccuucaacgacuacgaggagcucaagcaccuccucuccuccgucaagcacuucgagaaggucaagauccuccccaaggaccgcuggacccagcacaccaccaccggcggcucccgcgccugcgccgucuccggcaaccccuccuucuuccgcaacauggucuggcucacccagaagggcuccaacuaccccgucgccaagggcuccuacaacaacaccuccggcgagcagaugcucaucaucuggggcguccaccaccccaacgacgagaccgagcagcgcacccucuaccagaacgucggcaccuacgucuccgucggcaccuccacccucaacaagcgcuccacccccgacaucgccacccgccccaaggucaacggccagggcggccgcauggaguucuccuggacccuccucgacaugugggacaccaucaacuucgaguccaccggcaaccucaucgcccccgaguacggcuucaagaucuccaagcgcggcuccuccggcaucaugaagaccgagggcacccucgagaacugcgagaccaagugccagaccccccucggcgccaucaacaccacccuccccuuccacaacguccacccccucaccaucggcgagugccccaaguacgucaaguccgagaagcucguccucgccaccggccuccgcaacgucccccagaucgagucccgcggccucuucggcgccaucgccggcuucaucgagggcggcuggcagggcauggucgacggcugguacggcuaccaccacuccaacgaccagggcuccggcuacgccgccgacaaggaguccacccagaaggccuucgacggcaucaccaacaaggucaacuccgucaucgagaagaugaacacccaguucgaggccgucggcaaggaguucuccaaccucgagcgccgccucgagaaccucaacaagaagauggaggacggcuuccucgacgucuggaccuacaacgccgagcuccucguccucauggagaacgagcgcacccucgacuuccacgacuccaacgucaagaaccucuacgacaagguccgcaugcagcuccgcgacaacgucaaggagcucggcaacggcugcuucgaguucuaccacaagugcgacgacgagugcaugaacuccgucaagaacggcaccuacgacuaccccaaguacgaggaggaguccaagcucaaccgcaacgagaucaagggcgucaagcucuccuccaugggcgucuaccagauccucgccaucuacgccaccgucgccggcucccucucccucgccaucaugauggccggcaucuccuucuggaugugcuccaacggcucccuccagugccgcaucugcaucuga

SEQ ID NO: 98334 - RNA, 1689 nt, Artificial Sequence
  derived and/or modified CDS sequence (opt2) from hemagglutinin__InfluenzaA__ACD85220
auggccaucaucuaccucauccuccucuucaccgccguccgcggcgaccagaucugcaucggcuaccacgccaacaacuccaccgagaaggucgacaccauccucgagcgcaacgucaccgucacccacgccaaggacauccucgagaagacccacaacggcaagcucugcaagcucaacggcauccccccccucgagcucggcgacugcuccaucgccggcuggcuccucggcaaccccgagugcgaccgccuccuccgcguccccgagugguccuacaucauggagaaggagaaccccaaguacucccucugcuaccccggcuccuucaacgacuacgaggagcucaagcaccuccucuccuccgucaagcacuucgagaaggucaagauccuccccaaggaccgcuggacccagcacaccaccaccggcggcuccaaggccugcgccgucuccggcgagcccuccuucuuccgcaacauggucuggcucaccaagaagggccccaacuaccccgucgccaagggcuccuacaacaacaccuccggcgagcagaugcucaucaucuggggcguccaccaccccaaggacgaggccgagcagcgcgcccucuaccagaacgucggcaccuacgucuccgccuccaccuccacccucaacaagcgcuccacccccgagaucgccgcccgccccgaggucaacggccucggcucccgcauggaguucuccuggacccuccucgacgucugggacaccaucaacuucgaguccaccggcaaccucgucgcccccgaguacggcuucaagaucuccaagcgcggcuccuccggcaucaugaagaccgagggcacccucggcaacugcgagaccaagugccagaccccccucggcgccaucaacaccacccuccccuuccacaacguccacccccucaccaucggcgagugccccaaguacgucaaguccgagaagcucguccucgccaccggccuccgcaacgucccccagaucgagucccgcggccucuucggcgccaucgccggcuucaucgagggcggcuggcagggcauggucgacggcugguacggcuaccaccacuccaacgaccagggcuccggcuacgccgccgacaaggaguccacccagaaggccuucgacggcaucaccaacaaggucaacuccgucaucgagaagaugaacacccaguucgaggccgucggcaaggaguucaacaaccucgagaagcgccucgagaaccucaacaagaagauggaggacggcuuccucgacgucuggaccuacaacgccgagcuccucguccucauggagaacgagcgcacccucgacuuccacgacuccaacgucaagaaccucuacgacaagguccgcaugcagcuccgcgacaacgucaaggagcucggcaacggcugcuucgaguucuaccacaagugcgacgacgagugcaugaacuccgucaagaacggcaccuacgacuaccccaaguacgagaaggaguccaagcucaaccgcaacgagaucaagggcgucaagcucuccuccaugggcgucuaccagauccucgccaucuacgccaccgucgccggcucccucucccucgccaucaugauggccggcaucuccuucuggaugugcuccaacggcucccuccagugccgcaucugcaucuga

SEQ ID NO: 98335 - RNA, 1689 nt, Artificial Sequence
  derived and/or modified CDS sequence (opt2) from hemagglutinin__InfluenzaA__ACD85242
auggccaucaucuaccucauccuccucuucgccaccguccgcggcgaccagaucugcaucggcuaccacgccaacaacuccaccgagaaggucgacaccauccucgagcgcaacgucaccgucacccacgccaaggacauccucgagaagacccacaacggcaagcucugcaagcucaacggcauccccccccucgagcucggcgacugcuccaucgccggcuggcuccucggcaaccccgagugcgaccgccuccuccgcguccccgagugguccuacaucauggagaaggagaacccccgcuacucccucugcuaccccggcucccucaacgacuacgaggagcucaagcaccuccucuccuccgucaagcacuucgagaagguccgcauccuccccaaggaccgcuggacccagcacaccaccaccggcggcuccaaggccugcgccgucuccggcaagcccuccuucuuccgcaacauggucuggcucaccaagaagggccccaacuaccccgucgccaagggcuccuacaacaacaccuccggcgagcagaugcucaucaucuggggcguccaccaccccaaggacgaggccgagcagcgcgcccucuaccaggaggucggcaccuacgucuccgccuccaccuccacccucaacaagcgcuccauccccgagaucgccgcccgccccgaggucaacggccucggcucccgcauggaguucuccuggacccuccucgacgucugggacaccaucaacuucgaguccaccggcaaccucgucgcccccgaguacggcuucaagaucuccaagcgcggcuccuccggcaucaugaagaccgagggcacccucggcaacugcgagaccaagugccagaccccccucggcgccaucaacaccacccuccccuuccacaacguccacccccucaccaucggcgagugccccaaguacgucaaguccgagaagcucguccucgccaccggccuccgcaacgucccccagaucgagucccgcggccucuucggcgccaucgccggcuucaucgagggcggcuggcagggcauggucgacggcugguacggcuaccaccacuccaacgaccagggcuccggcuacgccgccgacaaggaguccacccagaaggccuucgacggcaucaccaacaaggucaacuccaugaucgagaagaugaacacccaguucgaggccgucggcaaggaguucaacaaccucgagaagcgccucgagaaccucgacaagaagauggaggacggcuuccucgacgucuggaccuacaacgccgagcuccucguccucauggagaacgagcgcacccucgacuuccacgacuccaacgucaagaaccucuacgagaagguccgcaugcagcuccgcgacaacgucaaggagcucggcaacggcugcuucgaguucuaccacaagugcgacaacgagugcaugaacuccgucaagaacggcaccuacgacuaccccaaguacgaggaggaguccaagcucaagcgcaacgagaucaagggcgucaagcucuccuccaugggcgucuaccagauccucgccaucuacgccaccgucgccggcucccucucccucgccaucauggucgccggcaucuccuucuggaugugcuccaacggcucccuccagugccgcaucugcaucuga

SEQ ID NO: 98336 - RNA, 1689 nt, Artificial Sequence
  derived and/or modified CDS sequence (opt2) from hemagglutinin__InfluenzaA__ACD85253
auggccaucaucuaccucauccuccucuucgccaccguccgcggcgaccagaucugcaucggcuaccacgccaacaacuccaccgagaaggucgacaccauccucgagcgcaacgucaccgucacccacgccaaggacauccucgagaagacccacaacggcaagcucugcaagcucaacggcauccccccccucgagcucggcgacugcuccaucgccggcuggcuccucggcaaccccgagugcgaccgccuccuccgcguccccgagugguccuacaucauggagaaggagaacccccgcuacaaccucugcuaccccggcucccucaacgaguacgaggagcucaagcaccuccucuccuccgucaagcacuucgagaagguccgcauccuccccaaggaccgcuggacccagcacaccaccaccggcggcuccaaggccugcgccgucuccggcgagcccuccuucuuccgcaacauggucuggcucaccaagaagggccccaacuaccccgucgccaagggcuccuacaacaacaccuccggcgagcagaugcucaucaucuggggcguccaccaccccaacgacgaggccgagcagcgcgcccucuaccagaaggucggcaccuacgucuccgccuccaccuccacccucaacaagcgcuccauccccgagaucgccgcccgccccaaggucaacggccucggcucccgcauggaguucuucuggacccuccucgacgucugggacaccaucaacuucgaguccaccggcaaccucgucguccccgaguacggcuucaagaucuccaagcgcggcuccuccggcaucaugaagaccgagggcacccucggcaacugcgagaccaagugccagaccccccucggcgccaucaacaccacccuccccuuccacaacguccacccccucaccaucggcgagugccccaaguacgucaaguccgagaagcucguccucgccaccggccuccgcaacgucccccagaucgagucccgcggccucuucggcgccaucgccggcuucaucgagggcggcuggcagggcauggucgacggcugguacggcuaccaccacuccaacgaccagggcuccggcuacgccgccgacaaggaguccacccagaaggccuucgacggcaucaccaacaaggucaacuccgucaucgagaagaugaacacccaguucgagaccgucggcaaggaguucaacaaccucgagaagcgccucgagaaccucaacaagaagauggaggacggcuuccucgacgucuggaccuacaacgccgagcuccucguccucauggagaacgagcgcacccucgacuuccacgacuccaacgucaagaaccucuacgagaagguccgcaugcagcuccgcgacaacgucaaggagcucggcaacggcugcuucgaguucuaccacaagugcgacgacgagugcaugaacuccgucaagaacggcaccuacgacuaccccaaguacgaggaggaguccaagcucaagcgcaacgagaucaagggcgucaagcucuccuccaugggcgucuaccagauccucgccaucuacgccaccgucgccggcucccucucccucgccaucauggucgccggcaucuccuucuggaugugcuccaacggcucccuccagugccgcaucugcaucuga

SEQ ID NO: 98337 - RNA, 1701 nt, Artificial Sequence
  derived and/or modified CDS sequence (opt2) from hemagglutinin__InfluenzaA__ACD85440
augaagaccaucaucgcccucuccuacauccucugccucgucuucgcccagaagcuccccggcaacgacaacuccaccgccacccucugccucggccaccacgccguccccaacggcaccaucgucaagaccaucaccaacgaccagaucgaggucaccaacgccaccgagcucguccaguccuccuccaccggcgagaucugcgacuccccccaccagauccucgacggcgagaacugcacccucaucgacgcccuccucggcgacccccagugcgacggcuuccagaacaagaagugggaccucuucgucgagcgcuccaaggccuacuccaacugcuaccccuacgacguccccgacuacgccucccuccgcucccucgucgccuccuccggcacccucgaguucaacaacgaguccuucaacuggaccggcgucacccagaacggcaccuccuccgccugcauccgccgcuccaacaacuccuucuucucccgccucaacuggcucacccaccucaaguucaaguaccccgcccucaacgucaccaugcccaacaacgagaaguucgacaagcucuacaucuggggcguccaccaccccggcaccgacaacgaccagaucuuccucuacgcccaggccuccggccgcaucaccgucuccaccaagcgcucccagcagaccgucauccccaacaucggcucccgcccccgcguccgcaacauccccucccgcaucuccaucuacuggaccaucgucaagcccggcgacauccuccucaucaacuccaccggcaaccucaucgccccccgcggcuacuucaagauccgcuccggcaaguccuccaucaugcgcuccgacgcccccaucggcaagugcaacuccgagugcaucacccccaacggcuccauccccaacgacaagcccuuccagaacgucaaccgcaucaccuacggcgccugcccccgcuacgucaagcagaacacccucaagcucgccaccggcaugcgcaacguccccgagaagcagacccgcggcaucuucggcgccaucgccggcuucaucgagaacggcugggagggcauggucgacggcugguacggcuuccgccaccagaacuccgagggcaucggccaggccgccgaccucaaguccacccaggccgccaucgaccagaucaacggcaagcucaaccgccucaucggcaagaccaacgagaaguuccaccagaucgagaaggaguucuccgaggucgagggccgcauccaggaccucgagaaguacgucgaggacaccaagaucgaccucugguccuacaacgccgagcuccucgucgcccucgagaaccagcacaccaucgaccucaccgacuccgagaugaacaagcucuucgagaagaccaagaagcagcuccgcgagaacgccgaggaccucggcaacggcugcuucaagaucuaccacaagugcgacaacgccugcaucggcuccauccgcaacggcaccuacgaccacgacgucuaccgcgacgaggcccucaacaaccgcuuccagaucaagggcgucgagcucaaguccggcuacaaggacuggauccucuggaucuccuucgccaucuccugcuuccuccucugcgucgcccuccucggcuucaucaugugggccugccagaagggcaacauccgcugcaacaucugcaucuga

SEQ ID NO: 98338 - RNA, 1701 nt, Artificial Sequence; identical to SEQ ID NO: 98337
  derived and/or modified CDS sequence (opt2) from hemagglutinin__InfluenzaA__ACD85451

SEQ ID NO: 98339 - RNA, 1701 nt, Artificial Sequence; identical to SEQ ID NO: 98337
  derived and/or modified CDS sequence (opt2) from hemagglutinin__InfluenzaA__ACD85462

SEQ ID NO: 98340 - RNA, 1701 nt, Artificial Sequence; identical to SEQ ID NO: 97964
  derived and/or modified CDS sequence (opt2) from hemagglutinin__InfluenzaA__ACD85473

SEQ ID NO: 98341 - RNA, 1701 nt, Artificial Sequence
  derived and/or modified CDS sequence (opt2) from hemagglutinin__InfluenzaA__ACD85484
augaagaccaucaucgcccucuccuacauccucugccucgucuucgcccagaagcuccccggcaacgacaacuccaccgccacccucugccucggccaccacgccguccccaacggcaccaucgucaagaccaucaccaacgaccagaucgaggucaccaacgccaccgagcucguccaguccuccuccaccggcgagaucugcgacuccccccaccagauccucgacggcgagaacugcacccucaucgacgcccuccucggcgacccccagugcgacggcuuccagaacaagaagugggaccucuucgucgagcgcuccaaggccuacuccaacugcuaccccuacgacguccccgacuacgccucccuccgcucccucgucgccuccuccggcacccucgaguucaacaacgaguccuucaacuggaccggcgucacccagaacggcaccuccuccgccugcauccgccgcuccaacaacuccuucuucucccgccucaacuggcucacccaccucaaguucaaguaccccgcccucaacgucaccaugcccaacaacgaggaguucgacaagcucuacaucuggggcguccaccaccccggcaccgacaacgaccagaucuuccucuacgcccaggccuccggccgcaucaccgucuccaccaagcgcucccagcagaccgucauccccaacaucggcucccgcccccgcguccgcaacauccccucccgcaucuccaucuacuggaccaucgucaagcccggcgacauccuccucaucaacuccaccggcaaccucaucgccccccgcggcuacuucaagauccgcuccggcaaguccuccaucaugcgcuccgacgcccccaucggcaagugcaacuccgagugcaucacccccaacggcuccauccccaacgacaagcccuuccagaacgucaaccgcaucaccuacggcgccugcccccgcuacgucaagcagaacacccucaagcucgccaccggcaugcgcaacguccccgagaagcagacccgcggcaucuucggcgccaucgccggcuucaucgagaacggcugggagggcauggucgacggcugguacggcuuccgccaccagaacuccgagggcaucggccaggccgccgaccucaaguccacccaggccgccaucgaccagaucaacggcaagcucaaccgccucaucggcaagaccaacgagaaguuccaccagaucgagaaggaguucuccgaggucgagggccgcauccaggaccucgagaaguacgucgaggacaccaagaucgaccucugguccuacaacgccgagcuccucgucgcccucgagaaccagcacaccaucgaccucaccgacuccgagaugaacaagcucuucgagaagaccaagaagcagcuccgcgagaacgccgaggacaugggcaacggcugcuucaagaucuaccacaagugcgacaacgccugcaucggcuccauccgcaacggcaccuacgaccacgacgucuaccgcgacgaggcccucaacaaccgcuuccagaucaagggcgucgagcucaaguccggcuacaaggacuggauccucuggaucuccuucgccaucuccugcuuccuccucugcgucgcccuccucggcuucaucaugugggccugccagaagggcaacauccgcugcaacaucugcaucuga

SEQ ID NO: 98342 - RNA, 1701 nt, Artificial Sequence; identical to SEQ ID NO: 97964
  derived and/or modified CDS sequence (opt2) from hemagglutinin__InfluenzaA__ACD85495

SEQ ID NO: 98343 - RNA, 1701 nt, Artificial Sequence
  derived and/or modified CDS sequence (opt2) from hemagglutinin__InfluenzaA__ACD85528
augaagaccaucaucgcccucuccuacauccucugccucgucuucgcccagaagcuccccggcaacgacaacuccaccgccacccucugccucggccaccacgccguccccaacggcaccaucgucaagaccaucaccaacgaccagaucgaggucaccaacgccaccgagcucguccaguccuccuccaccggcgagaucugcgacuccccccaccagauccucgacggcgagaacugcacccucaucgacgcccuccucggcgacccccagugcgacggcuuccagaacaagaagugggaccucuucgucgagcgcuccaaggccuacuccaacugcuaccccuacgacguccccgacuacgucucccuccgcucccucgucgccuccuccggcacccucgaguucaacaacgaguccuucaacuggaccggcgucacccagaacggcaccuccuccgccugcauccgccgcuccaacaaguccuucuucucccgccucaacuggcucacccaccucaaguucaaguaccccgcccucaacgucaccaugcccaacaacgagaacuucgacaagcucuacaucuggggcguccaccaccccggcaccgacaacgaccagaucuuccucuacgcccaggccuccggccgcaucaccgucuccaccaagcgcucccagcagaccgucauccccaacaucggcucccgcccccgcguccgcaacauccccucccgcaucuccaucuacuggaccaucgucaagcccggcgacauccuccucaucaacuccaccggcaaccucaucgccccccgcggcuacuucaagauccgcuccggcaaguccuccaucaugcgcuccgacgcccccaucggcaagugcaacuccgagugcaucacccccaacggcuccauccccaacgacaagcccuuccagaacgucaaccgcaucaccuacggcgccugcccccgcuacgucaagcagaacacccucaagcucgccaccggcaugcgcaacguccccgagaagcagacccgcggcaucuucggcgccaucgccggcuucaucgagaacggcugggagggcauggucgacggcugguacggcuuccgccaccagaacuccgagggcaucggccaggccgccgaccucaaguccacccaggccgccaucgaccagaucaacggcaagcucaaccgccucaucggcaagaccaacgagaaguuccaccagaucgagaaggaguucuccgaggucgagggccgcauccaggaccucgagaaguacgucgaggacaccaagaucgaccucugguccuacaacgccgagcuccucgucgcccucgagaaccagcacaccaucgaccucaccgacuccgagaugaacaagcucuucgagaagaccaagaagcagcuccgcgagaacgccgaggaccucggcaacggcugcuucaagaucuaccacaagugcgacaacgccugcaucggcuccauccgcaacggcaccuacgaccacgacgucuaccgcgacgaggcccucaacaaccgcuuccagaucaagggcgucgagcucaaguccggcuacaaggacuggauccucuggaucuccuucgccaucuccugcuuccuccucugcgucgcccuccucggcuucaucaugugggccugccagaagggcaacauccgcugcaacaucugcaucuga

SEQ ID NO: 98344 - RNA, 1701 nt, Artificial Sequence
  derived and/or modified CDS sequence (opt2) from hemagglutinin__InfluenzaA__ACD85539
augaagaccaucaucgcccucuccuacauccucugccucgucuucgcccagaagcuccccggcaacgacaacuccaccgccacccucugccucggccaccacgccguccccaacggcaccaucgucaagaccaucaccaacgaccagaucgaggucaccaacgccaccgagcucguccaguccuccuccaccggcgagaucugcgacuccccccaccagauccucgacggcgagaacugcacccucaucgacgcccuccucggcgacccccagugcgacggcuuccagaacaagaagugggaccucuucgucgagcgcuccaaggccuacuccaacugcuaccccuacgacguccccgacuacgccucccuccgcucccucgucgccuccuccggcacccucgaguucaacaacgaguccuucaacuggaccggcgucacccagaacggcaccuccuccgccugcauccgccgcaccaacaacuccuucuucucccgccucaacuggcucacccaccucaaguucaaguaccccgcccucaacgucaccaugcccaacaacgagaaguucgacaagcucuacaucuggggcguccaccaccccggcaccgacaacgaccagaucuuccucuacgcccaggccuccggccgcaucaccgucuccaccaagcgcucccagcagaccgucauccccaacaucggcucccgcccccgcguccgcaacauccccucccgcaucuccaucuacuggaccaucgucaagcccggcgacauccuccucaucaacuccaccggcaaccucaucgccccccgcggcuacuucaagauccgcuccggcaaguccuccaucaugcgcuccgacgcccccaucggcaagugcaacuccgagugcaucacccccaacggcuccauccccaacgacaagcccuuccagaacgucaaccgcaucaccuacggcgccugcccccgcuacgucaagcagaacacccucaagcucgccaccggcaugcgcaacguccccgagaagcagacccgcggcaucuucggcgccaucgccggcuucaucgagaacggcugggagggcauggucgacggcugguacggcuuccgccaccagaacuccgagggcaucggccaggccgccgaccucaaguccacccaggccgccaucgaccagaucaacggcaagcucaaccgccucaucggcaagaccaacgagaaguuccaccagaucgagaaggaguucuccgaggucgagggccgcauccaggaccucgagaaguacgucgaggacaccaagaucgaccucugguccuacaacgccgagcuccucgucgcccucgagaaccagcacaccaucgaccucaccgacuccgagaugaacaagcucuucgagaagaccaagaagcagcuccgcgagaacgccgaggacaugggcaacggcugcuucaagaucuaccacaagugcgacaacgccugcaucggcuccauccgcaacggcaccuacgaccacgacgucuaccgcgacgaggcccucaacaaccgcuuccagaucaagggcgucgagcucaaguccggcuacaaggacuggauccucuggaucuccuucgccaucuccugcuuccuccucugcgucgcccuccucggcuucaucaugugggccugccagaagggcaacauccgcugcaacaucugcaucuga

SEQ ID NO: 98345 - RNA, 1701 nt, Artificial Sequence
  derived and/or modified CDS sequence (opt2) from hemagglutinin__InfluenzaA__ACD85550
augaagaccaucaucgcccucuccuacauccucugccucgucuucgcccagaagcuccccggcaacgacaacuccaccgccacccucugccucggccaccacgccguccccaacggcaccaucgucaagaccaucaccaacgaccagaucgaggucaccaacgccaccgagcucguccaguccuccuccaccggcgagaucugcgacuccccccaccagauccucgacggcgagaacugcacccucaucgacgcccuccucggcgacccccagugcgacggcuuccagaacaagaagugggaccucuucgucgagcgcuccaaggccuacuccaacugcuaccccuacgacguccccgacuacgccucccuccgcucccucgucgccuccuccggcacccucgaguucaacaacgaguccuucaacuggaccggcgucacccagaacggcaccuccuccgccugcauccgccgcuccaacaacuccuucuucucccgccucaacuggcucacccaccucaaguucaaguaccccgcccucaacgucaccaugcccaacaacgagaaguucgacaagcucuacaucuggggcguccaccaccccggcaccgacaacgaccagaucuuccucuacgcccaggccuccggccgcaucaccgucuccaccaagcgcucccagcagaccgucauccccaacaucggcucccgcccccgcguccgcaacauccccucccgcaucuccaucuacuggaccaucgucaagcccggcgacauccuccucaucaacuccaccggcaaccucaucgccccccgcggcuacuucaagauccgcuccggcaaguccuccaucaugcgcuccgacgcccccaucggcaagugcaacuccgagugcaucacccccaacggcuccauccccaacgacaagcccuuccagaacgucaaccgcaucaccuacggcgccugcccccgcuacgucaagcagaacacccucaagcucgccaccggcaugcgcaacguccccgagaagcagacccgcggcaucuucggcgccaucgccggcuucaucgagaacggcugggagggcauggucgacggcugguacggcuuccgccaccagaacuccgagggcaucggccaggccgccgaccucaaguccacccaggccgccaucgaccagaucaacggcaagcucaaccgccucaucggcaagaccaacgagaaguuccaccagaucgagaaggaguucuccgaggucgagggccgcauccaggaccucgagaaguacgucgaggacaccaagaucgaccucugguccuacaacgccgagcuccucgucgcccucgagaaccagcacaccaucgaccucaccgacuccgagaugaacaagcucuucgagaagaccaagaagcagcuccgcgagaacgccgaggaccucggcaacggcugcuucaagaucuaccacaagugcgacaacgccugcaucggcuccauccgcaacggcaccuacgaccacgacgucuaccgcgacgaggcccucaacaaccgcuuccagaucaagggcgucgagcucaaguccggcuacaaggacuggauccucuggaucuccuucgccauguccugcuuccuccucugcgucgcccuccucggcuucaucaugugggccugccagaagggcaacauccgcugcaacaucugcaucuga

SEQ ID NO: 98346 - RNA, 1701 nt, Artificial Sequence; identical to SEQ ID NO: 97964
  derived and/or modified CDS sequence (opt2) from hemagglutinin__InfluenzaA__ACD85561

SEQ ID NO: 98347 - RNA, 1701 nt, Artificial Sequence
  derived and/or modified CDS sequence (opt2) from hemagglutinin__InfluenzaA__ACD85572
augaagaccaucaucgcccucuccuacauccucugccucgucuucgcccagaagcuccccggcaacgacaacuccaccgccacccucugccucggccaccacgccguccccaacggcaccaucgucaagaccaucaccaacgaccagaucgaggucaccaacgccaccgagcucguccaguccuccuccaccggcgagaucugcgacuccccccaccagauccucgacggcgagaacugcacccucaucgacgcccuccucggcgacccccagugcgacggcuuccagaacaagaagugggaccucuucgucgagcgcuccaaggccuacuccaacugcuaccccuacgacguccccgacuacgccucccuccgcucccucgucgccuccuccggcacccucgaguucaacaacgaguccuucaacuggaccggcgucacccagaacggcaccuccuccgccugcauccgccgcuccaacaacuccuucuucucccgccucaacuggcucacccaccucaaguucaaguaccccgcccucaacgucaccaugcccaacaacgagaaguucgacaagcucuacaucuggggcguccaccaccccggcaccgacaacgaccagaucuuccucuacgcccaggccuccggccgcaucaccgucuccaccaagcgcucccagcagaccgucauccccaacaccggcucccgcccccgcguccgcaacauccccucccgcaucuccaucuacuggaccaucgucaagcccggcgacauccuccucaucaacuccaccggcaaccucaucgccccccgcggcuacuucaagauccgcuccggcaaguccuccaucaugcgcuccgacgcccccaucggcaagugcaacuccgagugcaucacccccaacggcuccauccccaacgacaagcccuuccagaacgucaaccgcaucaccuacggcgccugcccccgcuacgucaagcagaacacccucaagcucgccaccggcaugcgcaacguccccgagaagcagacccgcggcaucuucggcgccaucgccggcuucaucgagaacggcugggagggcauggucgacggcugguacggcuuccgccaccagaacuccgagggcaucggccaggccgccgaccucaaguccacccaggccgccaucgaccagaucaacggcaagcucaaccgccucaucggcaagaccaacgagaaguuccaccagaucgagaaggaguucuccgaggucgagggccgcauccaggaccucgagaaguacgucgaggacaccaagaucgaccucugguccuacaacgccgagcuccucgucgcccucgagaaccagcacaccaucgaccucaccgacuccgagaugaacaagcucuucgagaagaccaagaagcagcuccgcgagaacgccgaggacaugggcaacggcugcuucaagaucuaccacaagugcgacaacgccugcaucggcuccauccgcaacggcaccuacgaccacgacgucuaccgcgacgaggcccucaacaaccgcuuccagaucaagggcgucgagcucaaguccggcuacaaggacuggauccucuggaucuccuucgccaucuccugcuuccuccucugcgucgcccuccucggcuucaucaugugggccugccagaagggcaacauccgcugcaacaucugcaucuga

SEQ ID NO: 98348 - RNA, 1701 nt, Artificial Sequence; identical to SEQ ID NO: 98344
  derived and/or modified CDS sequence (opt2) from hemagglutinin__InfluenzaA__ACD85583

SEQ ID NO: 98349 - RNA, 1701 nt, Artificial Sequence
  derived and/or modified CDS sequence (opt2) from hemagglutinin__InfluenzaA__ACD93579
augaagaccaucaucgcccucuccuacauccucugccucgucuucgcccagaagcuccccggcaacgacaacuccaccgccacccucugccucggccaccacgccguccccaacggcaccaucgucaagaccaucaccaacgaccagaucgaggucaccaacgccaccgagcucguccaguccuccuccaccggcgagaucugcgacuccccccaccagauccucgacggcgagaacugcacccucaucgacgcccuccucggcgacccccagugcgacggcuuccagaacaagaagugggaccucuucgucgagcgcuccaaggccuacuccaacugcuaccccuacgacguccccgacuacgccucccuccgcucccucgucgccuccuccggcacccucgaguucaacaacgaguccuucaacuggaccggcgucacccagaacggcaccuccuccgccugcauccgccgcuccaacaacuccuucuucucccgccucaacuggcucacccaccucaaguucaaguaccccgcccucaacgucaccaugcccaacaacgagaaguucgacaagcucuacaucuggggcguccaccaccccggcaccgacaacgaccagaucuuccucuacgcccaggccuccggccgcaucaccgucuccaccaagcgcucccagcagaccgucauccccaacaucggcucccgcccccgcguccgcaacauccccucccgcaucuccaucuacuggaccaucgucaagcccggcgacauccuccucaucaacuccaccggcaaccucaucgccccccgcggcuacuucaagauccgcuccggcaaguccuccaucaugcgcuccgacgcccccaucggcaagugcaacuccgagugcaucacccccaacggcuccauccccaacgacaagcccuuccagaacgucaaccgcaucaccuacggcgccugcccccgcuacgucaagcagaacacccucaagcucgccaccggcaugcgcaacguccccgagaagcagacccgcggcaucuucggcgccaucgccggcuucaucgagaacggcugggagggcauggucgacggcugguacggcuuccgccaccagaacuccgagggcaucggccaggccgccgaccucaaguccacccaggccgccaucgaccagaucaacggcaagcucaaccgccucaucggcaagaccaacgagaaguuccaccagaucgagaaggaguucuccgaggucgagggccgcauccaggaccucgagaaguacgucgaggacaccaagaucgaccucugguccuacaacgccgagcuccucgucgcccucgagaaccagcacaccaucgaccucaccgacuccgagaugaacaagcucuucgagaagaccaagaagcagcuccgcgagaacgccgaggacaugggcaacggcugcuucaagaucuaccacaagugcgacaacaccugcaucggcuccauccgcaacggcaccuacgaccacgacgucuaccgcgacgaggcccucaacaaccgcuuccagaucaagggcgucgagcucaaguccggcuacaaggacuggauccucuggaucuccuucgccaucuccugcuuccuccucugcgucgcccuccucggcuucaucaugugggccugccagaagggcaacauccgcugcaacaucugcaucuga

SEQ ID NO: 98350 - RNA, 1701 nt, Artificial Sequence; identical to SEQ ID NO: 96666
  derived and/or modified CDS sequence (opt2) from hemagglutinin__InfluenzaA__ACF09402

SEQ ID NO: 98351 - RNA, 1701 nt, Artificial Sequence
  derived and/or modified CDS sequence (opt2) from hemagglutinin__InfluenzaA__ACF22159
augaagaccaucaucgcccucuccuacauccucugccucgucuucgcccagaagcuccccggcaacgacaacuccaccgccacccucugccucggccaccacgccguccccaacggcaccaucgucaagaccaucaccaacgaccagaucgaggucaccaacgccaccgagcucguccagaacuccuccaccggcggcaucugcgacuccccccaccagauccucgacggcgagaacugcacccucaucgacgcccuccucggcgacccccagugcgacggcuuccagaacaagaagugggaccucuucgucgagcgcuccaaggccuacuccaacugcuaccccuacgacguccccgacuacgccucccuccgcucccucgucgccuccuccggcacccucgaguucaacaacgaguccuucaacuggaccggcgucacccagaacggcaccuccuccgccugcaagcgccgcuccaacaaguccuucuucucccgccucaacuggcucacccaccucaaguacaaguaccccgcccucaacgucaccaugcccaacaacgagaaguucgacaagcucuacaucuggggcguccaccaccccggcaccgacuccgaccagaucucccucuacgcccaggccuccggccgcaucaccgucuccaccaagcgcucccagcagaccgucauccccaacaucggcuuccgcccccgcguccgcgacgucuccucccgcaucuccaucuacuggaccaucgucaagcccggcgacauccuccucaucaacuccaccggcaaccucaucgccccccgcggcuacuucaagauccgcuccggcaaguccuccaucaugcgcuccgacgcccccaucggcaagugcaacuccgagugcaucacccccaacggcuccauccccaacgacaagcccuuccagaacgucaaccgcaucaccuacggcgccugcccccgcuacgucaagcagaacacccucaagcucgccaccggcaugcgcaacguccccgagaagcagacccgcggcaucuucggcgccaucgccggcuucaucgagaacggcugggagggcauggucgacggcugguacggcuuccgccaccagaacuccgagggcaccggccaggccgccgaccucaaguccacccaggccgccaucaaccagaucaacggcaagcucaaccgccucaucggcaagaccaacgagaaguuccaccagaucgagaaggaguucuccgaggucgagggccgcauccaggaccucgagaaguacgucgaggacaccaagaucgaccucugguccuacaacgccgagcuccucgucgcccucgagaaccagcacaccaucgaccucaccgacuccgagaugaacaagcucuucgagcgcaccaagaagcagcuccgcgagaacgccgaggacaugggcaacggcugcuucaagaucuaccacaagugcgacaacgccugcaucgaguccauccgcaacggcaccuacgaccacgacgucuaccgcgacgaggcccucaacaaccgcuuccagaucaagggcgucgagcucaaguccggcuacaaggacuggauccucuggaucuccuucgccaucuccugcuuccuccucugcgucgcccuccucggcuucaucaugugggccugccagaagggcaacauccgcugcaacaucugcaucuga

SEQ ID NO: 98352 - RNA, 1701 nt, Artificial Sequence
  derived and/or modified CDS sequence (opt2) from hemagglutinin__InfluenzaA__ACF22188
augaagaccaucaucgcccucuccuacaucuucugccucgcccucggccaggaccuccccggcaacgacaacuccaccgccacccucugccucggccaccacgccguccccaacggcacccucgucaagaccaucaccgacgaccagaucgaggucaccaacgccaccgagcucguccaguccuccuccaccggcaagaucugcaacaacccccaccgcauccucgacggcaucgacugcacccucaucgacgcccuccucggcgacccccacugcgacgucuuccagaacgagaccugggaccucuucgucgagcgcuccaaggccuucuccaacugcuaccccuacgacguccccgacuacgccucccuccgcucccucgucgccuccuccggcacccucgaguucaucaccgagggcuucaccuggaccggcgucacccagaacggcggcuccaacgccugcaagcgcggccccggcuccggcuucuucucccgccucaacuggcucaccaaguccggcuccaccuaccccguccucaacgucaccaugcccaacaacgacaacuucgacaagcucuacaucuggggcguccaccaccccuccaccaaccaggagcagaccucccucuacguccaggccuccggccgcgucaccgucuccacccgccgcucccagcagaccaucauccccaacaucuggucccgccccuggguccgcggccucuccucccgcaucuccaucuacuggaccaucgucaagcccggcgacguccucgucaucaacuccaacggcaaccucaucgccccccgcggcuacuucaagaugcgcaccggcaaguccuccaucaugcgcuccgacgcccccaucgacaccugcaucuccgagugcaucacccccaacggcuccauccccaacgacaagcccuuccagaacgucaacaagaucaccuacggcgccugccccaaguacgucaagcagaacacccucaagcucgccaccggcaugcgcaacguccccgagaagcagacccgcggccucuucggcgccaucgccggcuucaucgagaacggcugggagggcaugaucgacggcugguacggcuuccgccaccagaacuccgagggcaccggccaggccgccgaccucaaguccacccaggccgccaucgaccagaucaacggcaagcucaaccgcgucaucgagaagaccaacgagaaguuccaccagaucgagaaggaguucuccgaggucgagggccgcauccaggaccucgagaaguacgucgaggacaccaagaucgaccucugguccuacaacgccgagcuccucgucgcccucgagaaccagcacaccaucgaccucaccgacuccgagaugaacaagcucuucgagaagacccgccgccagcuccgcgagaacgccgaggacaugggcaacggcugcuucaagaucuaccacaagugcgacaacgccugcaucgaguccauccgcaacggcaacuacgaccacgacgucuaccgcgacgaggcccucaacaaccgcuuccagaucaagggcgucgagcucaaguccggcuacaaggacuggauccucuggaucuccuucgccaucuccugcuuccuccucugcgucguccuccucggcuucaucaugugggccugccagcgcggcaacauccgcugcaacaucugcaucuga

SEQ ID NO: 98353 - RNA, 1701 nt, Artificial Sequence; identical to SEQ ID NO: 98352
  derived and/or modified CDS sequence (opt2) from hemagglutinin__InfluenzaA__ACF22199

SEQ ID NO: 98354 - RNA, 1701 nt, Artificial Sequence
  derived and/or modified CDS sequence (opt2) from hemagglutinin__InfluenzaA__ACF22210
augaagaccaucaucgcccucuccuacaucuucugccucgcccucggccaggaccuccccggcaacgacaacuccaccgccacccucugccucggccaccacgccguccccaacggcacccucgucaagaccaucaccgacgaccagaucgaggucaccaacgccaccgagcucguccaguccuccuccaccggcaagaucugcaacaacccccaccgcauccucgacggcaucgacugcacccucaucgacgcccuccucggcgacccccacugcgacgucuuccagaacgagaccugggaccucuucgucgagcgcuccaaggccuucuccaacugcuaccccuacgacguccccgacuacgccucccuccgcucccucgucgccuccuccggcacccucgaguucaucaccgagggcuucaccuggaccggcgucacccagaacggcggcuccaacgccugcaagcgcggccccggcuccggcuucuucucccgccucaacuggcucaccaaguccggcuccaccuaccccguccucaacgucaccaugcccaacaacgacaacuucgacaagcucuacaucuggggcguccaccaccccuccaccaaccaggagcagaccucccucuacguccaggccuccggccgcgucaccgucuccacccgccgcucccagcagaccaucauccccaacaucggcucccgccccuggguccgcggccucuccucccgcaucuccaucuacuggaccaucgucaagcccggcgacguccucgucaucaacuccaacggcaaccucaucgccccccgcggcuacuucaagaugcgcaccggcaaguccuccaucaugcgcuccgacgcccccaucgacaccugcaucuccgagugcaucacccccaacggcuccauccccaacgacaagcccuuccagaacgucaacaagaucaccuacggcgccugccccaaguacgucaagcagaacacccucaagcucgccaccggcaugcgcaacguccccgagaagcagacccgcggccucuucggcgccaucgccggcuucaucgagaacggcugggagggcaugaucgacggcugguacggcuuccgccaccagaacuccgagggcaccggccaggccgccgaccucaaguccacccaggccgccaucgaccagaucaacggcaagcucaaccgcgucaucgagaagaccaacgagaaguuccaccagaucgagaaggaguucuccgaggucgagggccgcauccaggaccucgagaaguacgucgaggacaccaagaucgaccucugguccuacaacgccgagcuccucgucgcccucgagaaccagcacaccaucgaccucaccgacuccgagaugaacaagcucuucgagaagacccgccgccagcuccgcgagaacgccgaggacaugggcaacggcugcuucaagaucuaccacaagugcgacaacgccugcaucgaguccauccgcaacggcaccuacgaccacgacgucuaccgcgacgaggcccucaacaaccgcuuccagaucaagggcgucgagcucaaguccggcuacaaggacuggauccucuggaucuccuucgccaucuccugcuuccuccucugcgucguccuccucggcuucaucaugugggccugccagcgcggcaacauccgcugcaacaucugcaucuga

SEQ ID NO: 98355 - RNA, 1701 nt, Artificial Sequence; identical to SEQ ID NO: 98354
  derived and/or modified CDS sequence (opt2) from hemagglutinin__InfluenzaA__ACF22221

SEQ ID NO: 98356 - RNA, 1701 nt, Artificial Sequence; identical to SEQ ID NO: 98354
  derived and/or modified CDS sequence (opt2) from hemagglutinin__InfluenzaA__ACF22232

SEQ ID NO: 98357 - RNA, 1701 nt, Artificial Sequence; identical to SEQ ID NO: 98354
  derived and/or modified CDS sequence (opt2) from hemagglutinin__InfluenzaA__ACF22243

SEQ ID NO: 98358 - RNA, 1701 nt, Artificial Sequence; identical to SEQ ID NO: 98354
  derived and/or modified CDS sequence (opt2) from hemagglutinin__InfluenzaA__ACF22254

SEQ ID NO: 98359 - RNA, 1701 nt, Artificial Sequence; identical to SEQ ID NO: 98354
  derived and/or modified CDS sequence (opt2) from hemagglutinin__InfluenzaA__ACF22265

SEQ ID NO: 98360 - RNA, 1701 nt, Artificial Sequence; identical to SEQ ID NO: 98354
  derived and/or modified CDS sequence (opt2) from hemagglutinin__InfluenzaA__ACF22276

SEQ ID NO: 98361 - RNA, 1701 nt, Artificial Sequence; identical to SEQ ID NO: 98354
  derived and/or modified CDS sequence (opt2) from hemagglutinin__InfluenzaA__ACF22287

SEQ ID NO: 98362 - RNA, 1701 nt, Artificial Sequence; identical to SEQ ID NO: 98354
  derived and/or modified CDS sequence (opt2) from hemagglutinin__InfluenzaA__ACF22298

SEQ ID NO: 98363 - RNA, 1701 nt, Artificial Sequence; identical to SEQ ID NO: 98354
  derived and/or modified CDS sequence (opt2) from hemagglutinin__InfluenzaA__ACF22320

SEQ ID NO: 98364 - RNA, 1701 nt, Artificial Sequence; identical to SEQ ID NO: 98354
  derived and/or modified CDS sequence (opt2) from hemagglutinin__InfluenzaA__ACF22342

SEQ ID NO: 98365 - RNA, 1701 nt, Artificial Sequence
  derived and/or modified CDS sequence (opt2) from hemagglutinin__InfluenzaA__ACF22364
augaagaccaucaucgcccucuccuacaucuucugccucgcccucggccaggaccuccccggcaacgacaacuccaccgccacccucugccucggccaccacgccguccccaacggcacccucgucaagaccaucaccgacgaccagaucgaggucaccaacgccaccgagcucguccaguccuccuccaccggcaagaucugcaacaacccccaccgcauccucgacggcaucgacugcacccucaucgacgcccuccucggcgacccccacugcgacgucuuccagaacgagaccugggaccucuucgucgagcgcuccaaggccuucuccaacugcuaccccuacgacguccccgacuacgccucccuccgcucccucgucgccuccuccggcacccucgaguucaucaccgagggcuucaccuggaccggcgucacccagaacggcggcuccaacgccugcaagcgcggccccggcuccggcuucuucucccgccucaacuggcucaccaaguccggcuccaccuaccccguccucaacgucaccaugcccaacaacgacaacuucgacaagcucuacaucuggggcguccaccaccccuccaccaaccaggagcagaccucccucuacguccaggccuccggccgcgucaccgucuccacccgccgcucccagcagaccaucauccccaacaucgagucccgccccuggguccgcggccucuccucccgcaucuccaucuacuggaccaucgucaagcccggcgacguccucgucaucaacuccaacggcaaccucaucgccccccgcggcuacuucaagaugcgcaccggcaaguccuccaucaugcgcuccgacgcccccaucgacaccugcaucuccgagugcaucacccccaacggcuccauccccaacgacaagcccuuccagaacgucaacaagaucaccuacggcgccugccccaaguacgucaagcagaacacccucaagcucgccaccggcaugcgcaacguccccgagaagcagacccgcggccucuucggcgccaucgccggcuucaucgagaacggcugggagggcaugaucgacggcugguacggcuuccgccaccagaacuccgagggcaccggccaggccgccgaccucaaguccacccaggccgccaucgaccagaucaacggcaagcucaaccgcgucaucgagaagaccaacgagaaguuccaccagaucgagaaggaguucuccgaggucgagggccgcauccaggaccucgagaaguacgucgaggacaccaagaucgaccucugguccuacaacgccgagcuccucgucgcccucgagaaccagcacaccaucgaccucaccgacuccgagaugaacaagcucuucgagaagacccgccgccagcuccgcgagaacgccgaggacaugggcaacggcugcuucaagaucuaccacaagugcgacaacgccugcaucgaguccauccgcaacggcaccuacgaccacgacgucuaccgcgacgaggcccucaacaaccgcuuccagaucaagggcgucgagcucaaguccggcuacaaggacuggauccucuggaucuccuucgccaucuccugcuuccuccucugcgucguccuccucggcuucaucaugugggccugccagcgcggcaacauccgcugcaacaucugcaucuga

SEQ ID NO: 98366 - RNA, 1701 nt, Artificial Sequence; identical to SEQ ID NO: 98344
  derived and/or modified CDS sequence (opt2) from hemagglutinin__InfluenzaA__ACF22408

SEQ ID NO: 98367 - RNA, 1701 nt, Artificial Sequence; identical to SEQ ID NO: 97964
  derived and/or modified CDS sequence (opt2) from hemagglutinin__InfluenzaA__ACF41669

SEQ ID NO: 98368 - RNA, 1698 nt, Artificial Sequence; identical to SEQ ID NO: 97950
  derived and/or modified CDS sequence (opt2) from hemagglutinin__InfluenzaA__ACF41680

SEQ ID NO: 98369 - RNA, 1689 nt, Artificial Sequence
  derived and/or modified CDS sequence (opt2) from hemagglutinin__InfluenzaA__ACF41691
auggccaucaucuaccucauccuccucuucaccgccguccgcggcgaccagaucugcaucggcuaccacgccaacaacuccaccgagaaggucgacaccauccucgagcgcaacgucaccgucacccacgccaaggacauccucgagaagacccacaacggcaagcucugcaagcucaacggcauccccccccucgagcucggcgacugcuccaucgccggcuggcuccucggcaaccccgagugcgaccgccuccuccgcguccccgagugguccuacaucauggagaaggagaacccccgcuacucccucugcuaccccggcuccuucaacgacuacgaggagcucaagcaccuccucuccuccgucaagcacuucgagaaggucaagauccuccccaaggacggcuggacccagcacgagaccgacggcggcuccaaggccugcgccgucuccggcaagcccuccuucuuccgcaacauggucuggcucaccaagaagggccccaacuaccccgucgccaagcgcuccuacaacaacaccuccggcgagcagaugcucaucaucuggggcguccaccaccccaacgacgaggccgagcagcgcgcccucuaccaggaggucggcaccuacgucuccgccuccaccuccacccucaacaagcgcuccacccccgagaucgccgcccgccccaaggucuccggccucggcucccgcauggaguucuccuggacccuccucgacgucugggacaccaucuccuucgaguccaccggcaaccucgucgcccccgaguacggcuucaagaucuccaagcgcggcuccuccggcaucaugaagaccgagggcacccucggcaacugcgagaccaagugccagaccccccucggcgccaucaacaccacccuccccuuccacaacguccacccccucaccaucggcgagugccccaaguacgucaaguccgagaagcucguccucgccaccggccuccgcaacgucccccagaucgagucccgcggccucuucggcgccaucgccggcuucaucgagggcggcuggcagggcauggucgacggcugguacggcuaccaccacuccaacgaccagggcuccggcuacgccgccgacaaggaguccacccagaaggccuucgaccgcaucaccaacaaggucaacuccgucaucgagaagaugaacacccaguucgaggccgucggcaaggaguucuccaaccucgagaagcgccucgagaaccucaacaagaagauggaggacggcuuccucgacgucuggaccuacaacgccgagcuccucguccucauggagaacgagcgcacccucgacuuccacgacuccaacgucaagaaccucuacgacaagguccgcaugcagcuccgcgacaacgucaaggagcucggcaacggcugcuucgaguucuaccacaagugcgacgacgagugcaugaacuccgucaagaacggcaccuacgacuaccccaaguacgaggaggaguccaagcucaagcgcaacgagaucaagggcgucgagcucuccuccaugggcgucuaccagauccucgccaucuacgccaccgucgccggcucccucucccucgccaucaugaucgccggcaucuccuucuggaugugcuccaacggcucccuccagugccgcaucugcaucuga

SEQ ID NO: 98370 - RNA, 1701 nt, Artificial Sequence; identical to SEQ ID NO: 98352
  derived and/or modified CDS sequence (opt2) from hemagglutinin__InfluenzaA__ACF41735

SEQ ID NO: 98371 - RNA, 1701 nt, Artificial Sequence
  derived and/or modified CDS sequence (opt2) from hemagglutinin__InfluenzaA__ACF41790
augaagaccaucaucgcccucuccuacaucuucugccucgcccucggccaggaccuccccggcaacgacaacuccaccgccacccucugccucggccaccacgccguccccaacggcacccucgucaagaccaucaccgacgaccagaucgaggucaccaacgccaccgagcucguccaguccuccuccaccggcaagaucugcaacaacccccaccgcauccucgacggcaucgacugcacccucaucgacgcccuccucggcgacccccacugcgacgucuuccagaacgagaccugggaccucuucgucgagcgcuccaaggccuucuccaacugcuaccccuacgacguccccgacuacgccucccuccgcucccucgucgccuccuccggcacccucgaguucaucaccgaggacuucaccuggaccggcgucacccagaacggcggcuccaacgccugcaagcgcggccccggcuccggcuucuucucccgccucaacuggcucaccaaguccggcuccaccuaccccguccucgacgucaccaugcccaacaacgacaacuucgacaagcucuacaucuggggcguccaccaccccuccaccaaccaggagcagaccucccucuacguccaggccuccggccgcgucaccgucuccacccgccgcucccagcagaccaucauccccaacaucggcucccgccccuggguccgcggccucuccucccgcaucuccaucuacuggaccaucgucaagcccggcgacguccucgucaucaacuccaacggcaaccucaucgccccccgcggcuacuucaagaugcgcaccggcaaguccuccaucaugcgcuccgacgcccccaucgacaccugcaucuccgagugcaucacccccaacggcuccauccccaacgacaagcccuuccagaacgucaacaagaucaccuacggcgccugccccaaguacgucaagcagaacacccucaagcucgccaccggcaugcgcaacguccccgagaagcagacccgcggccucuucggcgccaucgccggcuucaucgagaacggcugggagggcaugaucgacggcugguacggcuuccgccaccagaacuccgagggcaccggccaggccgccgaccucaaguccacccaggccgccaucgaccagaucaacggcaagcucaaccgcgucaucgagaagaccaacgagaaguuccaccagaucgagaaggaguucuccgaggucgagggccgcauccaggaccucgagaaguacgucgaggacaccaagaucgaccucugguccuacaacgccgagcuccucgucgcccucgagaaccagcacaccaucgaccucaccgacuccgagaugaacaagcucuucgagaagacccgccgccagcuccgcgagaacgccgaggacaugggcaacggcugcuucaagaucuaccacaagugcgacaacgccugcaucgaguccauccgcaacggcaccuacgaccacgacgucuaccgcgacgaggcccucaacaaccgcuuccagaucaagggcgucgagcucaaguccggcuacaaggacuggauccucuggaucuccuucgccaucuccugcuuccuccucugcgucguccuccucggcuucaucaugugggccugccagcgcggcaacauccgcugcaacaucugcaucuga

SEQ ID NO: 98372 - RNA, 1701 nt, Artificial Sequence
  derived and/or modified CDS sequence (opt2) from hemagglutinin__InfluenzaA__ACF41823
augaagaccaucaucgcccucuccuacaucuucugccucgcccucggccaggaccuccccggcaacgacaacuccaccgccacccucugccucggccaccacgccguccccaacggcacccucgucaagaccaucaccgacgaccagaucgaggucaccaacgccaccgagcucguccaguccuccuccaccggcaagaucugcaacaacccccaccgcauccucgacggcaucgacugcacccucaucgacgcccuccucggcgacccccacugcgacgucuuccagaacgagaccugggaccucuucgucgagcgcuccaaggccuucuccaacugcuaccccuacgacguccccgacuacgccucccuccgcucccucgucgccuccuccggcacccucgaguucaucaccgagggcuucaccuggaccggcgucacccagaacggcggcuccaacgccugcaagcgcggccccggcuccggcuucuucucccgccucaacuggcucaccaaguccggcuccaccuaccccguccucaacgucaccaugcccaacaacgacaacuucgacaagcucuacaucuggggcguccaccaccccuccaccaaccaggagcagaccucccucuacguccaggccuccggccgcgucaccgucuccacccgccgcucccgccagaccaucauccccaacaucggcucccgccccuggguccgcggccucuccucccgcaucuccaucuacuggaccaucgucaagcccggcgacguccucgucaucaacuccaacggcaaccucaucgccccccgcggcuacuucaagaugcgcaccggcaaguccuccaucaugcgcuccgacgcccccaucgacaccugcaucuccgagugcaucacccccaacggcuccauccccaacgacaagcccuuccagaacgucaacaagaucaccuacggcgccugccccaaguacgucaagcagaacacccucaagcucgccaccggcaugcgcaacguccccgagaagcagacccgcggccucuucggcgccaucgccggcuucaucgagaacggcugggagggcaugaucgacggcugguacggcuuccgccaccagaacuccgagggcaccggccaggccgccgaccucaaguccacccaggccgccaucgaccagaucaacggcaagcucaaccgcgucaucgagaagaccaacgagaaguuccaccagaucgagaaggaguucuccgaggucgagggccgcauccaggaccucgagaaguacgucgaggacaccaagaucgaccucugguccuacaacgccgagcuccucgucgcccucgagaaccagcacaccaucgaccucaccgacuccgagaugaacaagcucuucgagaagacccgccgccagcuccgcgagaacgccgaggacaugggcaacggcugcuucaagaucuaccacaagugcgacaacgccugcaucgaguccauccgcaacggcaccuacgaccacaacgucuaccgcgacgaggcccucaacaaccgcuuccagaucaagggcgucgagcucaaguccggcuacaaggacuggauccucuggaucuccuucgccaucuccugcuuccuccucugcgucguccuccucggcuucaucaugugggccugccagcgcggcaacauccgcugcaacaucugcaucuga

SEQ ID NO: 98373 - RNA, 1698 nt, Artificial Sequence
  derived and/or modified CDS sequence (opt2) from hemagglutinin__InfluenzaA__ACF41834
augaaggccaaccuccucguccuccucugcgcccucgccgccgccgacgccgacaccaucugcaucggcuaccacgccaacaacuccaccgacaccgucgacaccguccucgagaagaacgucaccgucacccacuccgucaaccuccucgaggacucccacaacggcaagcucugccgccucaagggcaucgccccccuccagcucggcaagugcaacaucgccggcuggcuccucggcaaccccgagugcgacccccuccuccccguccgcuccugguccuacaucgucgagacccccaacuccgagaacggcaucugcuaccccggcgacuucaucgacuacgaggagcuccgcgagcagcucuccuccgucuccuccuucgagcgcuucgagaucuuccccaaggaguccuccuggcccaaccacaacaccaacggcgucaccgccgccugcucccacgagggcaaguccuccuucuaccgcaaccuccucuggcucaccgagaaggagggcuccuaccccaaccucaagaacuccuacgucaacaagaagggcaaggagguccucguccucuggggcauccaccaccccuccaacuccaaggagcagcagaaccucuaccagaacgagaacgccuacgucuccgucgucaccuccaacuacaaccgccgcuucacccccgagaucgccgagcgccccaagguccgcgaccaggccggccgcaugaacuacuacuggacccuccucaagcccggcgacaccaucaucuucgaggccaacggcaaccucaucgcccccauguacgccuucgcccucucccgcggcuucggcuccggcaucaucaccuccaacgccuccaugcacgagugcaacaccaagugccagaccccccucggcgccaucaacuccucccuccccuaccagaacauccaccccgucaccaucggcgagugccccaaguacguccgcuccgccaagcuccgcauggucaccggccuccgcaacauccccuccauccagucccgcggccucuucggcgccaucgccggcuucaucgagggcggcuggaccggcaugaucgacggcugguacggcuaccaccaccagaacgagcagggcuccggcuacgccgccgaccagaaguccacccagaacgccaucaacggcaucaccaacaaggucaacaccgucaucgagaagaugaacauccaguucaccgccgucggcaaggaguucaacaagcucgagaagcgcauggagaaccucaacaagaaggucgacgacggcuuccucgacaucuggaccuacaacgccgagcuccucguccuccucgagaacgagcgcacccucgacuuccacgacuccaacgucaagaaccucuacgagaaggucaagucccagcucaagaacaacgccaaggagaucggcaacggcugcuucgaguucuaccacaagugcgacaacgagugcauggaguccguccgcaacggcaccuacgacuaccccaaguacuccgaggaguccaagcucaaccgcgagaaggucgacggcgucaagcucgaguccaugggcaucuaccagauccucgccaucuacuccaccgucgccuccucccucguccuccucgucucccucggcgccaucuccuucuggaugugcuccaacggcucccuccagugccgcaucugcaucuga

SEQ ID NO: 98374 - RNA, 1701 nt, Artificial Sequence
  derived and/or modified CDS sequence (opt2) from hemagglutinin__InfluenzaA__ACF41856
augaagaccaucaucgcccucuccuacauccucugccucgucuucgcccagaagcuccccggcaacgacaacuccaccgccacccucugccucggccaccacgccguccccaacggcacccucgucaagaccaucaccaacgaccagaucgaggucaccaacgccaccgagcucguccaguccuccuccaccggccgcaucugcgacuccccccaccgcauccucgacggcaagaacugcacccucaucgacgcccuccucggcgacccccacugcgacggcuuccagaacaaggagugggaccucuucgucgagcgcuccaaggccuacuccaacugcuaccccuacgacguccccgacuacgccucccuccgcucccucgucgccuccuccggcacccucgaguucaucaacgaggacuucaacuggaccggcgucgcccaggacggcggcuccuacgccugcaagcgcggcuccgucaacuccuucuucucccgccucaacuggcuccacaaguccgaguacaaguaccccgcccucaacgucaccaugcccaacaacggcaaguucgacaagcucuacaucuggggcguccaccaccccuccaccgaccgcgaccagaccucccucuacguccgcgccuccggccgcgucaccgucuccaccaagcgcucccagcagaccgucacccccaacaucggcucccgccccuggguccgcggccaguccucccgcaucuccaucuacuggaccaucgucaagcccggcgacauccuccucaucaacuccaccggcaaccucaucgccccccgcggcuacuucaagauccgcaacggcaaguccuccaucaugcgcuccgacgcccccaucggcaccugcuccuccgagugcaucacccccaacggcuccauccccaacgacaagcccuuccagaacgucaaccgcaucaccuacggcgccugcccccgcuacgucaagcagaacacccucaagcucgccaccggcaugcgcaacguccccgagaagcagacccgcggcaucuucggcgccaucgccggcuucaucgagaacggcugggagggcauggucgacggcugguacggcuuccgccaccagaacuccgagggcaccggccaggccgccgaccucaaguccacccaggccgccaucgaccagaucaacggcaagcucaaccgccucaucgagaagaccaacgagaaguuccaccagaucgagaaggaguucuccgaggucgagggccgcauccaggaccucgagaaguacgucgaggacaccaagaucgaccucugguccuacaacgccgagcuccucgucgcccucgagaaccagcacaccaucgaccucaccgacuccgagaugaacaagcucuucgagaagacccgcaagcagcuccgcgagaacgccgaggacaugggcaacggcugcuucaagaucuaccacaagugcgacaacgccugcaucggcuccauccgcaacggcaccuacgaccacgacgucuaccgcgacgaggcccucaacaaccgcuuccagaucaagggcgucgagcucaaguccggcuacaaggacuggauccucuggaucuccuucgccaucuccugcuuccuccucugcgucguccuccucggcuucaucaugugggccugccagaagggcaacauccgcugcaacaucugcaucuga

SEQ ID NO: 98375 - RNA, 1698 nt, Artificial Sequence
  derived and/or modified CDS sequence (opt2) from hemagglutinin__InfluenzaA__ACF41867
augaaggccaagcuccucguccuccucugcaccuucaccgccaccuacgccgacaccaucugcaucggcuaccacgccaacaacuccaccgacaccgucgacaccguccucgagaagaacgucaccgucacccacuccgucaaccuccucgaggacucccacaacggcaagcucugccuccucaagggcaucgccccccuccagcucggcaacugcuccgucgccggcuggauccucggcaaccccgagugcgagucccucaucuccaaggaguccugguccuacaucgucgagacccccaaccccgagaacggcaccugcuaccccggcuacuucgccgacuacgaggagcuccgcgagcagcucuccuccgucuccuccuucgagcgcuucgagaucuuccccaaggaguccuccuggcccaaccacaccgucaccggcgucaccgccuccugcucccacaacggcaaguccuccuucuaccgcaaccuccucuggcucaccgagaagaacggccucuaccccaaccucuccaacuccuacgucaacaacaaggagaaggagguccucguccucuggggcguccaccaccccuccaacauccgcgaccagcgcgccaucuaccacaccgagaacgccuacgucuccgucgucuccucccacuacucccgccgcuucacccccgagaucgccaagcgccccaagguccgcggccaggagggccgcaucaacuacuacuggacccuccucgagcccggcgacaccaucaucuucgaggccaacggcaaccucaucgcccccugguacgccuucgcccucucccgcggcuucggcuccggcaucaucaccuccaacgcccccaugaacgagugcgacgccaagugccagaccccccagggcgccaucaacuccucccuccccuuccagaacguccaccccgucaccaucggcgagugccccaaguacguccgcuccaccaagcuccgcauggucaccggccuccgcaacauccccuccauccagucccgcggccucuucggcgccaucgccggcuucaucgagggcggcuggaccggcaugauggacggcugguacggcuaccaccaccagaacgagcagggcuccggcuacgccgccgaccagaaguccacccagaacgccaucaacggcaucaccaacaaggucaacuccgucaucgagaagaugaacacccaguucaccgccgucggcaaggaguucaacaagcucgagcgccgcauggagaaccucaacaagaaggucgacgacggcuuccucgacaucuggaccuacaacgccgagcuccucguccuccucgagaacgagcgcacccucgacuuccacgacuccaacgucaagaaccucuacgagaaggucaagucccagcucaagaacaacgccaaggagaucggcaacggcugcuucgaguucuaccacaagugcaacaacgagugcauggaguccgucaagaacggcaccuacgacuaccccaaguacuccgaggaguccaagcucaaccgcgagaagaucgacggcgucaagcucgaguccaugggcgucuaccagauccucgccaucuacuccaccgucgccuccucccucguccuccucgucucccucggcgccaucuccuucuggaugugcuccaacggcucccuccagugccgcaucugcaucuga

SEQ ID NO: 98376 - RNA, 1698 nt, Artificial Sequence; identical to SEQ ID NO: 98151
  derived and/or modified CDS sequence (opt2) from hemagglutinin__InfluenzaA__ACF41878

SEQ ID NO: 98377 - RNA, 1701 nt, Artificial Sequence
  derived and/or modified CDS sequence (opt2) from hemagglutinin__InfluenzaA__ACF41922
augaaggccaagcuccucguccuccucugcgccuucaccgccaccuacgccgacaccaucugcaucggcuaccacgccaacaacuccaccgacaccgucgacaccguccucgagaagaacgucaccgucacccacuccgucaaccuccucgaggacucccacaacggcaagcucugccgccucaagggcaucgccccccuccagcucggcaacugcuccgucgccggcuggauccucggcaaccccaagugcgagucccucuucuccaaggaguccugguccuacaucgccgagacccccaaccccgagaacggcaccugcuaccccggcuacuucgccgacuacgaggagcuccgcgagcagcucuccuccgucuccuccuucgagcgcuucgagaucuuccccaaggaguccuccuggcccaaccacaccgucaccaagggcgucaccgccuccugcucccacaacggcaaguccuccuucuaccgcaaccuccucuggcucaccgagaagaacggccucuaccccaaccucuccaaguccuacgucaacaacaaggagaaggagguccucguccucuggggcguccaccaccccuccaacauccgcgaccagcgcgccaucuaccacaccgagaacgccuacgucuccgucgucuccucccacuacucccgccgcuucacccccgagaucgccaagcgccccaagguccgcgaccaggagggccgcaucaacuacuacuggacccuccucgagcccggcgacaccaucaucuucgaggccaacggcaaccucaucgcccccugguacgccuucgcccucucccgcggcuucggcuccggcaucaucaccuccaacgccuccauggacgagugcgacgccaagugccagaccccccagggcgccaucaacuccucccuccccuuccagaacguccaccccgucaccaucggcgagugccccaaguacguccgcuccaccaagcuccgcauggucaccggccuccgcaacauccccuccauccagucccgcggccucuucggcgccaucgccggcuucaucgagggcggcuggaccggcaugaucgacggcugguacggcuaccaccaccagaacgagcagggcuccggcuacgccgccgaccagaaguccacccagaacgccaucaacggcaucaccaacaaggucaacuccgucaucgagaagaugaacacccaguucaccgccgucggcaaggaguucaacaagcucgagcgccgcauggagaaccucaacaagaaggucgacgacggcuuccucgacaucuggaccuacaacgccgagcuccucguccuccucgagaacggccgcacccucgacuuccacgacuccaacgucaagaaccucuacgagaaggucaagucccagcucaagaacaacgccaaggagaucggcaacggcugcuucgaguucuaccacaagugcaacaacgagugcauggaguccgucaagaacggcaccuacgacuaccccaaguacuccgaggaguccaagcucaaccgcggcaagaucgacggcgucaagcucgaguccaugggcgucuaccagauccucgccaucuacuccaccgucgccuccucccucguccuccucgucucccucggcgccaucuccuucuggaugugcuccaacggcucccuccagugccgcaucugcaucuga

SEQ ID NO: 98378 - RNA, 1689 nt, Artificial Sequence
  derived and/or modified CDS sequence (opt2) from hemagglutinin__InfluenzaA__ACF54389
auggccaucaucuaccucauccuccucuucgccaccguccgcggcgaccagaucugcaucggcuaccacgccaacaacuccaccgagaaggucgacaccauccucgagcgcaacgucaccgucacccacgccaaggacauccucgagaagacccacaacggcaagcucugcaagcucaacggcauccccccccucgagcucggcgacugcuccaucgccggcuggcuccucggcaaccccgagugcgaccgccuccuccgcguccccgagugguccuacaucauggagaaggagaacccccgcuacucccucugcuaccccggcucccucaacgacuacgaggagcucaagcaccuccucuccuccgucaagcacuucgagaagguccgcauccuccccaaggaccgcuggacccagcacaccaccaccggcggcuccaaggccugcgccgucuccggcaagcccuccuucuuccgcaacauggucuggcucaccaagaagggcaccaacuaccccgucgccaagggcuccuacaacaacaccuccggcgagcagaugcucaucaucuggggcguccaccaccccaucgacgaggccgagcagcgcgcccucuaccaggaggucggcaccuacgucuccgccuccaccuccacccucaacaagcgcuccauccccgagaucgccgcccgccccgaggucaacggccucggcucccgcauggaguucuccuggacccuccucgacgucugggacaccaucaacuucgaguccaccggcaaccucgucgcccccgaguacggcuucaagaucuccaagcgcggcuccuccggcaucaugaagaccgagggcacccucggcaacugcgagaccaagugccagaccccccucggcgccaucaacaccacccuccccuuccacaacguccacccccucaccaucggcgagugccccaaguacgucaaguccgagaagcucguccucgccaccggccuccgcaacgucccccagaucgagucccgcggccucuucggcgccaucgccggcuucaucgagggcggcuggcagggcauggucgacggcugguacggcuaccaccacuccaacgagcagggcuccggcuacgccgccgacaaggaguccacccagaaggccuucgacggcaucaccaacaaggucaacuccgucaucgagaagaugaacacccaguucgaggccgucggcaaggaguucaacaaccucgagaagcgccucgagaaccucaacaagaagauggaggacggcuuccucgacgucuggaccuacaacgccgagcuccucguccucauggagaacgagcgcacccucgacuuccacgacuccaacgucaagaaccucuacgagaagguccgcaugcagcuccgcgacaacgucaaggagcucggcaacggcugcuucgaguucuaccacaagugcgacgacgagugcaugaacuccgucaagaacggcaccuacgacuaccccaaguacgaggaggaguccaagcucaagcgcaacgagaucaagggcgucaagcucuccuccaugggcgucuaccagauccucgccaucuacgccaccgucgccggcucccucucccucgccaucauggucgccggcaucuccuucuggaugugcuccaacggcucccuccagugccgcaucugcaucuga

SEQ ID NO: 98379 - RNA, 1701 nt, Artificial Sequence; identical to SEQ ID NO: 98352
  derived and/or modified CDS sequence (opt2) from hemagglutinin__InfluenzaA__ACF54400

SEQ ID NO: 98380 - RNA, 1701 nt, Artificial Sequence; identical to SEQ ID NO: 98354
  derived and/or modified CDS sequence (opt2) from hemagglutinin__InfluenzaA__ACF54411

SEQ ID NO: 98381 - RNA, 1701 nt, Artificial Sequence; identical to SEQ ID NO: 98354
  derived and/or modified CDS sequence (opt2) from hemagglutinin__InfluenzaA__ACF54422

SEQ ID NO: 98382 - RNA, 1701 nt, Artificial Sequence; identical to SEQ ID NO: 98365
  derived and/or modified CDS sequence (opt2) from hemagglutinin__InfluenzaA__ACF54433

SEQ ID NO: 98383 - RNA, 1701 nt, Artificial Sequence; identical to SEQ ID NO: 98354
  derived and/or modified CDS sequence (opt2) from hemagglutinin__InfluenzaA__ACF54444

SEQ ID NO: 98384 - RNA, 1701 nt, Artificial Sequence; identical to SEQ ID NO: 98372
  derived and/or modified CDS sequence (opt2) from hemagglutinin__InfluenzaA__ACF54466

SEQ ID NO: 98385 - RNA, 1689 nt, Artificial Sequence
  derived and/or modified CDS sequence (opt2) from hemagglutinin__InfluenzaA__ACF54477
auggccaucaucuaccucauccuccucuucaccgccguccgcggcgaccagaucugcaucggcuaccacgccaacaacuccaccgagaaggucgacaccauccucgagcgcaacgucaccgucacccacgccaaggacauccucgagaagacccacaacggcaagcucugcaagcucaacggcauccccccccucgagcucggcgacugcuccaucgccggcuggcuccucggcaaccccgagugcgaccgccuccucuccguccccgagugguccuacaucauggagaaggagaacccccgcgacggccucugcuaccccggcuccuucaacgacuacgaggagcucaagcaccuccucuccuccgucaagcacuucgagaaggucaagauccuccccaaggaccgcuggacccagcacaccaccaccggcggcucccgcgccugcgccgucuccggcaaccccuccuucuuccgcaacauggucuggcucaccaagaagggcuccaacuaccccgucgccaagggcuccuacaacaacaccuccggcgagcagaugcucaucaucuggggcguccaccaccccaacgacgagaccgagcagcgcacccucuaccagaacgucggcaccuacgucuccgucggcaccuccacccucaacaagcgcuccacccccgacaucgccacccgccccaaggucaacggccucggcucccgcauggaguucuccuggacccuccucgacaugugggacaccaucaacuucgaguccaccggcaaccucaucgcccccgaguacggcuucaagaucuccaagcgcggcuccuccggcaucaugaagaccgagggcacccucgagaacugcgagaccaagugccagaccccccucggcgccaucaacaccacccuccccuuccacaacguccacccccucaccaucggcgagugccccaaguacgucaaguccgagaagcucguccucgccaccggccuccgcaacgucccccagaucgagucccgcggccucuucggcgccaucgccggcuucaucgagggcggcuggcagggcauggucgacggcugguacggcuaccaccacuccaacgaccagggcuccggcuacgccgccgacaaggaguccacccagaaggccuucgacggcaucaccaacaaggucaacuccgucaucgagaagaugaacacccaguucgaggccgucggcaaggaguucuccaaccucgagcgccgccucgagaaccucaacaagaagauggaggacggcuuccucgacgucuggaccuacaacgccgagcuccucguccucauggagaacgagcgcacccucgacuuccacgacuccaacgucaagaaccucuacgacaagguccgcaugcagcuccgcgacaacgucaaggagcucggcaacggcugcuucgaguucuaccacaagugcgacgacgagugcaugaacuccgucaagaacggcaccuacgacuaccccaaguacgaggaggaguccaagcucaaccgcaacgagaucaagggcgucaagcucuccuccaugggcgucuaccagauccucgccaucuacgccaccgucgccggcucccucucccucgccaucaugauggccggcaucuccuucuggaugugcuccaacggcucccuccagugccgcaucugcaucuga

SEQ ID NO: 98386 - RNA, 1689 nt, Artificial Sequence
  derived and/or modified CDS sequence (opt2) from hemagglutinin__InfluenzaA__ACF54499
auggccaucaucuaccucauccuccucuucaccgccguccgcggcgaccagaucugcaucggcuaccacgccaacaacuccaccgagaccgucgacaccauccucgagcgcaacgucaccgucacccacgccaaggacauccucgagaagacccacaacggcaagcucugcaagcucaacggcauccccccccucgagcucggcgacugcuccaucgccggcuggcuccucggcaaccccgagugcgaccgccuccucuccguccccgagugguccuacaucauggagaaggagaacccccgcgacggccucugcuaccccggcuccuucaacgacuacgaggagcucaagcaccuccucuccuccgucaagcacuucgagaaggucaagauccuccccaaggaccgcuggacccagcacaccaccaccggcggcucccgcgccugcgccgucuccggcaaccccuccuucuuccgcaacauggucuggcucaccaagaagggcuccaacuaccccgucgccaagggcuccuacaacaacaccuccggcgagcagaugcucaucaucuggggcguccaccaccccaacgacgagaccgagcagcgcacccucuaccagaacgucggcaccuacgucuccgucggcaccuccacccucaacaagcgcuccacccccgacaucgccacccgccccaaggucaacggccucggcucccgcauggaguucuccuggacccuccucgacaugugggacaccaucaacuucgaguccaccggcaaccucaucgcccccgaguacggcuucaagaucuccaagcgcggcuccuccggcaucaugaagaccgagggcacccucgagaacugcgagaccaagugccagaccccccucggcgccaucaacaccacccuccccuuccacaacguccacccccucaccaucggcgagugccccaaguacgucaaguccgagaagcucguccucgccaccggccuccgcaacgucccccagaucgagucccgcggccucuucggcgccaucgccggcuucaucgagggcggcuggcagggcauggucgacggcugguacggcuaccaccacuccaacgaccagggcuccggcuacgccgccgacaaggaguccacccagaaggccuucgacggcaucaccaacaaggucaacuccgucaucgagaagaugaacacccaguucgaggccgucggcaaggaguucuccaaccucgagcgccgccucgagaaccucaacaagaagauggaggacggcuuccucgacgucuggaccuacaacgccgagcuccucguccucauggagaacgagcgcacccucgacuuccacgacuccaacgucaagaaccucuacgacaagguccgcaugcagcuccgcgacaacgucaaggagcucggcaacggcugcuucgaguucuaccacaagugcgacgacgagugcaugaacuccgucaagaacggcaccuacgacuaccccaaguacgaggaggaguccaagcucaaccgcaacgagaucaagggcgucaagcucuccuccaugggcgucuaccagauccucgccaucuacgccaccgucgccggcucccucucccucgccaucaugauggccggcaucuccuucuggaugugcuccaacggcucccuccagugccgcaucugcaucuga

SEQ ID NO: 98387 - RNA, 1689 nt, Artificial Sequence; identical to SEQ ID NO: 98386
  derived and/or modified CDS sequence (opt2) from hemagglutinin__InfluenzaA__ACF54510

SEQ ID NO: 98388 - RNA, 1689 nt, Artificial Sequence; identical to SEQ ID NO: 98386
  derived and/or modified CDS sequence (opt2) from hemagglutinin__InfluenzaA__ACF54521

SEQ ID NO: 98389 - RNA, 1701 nt, Artificial Sequence
  derived and/or modified CDS sequence (opt2) from hemagglutinin__InfluenzaA__ACF54532
augaagaccaucaucgcccucuccuacauccucugccucgucuucgcccagaagcuccccggcaacgacaacuccaccgccacccucugccucggccaccacgccguccccaacggcaccaucgucaagaccaucaccaacgaccagaucgaggucaccaacgccaccgagcucguccaguccuccuccaccggcgagaucugcgacuccccccaccagauccucgacggcgagaacugcacccucaucgacgcccuccucggcgacccccagugcgacggcuuccagaacaagaagugggaccucuucgucgagcgcuccaaggccuacuccaacugcuaccccuacgacguccccgacuacgccucccuccgcucccucgucgccuccuccggcacccucgaguucaacaacgaguccuucaacuggaccggcgucacccagaacggcaccuccuccgccugcauccgccgcuccaacaacuccuucuucucccgccucaacuggcucacccaccucaaguucaaguaccccgcccucaacgucaccaugcccaacaacgagaaguucgacaagcucuacaucuggggcguccaccaccccggcaccgacaacgaccagaucuuccucuacgcccaggccuccggccgcaucaccgucuccaccaagcgcucccagcagaccgucauccccaacaucggcucccgcccccgcguccgcaacauccccucccgcaucuccaucuacuggaccaucgucaagcccggcgacauccuccucaucaacuccaccggcaaccucaucgccccccgcggcuacuucaagauccgcuccggcaaguccuccaucaugcgcuccgacgcccccaucggcaagugcaacuccgagugcaucacccccaacggcuccauccccaacgacaagcccuuccagaacgucaaccgcaucaccuacggcgccugcccccgcuacgucaagcagaacacccucaagcucgccaccggcaugcgcaacguccccgagaagcagacccgcggcaucuucggcgccaucgccggcuucaucgagaacggcugggagggcauggucgacggcugguacggcuuccgccaccagaacuccgagggcaucggccaggccgccgaccucaaguccacccaggccgccaucgaccagaucaacggcaagcucaaccgccucaucggcaagaccaacgagaaguuccaccagaucgagaaggaguucuccgaggucgagggccgcauccaggaccucgagaaguacgucgaggacaccaagaucgaccucugguccuacaacgccgagcuccucgucgcccucgagaaccagcacaccaucgaccucaccgacuccgagaugaacaagcucuucgagaagaccaagaagcagcuccgcgagaacgccgaggacaugggcaacggcugcuucaagaucuaccacaagugcgacaacgccugcaucggcuccauccgcaacggcaccuacgaccacgacgucuaccgcgacgaggcccucaacaaccgcuuccagaucaagggcgucgagcucaccuccggcuacaaggacuggauccucuggaucuccuucgccaucuccugcuuccuccucugcgucgcccuccucggcuucaucaugugggccugccagaagggcaacauccgcugcaacaucugcaucuga

SEQ ID NO: 98390 - RNA, 1701 nt, Artificial Sequence
  derived and/or modified CDS sequence (opt2) from hemagglutinin__InfluenzaA__ACF54543
augaagaccaucaucgcccucuccuacauccucugccucgucuucgcccagaagcuccccggcaacgacaacuccaccgccacccucugccucggccaccacgccguccccaacggcaccaucgucaagaccaucaccaacgaccagaucgaggucaccaacgccaccgagcucguccaguccuccuccaccggcgagaucugcgacuccccccaccagauccucgacggcgagaacugcacccucaucgacgcccuccucggcgacccccagugcgacggcuuccagaacaagaagugggaccucuucgucgagcgcuccaaggccuacuccaacugcuaccccuacgacguccccgacuacgucucccuccgcucccucgucgccuccuccggcacccucgaguucaacaacgaguccuucaacuggaccggcgucacccagaacggcaccuccuccgccugcauccgccgcuccaacaacuccuucuucucccgccucaacuggcucacccaccucaaguucaaguaccccgcccucaacgucaccaugcccaacaacgagaacuucgacaagcucuacaucuggggcguccaccaccccggcaccgacaacgaccagaucuuccucuacgcccaggccuccggccgcaucaccgucuccaccaagcgcucccagcagaccgucauccccaacaucggcucccgcccccgcguccgcaacauccccucccgcaucuccaucuacuggaccaucgucaagcccggcgacauccuccucaucaacuccaccggcaaccucaucgccccccgcggcuacuucaagauccgcuccggcaaguccuccaucaugcgcuccgacgcccccaucggcaagugcaacuccgagugcaucacccccaacggcuccauccccaacgacaagcccuuccagaacgucaaccgcaucaccuacggcgccugcccccgcuacgucaagcagaacacccucaagcucgccaccggcaugcgcaacguccccgagaagcagacccgcggcaucuucggcgccaucgccggcuucaucgagaacggcugggagggcauggucgacggcugguacggcuuccgccaccagaacuccgagggcaucggccaggccgccgaccucaaguccacccaggccgccaucgaccagaucaacggcaagcucaaccgccucaucggcaagaccaacgagaaguuccaccagaucgagaaggaguucuccgaggucgagggccgcauccaggaccucgagaaguacgucgaggacaccaagaucgaccucugguccuacaacgccgagcuccucgucgcccucgagaaccagcacaccaucgaccucaccgacuccgagaugaacaagcucuucgagaagaccaagaagcagcuccgcgagaacgccgaggaccucggcaacggcugcuucaagaucuaccacaagugcgacaacgccugcaucggcuccauccgcaacggcaccuacgaccacgacgucuaccgcgacgaggcccucaacaaccgcuuccagaucaagggcgucgagcucaaguccggcuacaaggacuggauccucuggaucuccuucgccaucuccugcuuccuccucugcgucgcccuccucggcuucaucaugugggccugccagaagggcaacauccgcugcaacaucugcaucuga

SEQ ID NO: 98391 - RNA, 1701 nt, Artificial Sequence
  derived and/or modified CDS sequence (opt2) from hemagglutinin__InfluenzaA__ACF54565
augaagaccaucaucgcccucuccuacauccucugccucgucuucucccagaagcuccccggcaacgacaacuccaccgccacccucugccucggccaccacgccguccccaacggcaccaucgucaagaccaucaccaacgaccagaucgaggucaccaacgccaccgagcucguccaguccuccuccaccggcggcaucugcgacuccccccaccagauccucgacggcgagaacugcacccucaucgacgcccuccucggcgacccccagugcgacggcuuccagaacaagaagugggaccucuucgucgagcgcuccaaggccuacuccaacugcuaccccuacgacguccccgacuacgccucccuccgcucccucgucgccuccuccggcacccucgaguucaacaacgaguccuucaacugggccggcgucacccagaacggcaccuccuccgccugcaagcgccgcuccaacaaguccuucuucucccgccucaacuggcucacccaccucaaguacaaguaccccgcccucaacgucaccaugcccaacaacgagaaguucgacaagcucuacaucuggggcguccaccaccccgucaccgacuccgaccagaucucccucuacgcccaggccuccggccgcaucaccgucuccaccaagcgcucccagcagaccgucauccccaacaucggcuaccgcccccgcguccgcgacaucuccucccgcaucuccaucuacuggaccaucgucaagcccggcgacauccuccucaucaacuccaccggcaaccucaucgccccccgcggcuacuucaagauccgcuccggcaaguccuccaucaugcgcuccgacgcccccaucggcaagugcaacuccgagugcaucacccccaacggcuccauccccaacgacaagcccuuccagaacgucaaccgcaucaccuacggcgccugcccccgcuacgucaagcagaacacccucaagcucgccaccggcaugcgcaacguccccgagaagcagacccgcggcaucuucggcgccaucgccggcuucaucgagaacggcugggagggcauggucgacggcugguacggcuuccgccaccagaacuccgagggcaccggccaggccgccgaccucaaguccacccaggccgccaucaaccagaucaacggcaagcucaaccgccucaucggcaagaccaacgagaaguuccaccagaucgagaaggaguucuccgaggucgagggccgcauccaggaccucgagaaguacgucgaggacaccaagaucgaccucugguccuacaacgccgagcuccucgucgcccucgagaaccagcacaccaucgaccucaccgacuccgagaugaacaagcucuucgagcgcaccaagaagcagcuccgcgagaacgccgaggacaugggcaacggcugcuucaagaucuaccacaagugcgacaacgccugcaucgaguccauccgcaacggcaccuacgaccacgacgucuaccgcgacgaggcccucaacaaccgcuuccagaucaagggcgucgagcucaaguccggcuacaaggacuggauccucuggaucuccuucgccaucuccugcuuccuccucugcgucgcccuccucggcuucaucaugugggccugccagaagggcaacauccgcugcaacaucugcaucuga

SEQ ID NO: 98392 - RNA, 1701 nt, Artificial Sequence
  derived and/or modified CDS sequence (opt2) from hemagglutinin__InfluenzaA__ACF54576
augaagaccaucaucgcccucuccuacauccucugccucgucuucgcccagaagcuccccggcaacgacaacuccaccgccacccucugccucggccaccacgccguccccaacggcaccaucgucaagaccaucaccaacgaccagaucgaggucaccaacgccaccgagcucguccaguccuccuccaccggcggcaucugcgacuccccccaccagauccucgacggcgagaacugcacccucaucgacgcccuccucggcgacccccagugcgacggcuuccagaacaagaagugggaccucuucgucgagcgcuccaaggccuacuccaacugcuaccccuacgacguccccgacuacgccucccuccgcucccucgucgccuccuccggcacccucgaguucaacgacgaguccuucaacuggaccggcgucacccagaacggcaccuccuccuccugcaagcgccgcuccaacaacuccuucuucucccgccucaacuggcucacccagcucaaguucaaguaccccgcccucaacgucaccaugcccaacaacgagaaguucgacaagcucuacaucuggggcguccaccaccccgucaccgacaacgaccagaucuuccucuacgcccaggccuccggccgcaucaccgucuccaccaagcgcucccagcagaccgucauccccaacaucggcucccgcccccgcauccgcaacauccccucccgcaucuccaucuacuggaccaucgucaagcccggcgacauccuccucaucaacuccaccggcaaccucaucgccccccgcggcuacuucaagauccgcuccggcaaguccuccaucaugcgcuccgacgcccccaucggcaagugcaacuccgagugcaucacccccaacggcuccauccccaacgacaagcccuuccagaacgucaaccgcaucaccuacggcgccugcccccgcuacgucaagcagaacacccucaagcucgccaccggcaugcgcaacguccccgagaagcagacccgcggcaucuucggcgccaucgccggcuucaucgagaacggcugggagggcauggucgacggcugguacggcuuccgccaccagaacuccgagggcaucggccaggccgccgaccucaaguccacccaggccgccaucaaccagaucaacggcaagcucaaccgccucaucggcaagaccaacgagaaguuccaccagaucgagaaggaguucuccgaggucgagggccgcauccaggaccucgagaaguacgucgaggacaccaagaucgaccucugguccuacaacgccgagcuccucgucgcccucgagaaccagcacaccaucgaccucaccgacuccgagaugaacaagcucuucgagcgcaccaagaagcagcuccgcgagaacgccgaggacaugggcaacggcugcuucaagaucuaccacaagugcgacaacgccugcaucggcuccauccgcaacggcaccuacgaccacgacgucuaccgcgacgaggcccucaacaaccgcuuccagaucaagggcgucgagcucaaguccggcuacaaggacuggauccucuggaucuccuucgccaucuccugcuuccuccucugcgucgcccuccucggcuucaucaugugggccugccagaagggcaacauccgcugcaacaucugcaucuga

SEQ ID NO: 98393 - RNA, 1698 nt, Artificial Sequence
  derived and/or modified CDS sequence (opt2) from hemagglutinin__InfluenzaA__ACF54598
augaaggccaagcuccucguccuccucuacgccuucgucgccaccgacgccgacaccaucugcaucggcuaccacgccaacaacuccaccgacaccgucgacaccaucuucgagaagaacgucgccgucacccacuccgucaaccuccucgaggaccgccacaacggcaagcucugcaagcucaagggcaucgccccccuccagcucggcaagugcaacaucaucggcuggcuccucggcaaccccgagugcgacucccuccuccccgcccgcuccugguccuacaucgucgagacccccaacuccgagaacggcgccugcuaccccggcgacuucaucgacuacgaggagcuccgcgagcagcucuccuccgucuccucccucgagcgcuucgagaucuuccccaaggaguccuccuggcccaaccacaccuucaacggcgucaccgccuccugcucccaccgcggcaaguccuccuucuaccgcaaccuccucuggcucaccaagaagggcgacuccuaccccaagcucaccaacuccuacgucaacaacaagggcaaggagguccucguccucuggggcguccaccaccccuccuccuccgacgagcagcagucccucuacuccaacggcaacgccuacgucuccgucgccuccuccaacuacaaccgccgcuucacccccgagaucgccgcccgccccaaggucaaggaccagcacggccgcaugaacuacuacuggacccuccucgagcccggcgacaccaucaucuucgaggccaccggcaaccucaucgcccccugguacgccuucgcccucucccgcggcuucgaguccggcaucaucaccuccaacgccuccaugcacgagugcaacaccaagugccagaccccccagggcuccaucaacuccaaccuccccuuccagaacauccaccccgucaccaucggcgagugccccaaguacguccgcuccaccaagcuccgcauggucaccggccuccgcaacauccccuccauccaguaccgcggccucuucggcgccaucgccggcuucaucgagggcggcuggaccggcaugaucgacggcugguacggcuaccaccaccagaacgagcagggcuccggcuacgccgccgaccagaaguccacccagaacgccaucaacggcaucaccaacaaggucaacuccaucaucgagaagaugaacacccaguucaccgccgucggcaaggaguucaacaaccucgagaagcgcauggagaaccucaacaagaaggucgacgacggcuuccucgacaucuggaccuacaacgccgagcuccucguccuccucgagaacggccgcacccucgacuuccacgaccucaacgucaagaaccucuacgagaaggucaagucccagcucaagaacaacgccaaggagaucggcaacggcugcuucgaguucuaccacaagugcgacaacgagugcauggaguccguccgcaacggcaccuacgacuaccccaaguacuccgaggaguccaagcucaaccgcgagaagaucgacggcgucaagcucgaguccaugggcgucuaccagauccucgccaucuacuccaccgucgccuccucccucguccuccucgucucccucggcgccaucuccuucuggaugugcuccaacggcucccuccagugccgcaucugcaucuga

SEQ ID NO: 98394 - RNA, 1704 nt, Artificial Sequence
  derived and/or modified CDS sequence (opt2) from hemagglutinin__InfluenzaA__ACG50699
auggagaagaucguccuccuccucgccaucgucucccucgucaaguccgaccagaucugcaucggcuaccacgccaacaacuccaccgagcaggucgacaccaucauggagaagaacgucaccgucacccacgcccaggacauccucgagaagacccacaacggcaagcucugcgaccucgacggcgucaagccccucauccuccgcgacugcuccgucgccggcuggcuccucggcaaccccaugugcgacgaguucaucaacguccccgagugguccuacauggucgagaaggccaaccccgccaacgaccucugcuaccccggcaacuucaacgacuacgaggagcucaagcaccuccucucccgcaucaaccacuucgagaagauccagaucauccccaaguccuccugguccgaccacgaggccucccucggcgucuccuccgccugccccuaccagggcuccuccuccuucuuccgcaacgucgucuggcucaucaagaagaacaacgccuaccccaccaucaagcgcuccuacaacaacaccaaccaggaggaccuccucguccucuggggcauccaccaccccaacgacgaggccgagcagacccgccucuaccagaaccccaccaccuacaucuccgucggcaccuccacccucaaccagcgccucauccccaagaucgccacccgcuccaaggucaacggccaguccggccgcauggacuucuucuggaccauccucaagcccaacgacgccaucaacuucgaguccaacggcaacuucaucgcccccgaguacgccuacaagaucgucaagaagggcgacuccgccaucaugaaguccgaggucgaguacggcaacugcaacaccaagugccagacccccaugggcgccaucaacuccuccaugcccuuccacaacauccacccccucaccaucggcgagugccccaaguacgucaaguccaacaagcucguccucgccaccggccuccgcaacuccccccagcgcgagcgccgccgcaagcgcggccucuucggcgccaucgccggcuucaucgagggcggcuggcagggcauggucgacggcugguacggcuaccaccacuccaacgagcagggcuccggcuacgccgccgacaaggaguccacccagaaggccaucgacggcgucaccaacaaggucaacuccaucaucgacaagaugaacacccaguucgaggccgucggccgcgaguucaacaaccucgagcgccgcaucgagaaccucaacaagaagauggaggacggcuuccucgacgucuggaccuacaacgccgagcuccucguccucauggagaacgagcgcacccucgacuuccacgacuccaacgucaagaaccucuacgacaagguccgccuccagcuccgcgacaacgccaaggagcucggcaacggcugcuucgaguucuaccacaagugcgacaacgagugcauggaguccguccgcaacggcaccuacgacuacccccaguacuccgaggaggcccgccucaagcgcgaggagaucuccggcgucaagcucgaguccaucggcaccuaccagauccucuccaucuacuccaccgucgccuccucccucgcccucgccaucauggucgccggccucucccucuggaugugcuccaacggcucccuccagugccgcaucugcaucuga

SEQ ID NO: 98395 - RNA, 1701 nt, Artificial Sequence; identical to SEQ ID NO: 97964
  derived and/or modified CDS sequence (opt2) from hemagglutinin__InfluenzaA__ACG70142

SEQ ID NO: 98396 - RNA, 1701 nt, Artificial Sequence; identical to SEQ ID NO: 97964
  derived and/or modified CDS sequence (opt2) from hemagglutinin__InfluenzaA__ACG70153

SEQ ID NO: 98397 - RNA, 1701 nt, Artificial Sequence
  derived and/or modified CDS sequence (opt2) from hemagglutinin__InfluenzaA__ACG80410
augaagaccaucaucgcccucuccuacauccucugccucgucuucgcccagaagcuccccggcaacgacaacuccaccgccacccucugccucggccaccacgccguccccaacggcaccaucguccgcaccaucaccaacgaccagaucgaggucaccaacgccaccgagcucguccaguccuccuccaccggcgagaucugcgacuccccccaccagauccucgacggcgagaacugcacccucaucgacgcccuccucggcgacccccagugcgacggcuuccagaacaagaagugggaccucuucgucgagcgcuccaaggccuacuccaacugcuaccccuacgacguccccgacuacgccucccuccgcucccucgucgccuccuccggcacccucgaguucaacaacgaguccuucaacuggaccggcgucacccagaacggcaccuccuccgccugcauccgccgcuccaacaacuccuucuucucccgccucaacuggcucacccaccuccgcuucaaguaccccgcccucaacgucaccaugcccaacaacgagcaguucgacaagcucuacaucuggggcguccaccaccccggcaccgacaacgaccagaucuuccucuacgcccaggccuccggccgcaucaccgucuccaccaagcgcucccagcagaccgucauccccaacaucggcucccgcccccgcguccgcaacauccccucccgcaucuccaucuacuggaccaucgucaagcccggcgacauccuccucaucaacuccaccggcaaccucaucgccccccgcggcuacuucaagauccgcaacggcaaguccuccaucaugcgcuccgacgcccccaucggcaagugcaacuccgagugcaucacccccaacggcuccauccccaacgacaagcccuuccagaacgucaaccgcaucaccuacggcgccugcccccgcuacgucaagcagaacacccucaagcucgccaccggcaugcgcaacguccccgagaagcagacccgcggcaucuucggcgccaucgccggcuucaucgagaacggcugggagggcauggucgacggcugguacggcuuccgccaccagaacuccgagggccgcggccaggccgccgaccucaaguccacccaggccgccaucgaccagaucaacggcaagcucaaccgccucaucggcaagaccaacgagaaguuccaccagaucgagaaggaguucuccgaggucgagggccgcauccaggaccucgagaaguacgucgaggacaccaagaucgaccucugguccuacaacgccgagcuccucgucgcccucgagaaccagcacaccaucgaccucaccgacuccgagaugaacaagcucuucgagaagaccaagaagcagcuccgcgagaacgccgaggacaugggcaacggcugcuucaagaucuaccacaagugcgacaacgccugcaucggcuccauccgcaacggcaccuacgaccacgacgucuaccgcgacgaggcccucaacaaccgcuuccagaucaagggcgucgagcucaaguccggcuacaaggacuggauccucuggaucuccuucgccaucuccugcuuccuccucugcgucgcccuccucggcuucaucaugugggccugccagaagggcaacauccgcugcaacaucugcaucuga

SEQ ID NO: 98398 - RNA, 1701 nt, Artificial Sequence
  derived and/or modified CDS sequence (opt2) from hemagglutinin__InfluenzaA__ACG80420
augcagaccaucaucgcccucuccuacauccucugccucgucuucgcccagaagcuccccggcaacgacaacuccaccgccacccucugccucggccaccacgccguccccaacggcaccaucguccgcaccaucaccaacgaccagaucgaggucaccaacgccaccgagcucguccaguccuccuccaccggcgagaucugcgacuccccccaccagauccucgacggcgagaacugcacccucaucgacgcccuccucggcgacccccagugcgacggcuuccagaacaagaagugggaccucuucgucgagcgcuccaaggccuacuccaacugcuaccccuacgacguccccgacuacgccucccuccgcucccucgucgccuccuccggcacccucgaguucaacaacgaguccuucaacuggaccggcgucacccagaacggcaccuccuccgccugcauccgccgcuccaacaacuccuucuucucccgccucaacuggcucacccaccuccgcuucaaguaccccgcccucaacgucaccaugcccaacaacgagcaguucgacaagcucuacaucuggggcguccaccaccccggcaccgacaacgaccagaucuuccucuacgcccaggccuccggccgcaucaccgucuccaccaagcgcucccagcagaccgucauccccaacaucggcucccgcccccgcguccgcaacauccccucccgcaucuccaucuacuggaccaucgucaagcccggcgacauccuccucaucaacuccaccggcaaccucaucgccccccgcggcuacuucaagauccgcaacggcaaguccuccaucaugcgcuccgacgcccccaucggcaagugcaacuccgagugcaucacccccaacggcuccauccccaacgacaagcccuuccagaacgucaaccgcaucaccuacggcgccugcccccgcuacgucaagcagaacacccucaagcucgccaccggcaugcgcaacguccccgagaagcagacccgcggcaucuucggcgccaucgccggcuucaucgagaacggcugggagggcauggucgacggcugguacggcuuccgccaccagaacuccgagggccgcggccaggccgccgaccucaaguccacccaggccgccaucgaccagaucaacggcaagcucaaccgccucaucggcaagaccaacgagaaguuccaccagaucgagaaggaguucuccgaggucgagggccgcauccaggaccucgagaaguacgucgaggacaccaagaucgaccucugguccuacaacgccgagcuccucgucgcccucgagaaccagcacaccaucgaccucaccgacuccgagaugaacaagcucuucgagaagaccaagaagcagcuccgcgagaacgccgaggacaugggcaacggcugcuucaagaucuaccacaagugcgacaacgccugcaucggcuccauccgcaacggcaccuacgaccacgacgucuaccgcgacgaggcccucaacaaccgcuuccagaucaagggcgucgagcucaaguccggcuacaaggacuggauccucuggaucuccuucgccaucuccugcuuccuccucugcgucgcccuccucggcuucaucaugugggccugccagaagggcaacauccgcugcaacaucugcaucuga

SEQ ID NO: 98399 - RNA, 1701 nt, Artificial Sequence; identical to SEQ ID NO: 98397
  derived and/or modified CDS sequence (opt2) from hemagglutinin__InfluenzaA__ACG80426

SEQ ID NO: 98400 - RNA, 1701 nt, Artificial Sequence; identical to SEQ ID NO: 98397
  derived and/or modified CDS sequence (opt2) from hemagglutinin__InfluenzaA__ACG80430

SEQ ID NO: 98401 - RNA, 1701 nt, Artificial Sequence
  derived and/or modified CDS sequence (opt2) from hemagglutinin__InfluenzaA__ACG80436
augaagaccaucaucgcccucuccuacauccucugccucgucuucgcccagaaguuccccggcaacgacaacuccaccgccacccucugccucggccaccacgccguccccaacggcaccaucgucaagaccaucaccaacgaccagaucgaggucaccaacgccaccgagcucguccaguccuccuccaccggcgagaucugcgacuccccccaccagauccucgacggcgagaacugcacccucaucgacgcccuccucggcgacccccagugcgacggcuuccagaacaagaagugggaccucuucgucgagcgcuccaaggccuacuccaacugcuaccccuacgacguccccgacuacgccucccuccgcucccucgucgccuccuccggcacccucgaguucaacaacgaguccuucaacuggaccggcgucacccagaacggcaccuccuccgccugcauccgccgcuccaacaacuccuucuucucccgccucaacuggcucacccaccuccgcuucaaguaccccgcccucaacgucaccaugcccaacaacgagaacuucgacaagcucuacaucuggggcguccaccaccccggcaccgacaacgaccagaucuuccucuacgcccaggccuccggccgcaucaccgucuccaccaagcgcucccagcagaccgucauccccaacaucggcucccgcccccgcguccgcaacauccccucccgcaucuccaucuacuggaccaucgucaagcccggcgacauccuccucaucaacuccaccggcaaccucaucgccccccgcggcuacuucaagauccgcuccggcaaguccuccaucaugcgcuccgacgcccccaucggcaagugcaacuccgagugcaucacccccaacggcuccauccccaacgacaagcccuuccagaacgucaaccgcaucaccuacggcgccugcccccgcuacgucaagcagaacacccucaagcucgccaccggcaugcgcaacguccccgagaagcagacccgcggcaucuucggcgccaucgccggcuucaucgagaacggcugggagggcauggucgacggcugguacggcuuccgccaccagaacuccgagggcaucggccaggccgccgaccucaaguccacccaggccgcccucgaccagaucaacggcaagcucaaccgccucaucggcaagaccaacgagaaguuccaccagaucgagaaggaguucuccgaggucgagggccgcauccaggaccucgagaaguacgucgaggacaccaagaucgaccucugguccuacaacgccgagcuccucgucgcccucgagaaccagcacaccaucgaccucaccgacuccgagaugaacaagcucuucgagaagaccaagaagcagcuccgcgagaacgccgaggacaugggcaacggcugcuucaagaucuaccacaagugcgacaacgccugcaucggcuccauccgcaacggcaccuacgaccacaacgucuaccgcgacgaggcccucaacaaccgcuuccagaucaagggcgucgagcucaaguccggcuacaaggacuggauccucuggaucuccuucgccaucuccugcuuccuccucugcgucgcccuccucggcuucaucaugugggccugccagaagggcaacauccgcugcaacaucugcaucuga

SEQ ID NO: 98402 - RNA, 1701 nt, Artificial Sequence
  derived and/or modified CDS sequence (opt2) from hemagglutinin__InfluenzaA__ACG80445
augaagaccaucaucgcccucuccuacauccucugccucgucuucgcccagaagcuccccggcaacgacaacuccaccgccacccucugccucggccaccacgccguccccaacggcaccaucguccgcaccaucaccaacgaccagaucgaggucaccaacgccaccgagcucguccaguccuccuccaccggcgagaucugcgacuccccccaccagauccucgacggcgagaacugcacccucaucgacgcccuccucggcgacccccagugcgacggcuuccagaacaagaagugggaccucuucgucgagcgcuccaaggccuacuccaacugcuaccccuacgacguccccgacuacgccucccuccgcucccucgucgccuccuccggcacccucgaguucaacaacgaguccuucaacuggaccggcgucacccagaacggcaccuccuccgccugcauccgccgcuccaacaacuccuucuucucccgccucaacuggcucacccaccuccgcuucaaguaccccgcccucaacgucaccaugcccaacaacgagcaguucgacaagcucuacaucuggggcguccaccaccccggcaccgacaacgaccagaucuuccucuacgcccaggccuccggccgcaucaccgucuccaccaagcgcucccagcagaccgucauccccaacaucggcucccgcccccgcguccgcaacauccccucccgcaucuccaucuacuggaccaucgucaagcccggcgacauccuccucaucaacuccaccggcaaccucaucgccccccgcggcuacuucaagauccgcaacggcaaguccuccaucaugcgcuccgacgcccccaucggcaagugcaacuccgagugcaucacccccaacggcuccauccccaacgacaagcccuuccagaacgucaaccgcaucaccuacggcgccugcccccgcuacgucaagcagaacacccucaagcucgccaccggcaugcgcaacguccccgagaagcagacccgcggcaucuucggcgccaucgccggcuucaucgagaacggcugggagggcauggucgacggcugguacggcuuccgccaccagaacuccgagggccgcggccaggccgccgaccucaaguccacccaggccgccaucgaccagaucaacggcaagcucaaccgccucaucggcaagaccaacgagaaguuccaccagaucgagaaggaguucuccgaggucgagggccgcauccaggaccucgagaaguacgucgaggacaccaagaucgaccucugguccuacaacgccgagcuccucgucgcccucgagaaccagcacaccaucgaccucaccgacuccgagaugaacaagcucuucgagaagaccaagaaccagcuccgcgagaacgccgaggacaugggcaacggcugcuucaagaucuaccacaagugcgacaacgccugcaucggcuccauccgcaacggcaccuacgaccacgacgucuaccgcgacgaggcccucaacaaccgcuuccagaucaagggcgucgagcucaaguccggcuacaaggacuggauccucuggaucuccuucgccaucuccugcuuccuccucugcgucgcccuccucggcuucaucaugugggccugccagaagggcaacauccgcugcaacaucugcaucuga

SEQ ID NO: 98403 - RNA, 1701 nt, Artificial Sequence; identical to SEQ ID NO: 98397
  derived and/or modified CDS sequence (opt2) from hemagglutinin__InfluenzaA__ACG80454

SEQ ID NO: 98404 - RNA, 1701 nt, Artificial Sequence; identical to SEQ ID NO: 98397
  derived and/or modified CDS sequence (opt2) from hemagglutinin__InfluenzaA__ACG80463

SEQ ID NO: 98405 - RNA, 1701 nt, Artificial Sequence
  derived and/or modified CDS sequence (opt2) from hemagglutinin__InfluenzaA__ACG80472
augaagaccaucaucgcccucuccuacauccucugccucgucuucgcccagaagcuccccggcaacgacaacuccaccgccacccucugccucggccaccacgccguccccaacggcaccaucguccgcaccaucaccaacgaccagaucgaggucaccaacgccaccgagcucguccaguccuccuccaccggcgagaucugcgacuccccccaccagauccucgacggcgagaacugcacccucaucgacgcccuccucggcgacccccagugcgacggcuuccagaacaagaagugggaccucuucgucgagcgcuccaaggccuacuccaacugcuaccccuacgacguccccgacuacgccucccuccgcucccucgucgccuccuccggcacccucgaguucaacaacgaguccuucaacuggaccggcgucacccagaacggcaccuccuccgccugcauccgccgcuccaacaacuccuucuucucccgccucaacuggcucacccaccuccgcuucaaguaccccgcccucaacgucaccaugcccaacaacgagcaguucgacaagcucuacaucuggggcguccaccaccccggcaccgacaacgaccagaucuuccucuacgcccaggccuccggccgcaucaccgucuccaccaagcgcucccagcagaccgucauccccaacaucggcucccgcccccgcguccgcaacauccccucccgcaucuccaucuacuggaccaucgucaagcccggcgacauccuccucaucaacuccaccggcaaccucaucgccccccgcggcuacuucaagauccgcuccggcaaguccuccaucaugcgcuccgacgcccccaucggcaagugcaacuccgagugcaucacccccaacggcuccauccccaacgacaagcccuuccagaacgucaaccgcaucaccuacggcgccugcccccgcuacgucaagcagaacacccucaagcucgccaccggcaugcgcaacguccccgagaagcagacccgcggcaucuucggcgccaucgccggcuucaucgagaacggcugggagggcauggucgacggcugguacggcuuccgccaccagaacuccgagggcaucggccaggccgccgaccucaaguccacccaggccgcccucgaccagaucaacggcaagcucaaccgccucaucggcaagaccaacgagaaguuccaccagaucgagaaggaguucuccgaggucgagggccgcauccaggaccucgagaaguacgucgaggacaccaagaucgaccucugguccuacaacgccgagcuccucgucgcccucgagaaccagcacaccaucgaccucaccgacuccgagaugaacaagcucuucgagaagaccaagaagcagcuccgcgagaacgccgaggacaugggcaacggcugcuucaagaucuaccacaagugcgacaacgccugcaucggcuccauccgcaacggcaccuacgaccacaacgucuaccgcgacgaggcccucaacaaccgcuuccagaucaagggcgucgagcucaaguccggcuacaaggacuggauccucuggaucuccuucgccaucuccugcuuccuccucugcgucgcccuccucggcuucaucaugugggccugccagaagggcaacauccgcugcaacaucugcaucuga

SEQ ID NO: 98406 - RNA, 1701 nt, Artificial Sequence
  derived and/or modified CDS sequence (opt2) from hemagglutinin__InfluenzaA__ACH69558
augaagaccaucaucgcccucuccuacauccucugccucgucuucgcccagaagcuccccggcaacgacaacuccaccgccacccucugccucggccaccacgccguccccaacggcaccaucgucaagaccaucaccaacgaccagaucgaggucaccaacgccaccgagcucguccaguccuccuccaccggcggcaucugcaacuccccccaccagauccucgacggcgagaacugcacccucaucgacgcccuccucggcgacccccagugcgacggcuuccagaacaagaagugggaccucuucgucgagcgcuccaaggccuacuccaacugcuaccccuacgacguccccgacuacgccucccuccgcucccucgucgccuccuccggcacccucgaguucaacaacgaguccuucaacuggaccggcgucacccagaacggcaccuccuccgccugcaagcgccgcuccaacaacuccuucuucucccgccucaacuggcucacccaccuccgcuucaaguaccccgcccucaacgucaccaugcccaacaacgagaaguucgacaagcucuacaucuggggcguccaccaccccggcaccgacaacgaccagaucuuccucuacgcccaggccuccggccgcaucaccgucuccaccaagcgcucccagcagaccgucauccccaacaucggcucccgcccccgcguccgcaacauccccucccgcaucuccaucuacuggaccaucgucaagcccggcgacauccuccucaucaacuccaccggcaaccucaucgccccccgcggcuacuucaagauccgcuccggcaaguccuccaucaugcgcuccgacgcccccaucggcaagugcaacuccgagugcaucacccccaacggcuccauccccaacgacaagcccuuccagaacgucaaccgcaucaccuacggcgccugcccccgcuacgucaagcagaacacccucaagcucgccaccggcaugcgcaacguccccgagaagcagacccgcggcaucuucggcgccaucgccggcuucaucgagaacggcugggagggcauggucgacggcugguacggcuuccgccaccagaacuccgagggcaucggccaggccgccgaccucaaguccacccaggccgccaucaaccagaucaacggcaagcucaaccgccucaucggcaagaccaacgagaaguuccaccagaucgagaaggaguucuccgaggucgagggccgcauccaggaccucgagaaguacgucgaggacaccaagaucgaccucugguccuacaacgccgagcuccucgucgcccucgagaaccagcacaccaucgaccucaccgacuccgagaugaacaagcucuucgagcgcaccaagaagcagcuccgcgagaacgccgaggacaugggcaacggcugcuucaagaucuaccacaagugcgacaacgccugcaucggcuccauccgcaacggcaccuacgaccacgacgucuaccgcgacgaggcccucaacaaccgcuuccagaucaagggcgucgagcucaaguccggcuacaaggacuggauccucuggaucuccuucgccaucuccugcuuccuccucugcgucgcccuccucggcuucaucaugugggccugccagaagggcaacauccgcugcaacaucugcaucuga

SEQ ID NO: 98407 - RNA, 1701 nt, Artificial Sequence
  derived and/or modified CDS sequence (opt2) from hemagglutinin__InfluenzaA__ACH69569
augaagaccaucaucgcccucuccuacauccucugccucgucuucgcccagaagcuccccggcaacgacaacuccaccgccacccucugccucggccaccacgccguccccaacggcaccaucgucaagaccaucaccaacgaccagaucgaggucaccaacgccaccgagcucguccaguccuccuccaccggcggcaucugcaacuccccccaccagauccucgacggcgagaacugcacccucaucgacgcccuccucggcgacccccagugcgacggcuuccagaacaagaagugggaccucuucgucgagcgcuccaaggccuacuccaacugcuaccccuacgacguccccgacuacgccucccuccgcucccucgucgccuccuccggcacccucgaguucaacaacgaguccuucaacuggaccggcgucacccagaacggcaccuccuccgccugcaagcgccgcuccaacaacuccuucuucucccgccucaacuggcucacccaccucaaguucaaguaccccgcccucaacgucaccaugcccaacaacgagaaguucgacaagcucuacaucuggggcguccaccaccccggcaccgacaacgaccagaucuuccucuacgcccaggccuccggccgcaucaccgucuccaccaagcgcucccagcagaccgucauccccaacaucggcucccgcccccgcguccgcaacauccccucccgcaucuccaucuacuggaccaucgucaagcccggcgacauccuccucaucaacuccaccggcaaccucaucgccccccgcggcuacuucaagauccgcuccggcaaguccuccaucaugcgcuccgacgcccccaucggcaagugcaacuccgagugcaucacccccaacggcuccauccccaacgacaagcccuuccagaacgucaaccgcaucaccuacggcgccugcccccgcuacgucaagcagaacucccucaagcucgccaccggcaugcgcaacguccccgagaagcagacccgcggcaucuucggcgccaucgccggcuucaucgagaacggcugggagggcauggucgacggcugguacggcuuccgccaccagaacuccgagggcaucggccaggccgccgaccucaaguccacccaggccgccaucaaccagaucaacggcaagcucaaccgccucaucggcaagaccaacgagaaguuccaccagaucgagaaggaguucuccgaggucgagggccgcauccaggaccucgagaaguacgucgaggacaccaagaucgaccucugguccuacaacgccgagcuccucgucgcccucgagaaccagcacaccaucgaccucaccgacuccgagaugaacaagcucuucgagcgcaccaagaagcagcuccgcgagaacgccgaggacaugggcaacggcugcuucaagaucuaccacaagugcgacaacgccugcaucggcuccauccgcaacggcaccuacgaccacgacgucuaccgcgacgaggcccucaacaaccgcuuccagaucaagggcgucgagcucaaguccggcuacaaggacuggauccucuggaucuccuucgccaucuccugcuuccuccucugcgucgcccuccucggcuucaucaugugggccugccagaagggcaacauccgcugcaacaucugcaucuga

SEQ ID NO: 98408 - RNA, 1701 nt, Artificial Sequence
  derived and/or modified CDS sequence (opt2) from hemagglutinin__InfluenzaA__ACH69580
augaagaccaucaucgcccucuccuacauccucugccucgucuucgcccagaagcuccccggcaacgacaacuccaccgccacccucugccucggccaccacgccguccccaacggcaccaucgucaagaccaucaccaacgaccagaucgaggucaccaacgccaccgagcucguccaguccuccuccaccggcggcaucugcgacuccccccaccagauccucgacggcgagaacugcacccucaucgacgcccuccucggcgacccccagugcgacgacuuccagaacaagaagugggaccucuucgucgagcgcuccaaggccuacuccaacugcuaccccuacgacguccccgacuacgccucccuccgcucccucgucgccuccuccggcacccucgaguucaacaacgaguccuucaacuggaccggcgucacccagaacggcaccuccuccgccugcaagcgccgcuccaacaacuccuucuucucccgccucaacuggcucacccaccucaaguucaaguaccccgcccucaacgucaccaugcccaacaacgagaaguucgacaagcucuacaucuggggcguccaccaccccggcaccgacaacgaccagaucuuccucuacgcccaggccuccggccgcaucaccgucuccaccaagcgcucccagcagaccgucauccccaacaucggcucccgcccccgcguccgcaacauccccucccgcaucuccaucuacuggaccaucgucaagcccggcgacauccuccucaucaacuccaccggcaaccucaucgccccccgcggcuacuucaagauccgcuccggcaaguccuccaucaugcgcuccgacgcccccaucggcaagugcaacuccgagugcaucacccccaacggcuccauccccaacgacaagcccuuccagaacgucaaccgcaucaccuacggcgccugcccccgcuacgucaagcagaacacccucaagcucgccaccggcaugcgcaacguccccgagaagcagacccgcggcaucuucggcgccaucgccggcuucaucgagaacggcugggagggcauggucgacggcugguacggcuuccgccaccagaacuccgagggcaucggccaggccgccgaccucaaguccacccaggccgccaucaaccagaucaacggcaagcucaaccgccucaucggcaagaccaacgagaaguuccaccagaucgagaaggaguucuccgaggucgagggccgcauccaggaccucgagaaguacgucgaggacaccaagaucgaccucugguccuacaacgccgagcuccucgucgcccucgagaaccagcacaccaucgaccucaccgacuccgagaugaacaagcucuucgagcgcaccaagaagcagcuccgcgagaacgccgaggacaugggcaacggcugcuucaagaucuaccacaagugcgacaacgccugcaucggcuccauccgcaacggcaccuacgaccacgacgucuaccgcgacgaggcccucaacaaccgcuuccagaucaagggcgucgagcucaaguccggcuacaaggacuggauccucuggaucuccuucgccaucuccugcuuccuccucugcgucgcccuccucggcuucaucaugugggccugccagaagggcaacauccgcugcaacaucugcaucuga

SEQ ID NO: 98409 - RNA, 1701 nt, Artificial Sequence
  derived and/or modified CDS sequence (opt2) from hemagglutinin__InfluenzaA__ACH69591
augaagaccaucaucgcccucuccuacauccucugccucgccuucgcccagaagcuccccggcaacgacaacuccaccgccacccucugccucggccaccacgccguccccaacggcacccucgucaagaccaucaccaacgaccagaucgaggucaccaacgccaccgagcucguccaguccuccuccaccggccgcaucugcgacuccccccaccagauccucgacggcgagaacugcacccucaucgacgcccuccucggcgacccccacugcgacggcuuccagaacaaggagugggaccucuucgucgagcgcuccaaggccuacuccaacugcuaccccuacgacguccccgacuacgccucccuccgcucccucgucgccuccuccggcacccucgaguucaacaacgaguccuucaacuggaccggcgucgcccagaacggcaccuccuccgccugcaagcgccgcuccaucaacuccuucuucucccgccucaacuggcuccaccagcucaaguaccgcuaccccgcccucaacgucaccaugcccaacaacgacaaguucgacaagcucuacaucuggggcguccaccaccccuccaccgacuccgaccagaucuccgucuacgcccaggccuccggccgcgucaccgucuccaccaagcgcucccagcagaccgucauccccaacaucggcucccgccccuggguccgcggcaucuccucccgcaucuccaucuacuggaccaucgucaagcccggcgacauccuccucaucaacuccaccggcaaccucaucgccccccgcggcuacuucaagauccgcuccggcaaguccuccaucaugcgcuccgacgcccccaucggcaagugcaacuccgagugcaucacccccaacggcuccauccccaacgacaagcccuuccagaacgucaaccgcaucaccuacggcgccugcccccgcuacgucaagcagaacacccucaagcucgccaccggcaugcgcaacguccccgagaagcagacccgcggcaucuucggcgccaucgccggcuucaucgagaacggcugggagggcaugauggacggcugguacggcuuccgccaccagaacuccgagggcaccggccaggccgccgaccucaaguccacccaggccgccaucaaccagaucaacggcaagcucaacaagcucaucgagaagaccaacgagaaguuccaccagaucgagaacgaguucuccgaggucgagggccgcauccaggaccucgagaaguacgucgaggacaccaagaucgaccucugguccuacaacgccgagcuccucgucgcccucgagaaccagcacaccaucgaccucaccgacuccgagaugaacaagcucuucgagcgcacccgcaagcagcuccgcgagaacgccgaggacaugggcaacggcugcuucaagaucuaccacaagugcgacaacgccugcaucggcuccauccgcaacggcaccuacgaccacgacgucuaccgcgacgaggcccucaacaaccgcuuccagaucaagggcgucgagcucaaguccggcuacaaggacuggauccucuggaucuccuucgccaucuccugcuuccuccucugcgucguccuccucggcuucaucaugugggccugccagaagggcaacauccgcugcaacaucugcaucuga

SEQ ID NO: 98410 - RNA, 1701 nt, Artificial Sequence
  derived and/or modified CDS sequence (opt2) from hemagglutinin__InfluenzaA__ACH69602
augaagaccaucaucgcccucuccuacauccucugccucgccuucgcccagaagcuccccggcaacgacaacuccaccgccacccucugccucggccaccacgccguccccaacggcacccucgucaagaccaucaccaacgaccagaucgaggucaccaacgccaccgagcucguccaguccuccuccaccggccgcaucugcgacuccccccaccagauccucgacggcgagaacugcacccucaucgacgcccuccucggcgacccccacugcgacggcuuccagaacaaggagugggaccucuucgucgagcgcuccaaggccuacuccaacugcuaccccuacgacguccccgacuacgccucccuccgcucccucgucgccuccuccggcacccucgaguucaacaacgaguccuucaacuggaccggcgucgcccagaacggcaccuccuccgccugcaagcgccgcuccaucaacuccuucuucucccgccucaacuggcuccaccagcucaaguaccgcuaccccgcccucaacgucaccaugcccaacaacgacaaguucgacaagcucuacaucuggggcguccaccaccccuccaccgacuccgaccagaucuccgucuacgcccaggccuccggccgcgucaccgucuccaccaagcgcucccagcagaccgucauccccaacaucggcucccgccccuggguccgcggcaucuccucccgcaucuccaucuacuggaccaucgucaagcccggcgacauccuccucaucaacuccaccggcaaccucaucgccccccgcggcuacuucaagauccgcuccggcaaguccuccaucaugcgcuccgacgcccccaucggcaagugcaacuccgagugcaucacccccaacggcuccauccccaacgacaagcccuuccagaacgucaaccgcaucaccuacggcgccugcccccgcuacgucaagcagaacacccucaagcucgccaccggcaugcgcaacguccccgagaagcagacccgcggcaucuucggcgccaucgccggcuucaucgagaacggcugggagggcaugauggacggcugguacggcuuccgccaccagaacuccgagggcaccggccaggccgccgaccucaaguccacccaggccgccaucaaccagaucaacggcaagcucaacaagcucaucgagaagaccaacgagaaguuccaccagaucgagaaggaguucuccgaggucgagggccgcauccaggaccucgagaaguacgucgaggacaccaagaucgaccucugguccuacaacgccgagcuccucgucgcccucgagaaccagcacaccaucgaccucaccgacuccgagaugaacaagcucuucgagcgcacccgcaagcagcuccgcgagaacgccgaggacaugggcaacggcugcuucaagaucuaccacaagugcgacaacgccugcaucggcuccauccgcaacggcaccuacgaccacgacgucuaccgcgacgaggcccucaacaaccgcuuccagaucaagggcgucgagcucaaguccggcuacaaggacuggauccucuggaucuccuucgccaucuccugcuuccuccucugcgucguccuccucggcuucaucaugugggccugccagaagggcaacauccgcugcaacaucugcaucuga

SEQ ID NO: 98411 - RNA, 1701 nt, Artificial Sequence
  derived and/or modified CDS sequence (opt2) from hemagglutinin__InfluenzaA__ACH69613
augaagaccaucaucgcccucuccuacauccucugccucgccuucgcccagaagcuccccggcaacgacaacuccacccccacccucugccucggccaccacgccguccccaacggcacccucgucaagaccaucaccaacgaccagaucgaggucaccaacgccaccgagcucguccaguccuccuccaccggcggcaucugcgacuccccccaccagaucaucgacggcgagaacugcacccucaucgacgcccuccucggcgacccccacugcgacggcuuccagaacaaggagugggaccucuucgucgagcgcuccaaggccuacuccaacugcuaccccuacgacguccccgacuacgccucccuccgcucccucgucgccuccuccggcacccucgaguucaacaacgaguccuucaacuggaccggcgucgcccagaacggcaccuccuccgccugcaagcgccgcuccaucaacuccuucuucucccgccucaacuggcuccaccagcucaaguaccgcuaccccgcccucaacgucaccaugcccaacaacgacaaguucgacaagcucuacaucuggggcguccaccaccccuccaccgacuccgaccagaucuccgucuacgcccaggccuccggccgcgucaccgucuccaccaagcgcucccagcagaccgucauccccaacaucggcucccgccccuggguccgcggcaucuccucccgcaucuccaucuacuggaccaucgucaagcccggcgacauccuccucaucaacuccaccggcaaccccaucgccccccgcggcuacuucaagauccgcuccggcaaguccuccaucaugcgcuccgacgcccccaucggcaagugcaacuccgagugcaucacccccaacggcuccauccccaacgacaagcccuuccagaacgucaaccgcaucaccuacggcgccugcccccgcuacgucaagcagaacacccucaagcucgccaccggcaugcgcaacguccccgagaagcagacccgcggcaucuucggcgccaucgccggcuucaucgagaacggcugggagggcaugauggacggcugguacggccuccgccaccagaacuccgagggcaccggccaggccgccgaccucaaguccacccaggccgccaucaaccagaucaacggcaagcucaacaagcucaucgagaagaccaacgagaaguuccaccagaucgagaacgaguucuccgaggucgagggccgcauccaggaccucgagaaguacgucgaggacaccaagaucgaccucugguccuacaacgccgagcuccucgucgcccucgagaaccagcacaccaucgaccucaccgacuccgagaugaacaagcucuucgagcgcacccgcaagcagcuccgcgagaacgccgaggacaugggcaacggcugcuucaagaucuaccacaagugcgacaacgccugcaucggcuccauccgcaacggcaccuacgaccacgacgucuaccgcgacgaggcccucaacaaccgcuuccagaucaagggcgucgagcucaaguccggcuacaaggacuggauccucuggaucuccuucgccaucuccugcuuccuccucugcgucguccuccucggcuucaucaugugggccugccagaagggcaacauccgcugcaacaucugcaucuga

SEQ ID NO: 98412 - RNA, 1701 nt, Artificial Sequence; identical to SEQ ID NO: 96666
  derived and/or modified CDS sequence (opt2) from hemagglutinin__InfluenzaA__ACH82060

SEQ ID NO: 98413 - RNA, 1701 nt, Artificial Sequence; identical to SEQ ID NO: 98352
  derived and/or modified CDS sequence (opt2) from hemagglutinin__InfluenzaA__ACI06123

SEQ ID NO: 98414 - RNA, 1701 nt, Artificial Sequence; identical to SEQ ID NO: 98352
  derived and/or modified CDS sequence (opt2) from hemagglutinin__InfluenzaA__ACI06126

SEQ ID NO: 98415 - RNA, 1701 nt, Artificial Sequence; identical to SEQ ID NO: 98352
  derived and/or modified CDS sequence (opt2) from hemagglutinin__InfluenzaA__ACI06127

SEQ ID NO: 98416 - RNA, 1701 nt, Artificial Sequence; identical to SEQ ID NO: 98352
  derived and/or modified CDS sequence (opt2) from hemagglutinin__InfluenzaA__ACI06129

SEQ ID NO: 98417 - RNA, 1701 nt, Artificial Sequence; identical to SEQ ID NO: 98352
  derived and/or modified CDS sequence (opt2) from hemagglutinin__InfluenzaA__ACI06130

SEQ ID NO: 98418 - RNA, 1701 nt, Artificial Sequence; identical to SEQ ID NO: 98352
  derived and/or modified CDS sequence (opt2) from hemagglutinin__InfluenzaA__ACI06132

SEQ ID NO: 98419 - RNA, 1701 nt, Artificial Sequence; identical to SEQ ID NO: 98354
  derived and/or modified CDS sequence (opt2) from hemagglutinin__InfluenzaA__ACI06133

SEQ ID NO: 98420 - RNA, 1701 nt, Artificial Sequence; identical to SEQ ID NO: 98354
  derived and/or modified CDS sequence (opt2) from hemagglutinin__InfluenzaA__ACI06134

SEQ ID NO: 98421 - RNA, 1701 nt, Artificial Sequence; identical to SEQ ID NO: 98354
  derived and/or modified CDS sequence (opt2) from hemagglutinin__InfluenzaA__ACI06135

SEQ ID NO: 98422 - RNA, 1701 nt, Artificial Sequence; identical to SEQ ID NO: 98354
  derived and/or modified CDS sequence (opt2) from hemagglutinin__InfluenzaA__ACI06136

SEQ ID NO: 98423 - RNA, 1701 nt, Artificial Sequence; identical to SEQ ID NO: 98354
  derived and/or modified CDS sequence (opt2) from hemagglutinin__InfluenzaA__ACI06137

SEQ ID NO: 98424 - RNA, 1701 nt, Artificial Sequence; identical to SEQ ID NO: 98354
  derived and/or modified CDS sequence (opt2) from hemagglutinin__InfluenzaA__ACI06138

SEQ ID NO: 98425 - RNA, 1701 nt, Artificial Sequence; identical to SEQ ID NO: 98354
  derived and/or modified CDS sequence (opt2) from hemagglutinin__InfluenzaA__ACI06139

SEQ ID NO: 98426 - RNA, 1701 nt, Artificial Sequence; identical to SEQ ID NO: 98354
  derived and/or modified CDS sequence (opt2) from hemagglutinin__InfluenzaA__ACI06140

SEQ ID NO: 98427 - RNA, 1701 nt, Artificial Sequence; identical to SEQ ID NO: 98354
  derived and/or modified CDS sequence (opt2) from hemagglutinin__InfluenzaA__ACI06141

SEQ ID NO: 98428 - RNA, 1701 nt, Artificial Sequence; identical to SEQ ID NO: 98354
  derived and/or modified CDS sequence (opt2) from hemagglutinin__InfluenzaA__ACI06142

SEQ ID NO: 98429 - RNA, 1701 nt, Artificial Sequence; identical to SEQ ID NO: 98354
  derived and/or modified CDS sequence (opt2) from hemagglutinin__InfluenzaA__ACI06143

SEQ ID NO: 98430 - RNA, 1701 nt, Artificial Sequence
  derived and/or modified CDS sequence (opt2) from hemagglutinin__InfluenzaA__ACI06144
augaagaccaucaucgcccucuccuacaucuucugccucgcccucggccaggaccuccccggcaacgacaacuccaccgccacccucugccucggccaccacgccguccccaacggcacccucgucaagaccaucaccgacgaccagaucgaggucaccaacgccaccgagcucguccaguccuccuccaccggcaagaucugcaacaacccccaccgcauccucgacggcaucgacugcacccucaucgacgcccuccucggcgacccccacugcgacgucuuccagaacgagaccugggaccucuucgucgagcgcuccaaggccuucuccaacugcuaccccuacgacguccccgacuacgccucccuccgcucccucgucgccuccuccggcacccucgaguucaucaccgagggcuucaccuggaccggcgucacccagaacggcggcuccaacgccugcaagcgcggccccggcuccggcuucuucucccgccucaacuggcucaccaaguccggcuccaccuaccccguccucaacgucaccaugcccaacaacgacaacuucgacaagcucuacaucuggggcguccaccaccccuccaccaaccaggagcagaccucccucuacguccaggccuccggccgcgucaccgucuccacccgccgcucccagcagaccaucauccccaacaucggcucccgccccuggguccgcggccucuccucccgcaucuccaucuacuggaccaucgucaagcccggcgacguccucgucaucaacuccaacggcaaccucaucgccccccgcggcuacuucaagaugcgcaccggcaaguccuccaucaugcgcuccgacgcccccaucgacaccugcaucuccgagugcaucacccccaacggcuccauccccaacgacaagcccuuccagaacgucaacaagaucaccuacggcgccugccccaaguacgucaagcagaacacccucaagcucgccaccggcaugcgcaacguccccgagaagcagacccgcggccucuucggcgccaucgccggcuucaucgagaacggcugggagggcaugaucgacggcugguacggcuuccgccaccagaacuccgagggcaccggccaggccgccgaccucaaguccacccaggccgccaucgaccagaucaacggcaagcucaaccgcgucaucgagaagaccaacgagaaguuccaccagaucgagaaggaguucuccgaggucgagggccgcauccaggaccucgagaaguacgucgaggacaccaagaucgaccucugguccuacaacgccgagcuccucgucgcccucgagaaccagcacaccaucgaccucaccgacuccgagaugaaccgccucuucgagaagacccgccgccagcuccgcgagaacgccgaggacaugggcaacggcugcuucaagaucuaccacaagugcgacaacgccugcaucgaguccauccgcaacggcaccuacgaccacgacgucuaccgcgacgaggcccucaacaaccgcuuccagaucaagggcgucgagcucaaguccggcuacaaggacuggauccucuggaucuccuucgccaucuccugcuuccuccucugcgucguccuccucggcuucaucaugugggccugccagcgcggcaacauccgcugcaacaucugcaucuga

SEQ ID NO: 98431 - RNA, 1701 nt, Artificial Sequence; identical to SEQ ID NO: 98354
  derived and/or modified CDS sequence (opt2) from hemagglutinin__InfluenzaA__ACI06145

SEQ ID NO: 98432 - RNA, 1701 nt, Artificial Sequence
  derived and/or modified CDS sequence (opt2) from hemagglutinin__InfluenzaA__ACI06146
augaagaccaucaucgcccucuccuacaucuucugccucgcccucggccaggaccuccccggcaacgacaacuccaccgccacccucugccucggccaccacgccguccccaacggcacccucgucaagaccaucaccgacgaccagaucgaggucaccaacgccaccgagcucguccaguccuccuccaccggcaagaucugcaacaacccccaccgcauccucgacggcaucgacugcacccucaucgacgcccuccucggcgacccccacugcgacgucuuccagaacgagaccugggaccucuucgucgagcgcuccaaggccuucuccaacugcuaccccuacgacguccccgacuacgccucccuccgcucccucgucgccuccuccggcacccucgaguucaucaccgagggcuucaccuggaccggcgucacccagaacggcggcuccaacgccugcaagcgcggccccggcuccggcuucuucucccgccucaacuggcucaccaaguccggcuccaccuaccccguccucaacgucaccaugcccaacaacgacaacuucgacaagcucuacaucuggggcguccaccaccccuccaccaaccaggagcagaccucccucuacguccaggccuccggccgcgucaccgucuccacccgccgcucccagcagaccaucauccccaacaucggcuccucccccuggguccgcggccucuccucccgcaucuccaucuacuggaccaucgucaagcccggcgacguccucgucaucaacuccaacggcaaccucaucgccccccgcggcuacuucaagaugcgcaccggcaaguccuccaucaugcgcuccgacgcccccaucgacaccugcaucuccgagugcaucacccccaacggcuccauccccaacgacaagcccuuccagaacgucaacaagaucaccuacggcgccugccccaaguacgucaagcagaacacccucaagcucgccaccggcaugcgcaacguccccgagaagcagacccgcggccucuucggcgccaucgccggcuucaucgagaacggcugggagggcaugaucgacggcugguacggcuuccgccaccagaacuacgagggcaccggccaggccgccgaccucaaguccacccaggccgccaucgaccagaucaacggcaagcucaaccgcgucaucgagaagaccaacgagaaguuccaccagaucgagaaggaguucuccgaggucgagggccgcauccaggaccucgagaaguacgucgaggacaccaagaucgaccucugguccuacaacgccgagcuccucgucgcccucgagaaccagcacaccaucgaccucaccgacuccgagaugaacaagcucuucgagaagacccgccgccagcuccgcgagaacgccgaggacaugggcaacggcugcuucaagaucuaccacaagugcgacaacgccugcaucgaguccauccgcaacggcaccuacgaccacgacgucuaccgcgacgaggcccucaacaaccgcuuccagaucaagggcgucgagcucaaguccggcuacaaggacuggauccucuggaucuccuucgccaucuccugcuuccuccucugcgucguccuccucggcuucaucaugugggccugccagcgcggcaacauccgcugcaacaucugcaucuga

SEQ ID NO: 98433 - RNA, 1701 nt, Artificial Sequence; identical to SEQ ID NO: 98354
  derived and/or modified CDS sequence (opt2) from hemagglutinin__InfluenzaA__ACI06147

SEQ ID NO: 98434 - RNA, 1701 nt, Artificial Sequence; identical to SEQ ID NO: 98354
  derived and/or modified CDS sequence (opt2) from hemagglutinin__InfluenzaA__ACI06148

SEQ ID NO: 98435 - RNA, 1701 nt, Artificial Sequence
  derived and/or modified CDS sequence (opt2) from hemagglutinin__InfluenzaA__ACI06149
augaagaccaucaucgcccucuccuacaucuucugccucgcccucggccaggaccuccccggcaacgacaacuccaccgccacccucugccucggccaccacgccguccccaacggcacccucgucaagaccaucaccgacgaccagaucgaggucaccaacgccaccgagcucguccaguccuccuccaccggcaagaucugcaacaacccccaccgcauccucgacggcaucgacugcacccucaucgacgcccuccucggcgacccccacugcgacgucuuccagaacgagaccugggaccucuucgucgagcgcuccaaggccuucuccaacugcuaccccuacgacguccccgacuacgccucccuccgcucccucgucgccuccuccggcacccucgaguucaucaccgagggcuucaccuggaccggcgucacccagaacggcggcuccaacgccugcaagcgcggccccggcuccggcuucuucucccgccucaacuggcucaccaaguccggcuccaccuaccccguccucaacgucaccaugcccaacaacgacaacuucgacaagcucuacaucuggggcguccaccaccccuccaccaaccaggagcagaccucccucuacguccaggccuccggccgcgucaccgucuccacccgccgcucccgccagaccaucauccccaacaucggcucccgccccuggguccgcggccucuccucccgcaucuccaucuacuggaccaucgucaagcccggcgacguccucgucaucaacuccaacggcaaccucaucgccccccgcggcuacuucaagaugcgcaccggcaaguccuccaucaugcgcuccgacgcccccaucgacaccugcaucuccgagugcaucacccccaacggcuccauccccaacgacaagcccuuccagaacgucaacaagaucaccuacggcgccugccccaaguacgucaagcagaacacccucaagcucgccaccggcaugcgcaacguccccgagaagcagacccgcggccucuucggcgccaucgccggcuucaucgagaacggcugggagggcaugaucgacggcugguacggcuuccgccaccagaacuccgagggcaccggccaggccgccgaccucaaguccacccaggccgccaucgaccagaucaacggcaagcucaaccgcgucaucgagaagaccaacgagaaguuccaccagaucgagaaggaguucuccgaggucgagggccgcauccaggaccucgagaaguacgucgaggacaccaagaucgaccucugguccuacaacgccgagcuccucgucgcccucgagaaccagcacaccaucgaccucaccgacuccgagaugaacaagcucuucgagaagacccgccgccagcuccgcgagaacgccgaggacaugggcaacggcugcuucaagaucuaccacaagugcgacaacgccugcaucgaguccauccgcaacggcaccuacgaccacgacgucuaccgcgacgaggcccucaacaaccgcuuccagaucaagggcgucgagcucaaguccggcuacaaggacuggauccucuggaucuccuucgccaucuccugcuuccuccucugcgucguccuccucggcuucaucaugugggccugccagcgcggcaacauccgcugcaacaucugcaucuga

SEQ ID NO: 98436 - RNA, 1701 nt, Artificial Sequence; identical to SEQ ID NO: 98365
  derived and/or modified CDS sequence (opt2) from hemagglutinin__InfluenzaA__ACI06151

SEQ ID NO: 98437 - RNA, 1701 nt, Artificial Sequence; identical to SEQ ID NO: 98365
  derived and/or modified CDS sequence (opt2) from hemagglutinin__InfluenzaA__ACI06152

SEQ ID NO: 98438 - RNA, 1701 nt, Artificial Sequence
  derived and/or modified CDS sequence (opt2) from hemagglutinin__InfluenzaA__ACI06153
augaagaccaucaucgcccucuccuacaucuucugccucgcccucggccaggaccuccccggcaacgacaacuccaccgccacccucugccucggccaccacgccguccccaacggcacccucgucaagaccaucaccgacgaccagaucgaggucaccaacgccaccgagcucguccaguccuccuccaccggcaagaucugcaacaacccccaccgcauccucgacggcaucgacugcacccucaucgacgcccuccucggcgacccccacugcgacgucuuccagaacgagaccugggaccucuucgucgagcgcuccaaggccuucuccaacugcuaccccuacgacguccccgacuacgccucccuccgcucccucgucgccuccuccggcacccucgaguucaucaccgagggcuucaccuggaccggcgucacccagaacggcggcuccaacgccugcaagcgcggccccggcuccggcuucuucucccgccucaacuggcucaccaaguccggcuccaccuaccccguccucaacgucaccaugcccaacaacgacaacuucgacaagcucuacaucuggggcguccaccaccccuccaccaaccaggagcagaccucccucuacguccaggccuccggccgcgucaccgucuccacccgccgcucccagcagaccaucauccccaacaucggcucccgccccuggguccgcggccucuccucccgcaucuccaucuacuggaccaucgucaagcccggcgacgagcucgucaucaacuccaacggcaaccucaucgccccccgcggcuacuucaagaugcgcaccggcaaguccuccaucaugcgcuccgacgcccccaucgacaccugcaucuccgagugcaucacccccaacggcuccauccccaacgacaagcccuuccagaacgucaacaagaucaccuacggcgccugccccaaguacgucaagcagaacacccucaagcucgccaccggcaugcgcaacguccccgagaagcagacccgcggccucuucggcgccaucgccggcuucaucgagaacggcugggagggcaugaucgacggcugguacggcuuccgccaccagaacuccgagggcaccggccaggccgccgaccucaaguccacccaggccgccaucgaccagaucaacggcaagcucaaccgcgucaucgagaagaccaacgagaaguuccaccagaucgagaaggaguucuccgaggucgagggccgcauccaggaccucgagaaguacgucgaggacaccaagaucgaccucugguccuacaacgccgagcuccucgucgcccucgagaaccagcacaccaucgaccucaccgacuccgagaugaacaagcucuucgagaagacccgccgccagcuccgcgagaacgccgaggacaugggcaacggcugcuucaagaucuaccacaagugcgacaacgccugcaucgaguccauccgcaacggcaccuacgaccacgacgucuaccgcgacgaggcccucaacaaccgcuuccagaucaagggcgucgagcucaaguccggcuacaaggacuggauccucuggaucuccuucgccaucuccugcuuccuccucugcgucguccuccucggcuucaucaugugggccugccagcgcggcaacauccgcugcaacaucugcaucuga

SEQ ID NO: 98439 - RNA, 1701 nt, Artificial Sequence
  derived and/or modified CDS sequence (opt2) from hemagglutinin__InfluenzaA__ACI06155
augaagaccaucaucgcccucuccuacaucuucugccucgcccucggccaggaccuccccggcaacgacaacuccaccgccacccucugccucggccaccacgccguccccaacggcacccucgucaagaccaucaccgacgaccagaucgaggucaccaacgccaccgagcucguccaguccuccuccaccggcaagaucugcaacaacccccaccgcauccucgacggcaucgacugcacccucaucgacgcccuccucggcgacccccacugcgacgucuuccagaacgagaccugggaccucuucgucgagcgcuccaaggccuucuccaacugcuaccccuacgacguccccgacuacgccucccuccgcucccucgucgccuccuccggcacccucgaguucaucaccgagggcuucaccuggaccggcgucacccagaacggcggcuccaacgccugcaagcgcggccccggcuccggcuucuucucccgccucaacuggcucaccaaguccggcuccaccuaccccguccucaacgucaccaugcccaacaacgacaacuucgacaagcucuacaucuggggcguccaccaccccuccaccaaccaggagcagaccucccucuacguccaggccuccggccgcgucaccgucuccacccgccgcucccagcagaccaucauccccaacaucgagucccgccccuggguccgcggccucuccucccgcaucuccaucuacuggaccaucgucaagcccggcgacguccucgucaucaacuccaacggcaaccucaucgccccccgcggcuacuucaagaugcgcaccggcaaguccuccaucguccgcuccgacgcccccaucgacaccugcaucuccgagugcaucacccccaacggcuccauccccaacgacaagcccuuccagaacgucaacaagaucaccuacggcgccugccccaaguacgucaagcagaacacccucaagcucgccaccggcaugcgcaacguccccgagaagcagacccgcggccucuucggcgccaucgccggcuucaucgagaacggcugggagggcaugaucgacggcugguacggcuuccgccaccagaacuccgagggcaccggccaggccgccgaccucaaguccacccaggccgccaucgaccagaucaacggcaagcucaaccgcgucaucgagaagaccaacgagaaguuccaccagaucgagaaggaguucuccgaggucgagggccgcauccaggaccucgagaaguacgucgaggacaccaagaucgaccucugguccuacaacgccgagcuccucgucgcccucgagaaccagcacaccaucgaccucaccgacuccgagaugaacaagcucuucgagaagacccgccgccagcuccgcgagaacgccgaggacaugggcaacggcugcuucaagaucuaccacaagugcgacaacgccugcaucgaguccauccgcaacggcaccuacgaccacgacgucuaccgcgacgaggcccucaacaaccgcuuccagaucaagggcgucgagcucaaguccggcuacaaggacuggauccucuggaucuccuucgccaucuccugcuuccuccucugcgucguccuccucggcuucaucaugugggccugccagcgcggcaacauccgcugcaacaucugcaucuga

SEQ ID NO: 98440 - RNA, 1701 nt, Artificial Sequence; identical to SEQ ID NO: 98365
  derived and/or modified CDS sequence (opt2) from hemagglutinin__InfluenzaA__ACI06156

SEQ ID NO: 98441 - RNA, 1701 nt, Artificial Sequence; identical to SEQ ID NO: 98365
  derived and/or modified CDS sequence (opt2) from hemagglutinin__InfluenzaA__ACI06157

SEQ ID NO: 98442 - RNA, 1701 nt, Artificial Sequence; identical to SEQ ID NO: 98365
  derived and/or modified CDS sequence (opt2) from hemagglutinin__InfluenzaA__ACI06158

SEQ ID NO: 98443 - RNA, 1701 nt, Artificial Sequence; identical to SEQ ID NO: 98365
  derived and/or modified CDS sequence (opt2) from hemagglutinin__InfluenzaA__ACI06159

SEQ ID NO: 98444 - RNA, 1701 nt, Artificial Sequence; identical to SEQ ID NO: 98354
  derived and/or modified CDS sequence (opt2) from hemagglutinin__InfluenzaA__ACI06160

SEQ ID NO: 98445 - RNA, 1701 nt, Artificial Sequence
  derived and/or modified CDS sequence (opt2) from hemagglutinin__InfluenzaA__ACI06161
augaagaccaucaucgcccucuccuacaucuucugccucgcccucggccaggaccuccccggcaacgacaacuccaccgccacccucugccucggccaccacgccguccccaacggcacccucgucaagaccaucaccgacgaccagaucgaggucaccaacgccaccgagcucguccaguccuccuccaccggcaagaucugcaacaacccccaccgcauccucgacggcaucgacugcacccucaucgacgcccuccucggcgacccccacugcgacgucuuccagaacgagaccugggaccucuucgucgagcgcuccaaggccuucuccaacugcuaccccuacgacguccccgacuacgccucccuccgcucccucgucgccuccuccggcacccucgaguucaucaccgagggcuucaccuggaccggcgucacccagaacggcggcuccaacgccugcaagcgcggccccggcuccggcuucuucucccgccucaacuggcucaccaaguccggcuccaccuaccccguccucaacgucaccaugcccaacaacgacaacuucgacaagcucuacaucuggggcguccaccaccccuccaccaaccaggagcagaccucccucuacguccaggccuccggccgcgucaccgucuccacccgccgcucccagcagaccaucauccccaacaucgagucccgccccuggguccgcggccucuccucccgcaucuccaucuacuggaccaucgucaagcccggcgacguccucgucaucaacuccaacggcaaccucaucgccccccgcggcuacuucaagaugcgcaccggcaaguccuccaucaugcgcuccgacgcccccaucgacaccugcaucuccgagugcaucacccccaacggcuccauccccaacgacaagcccuuccagaacgucaacaagaucaccuacggcgccugccccaaguacgucaagcagaacacccucaagcucgccaccggcaugcgcaacguccccgagaagcagacccgcggccucuucggcgccaucgccggcuucaucgagaacggcugggagggcaugaucgacggcugguacggcuuccgccaccagaacuccgagggcaccggccaggccgccgaccucaaguccacccaggccgccaucgaccagaucaacggcaagcucaaccgcgucaucgagaagaccaacgagaaguuccaccagaucgagaaggaguucuccgaggucgagggccgcauccaggaccucgagaaguacgucgaggacaccaagaucgaccucugguccuacaacgccgagcuccucgucgcccucgagaaccagcacaccaucgaccucaccgacuccgagaugaacaagcucuucgagaagacccgccgccagcuccgcgagaacgccgaggacaugggcaacggcugcuucaagaucuaccacaagugcgacaacgccugcaucgaguccauccgcaagggcaccuacgaccacgacgucuaccgcgacgaggcccucaacaaccgcuuccagaucaagggcgucgagcucaaguccggcuacaaggacuggauccucuggaucuccuucgccaucuccugcuuccuccucugcgucguccuccucggcuucaucaugugggccugccagcgcggcaacauccgcugcaacaucugcaucuga

SEQ ID NO: 98446 - RNA, 1701 nt, Artificial Sequence
  derived and/or modified CDS sequence (opt2) from hemagglutinin__InfluenzaA__ACI06162
augaagaccaucaucgcccucuccuacaucuucugccucgcccucggccaggaccuccccggcaacgacaacuccaccgccacccucugccucggccaccacgccguccccaacggcacccucgucaagaccaucaccgacgaccagaucgaggucaccaacgccaccgagcucguccaguccuccuccaccggcaagaucugcaacaacccccaccgcauccucgacggcaucgacugcacccucaucgacgcccuccucggcgacccccacugcgacgucuuccagaacgagaccugggaccucuucgucgagcgcuccaaggccuucuccaacugcuaccccuacgacguccccgacuacgccucccuccgcucccucgucgccuccuccggcacccucgaguucaucaccgagggcuucaccuggaccggcgucacccagaacggcggcuccaacgccugcaagcgcggccccggcuccggcuucuucucccgccucaacuggcucaccaaguccggcuccaccuaccccguccucaacgucaccaugcccaacaacgacaacuucgacaagcucuacaucuggggcguccaccaccccuccaccaaccaggagcagaccucccucuacguccaggccuccggccgcgucaccgucuccacccgccgcucccagcagaccaucauccccaacaucgagucccgccccuggguccgcggccucuccucccgcaucuccaucuacuggaccaucgucaaccccggcgacguccucgucaucaacuccaacggcaaccucaucgccccccgcggcuacuucaagaugcgcaccggcaaguccuccaucaugcgcuccgacgcccccaucgacaccugcaucuccgagugcaucacccccaacggcuccauccccaacgacaagcccuuccagaacgucaacaagaucaccuacggcgccugccccaaguacgucaagcagaacacccucaagcucgccaccggcaugcgcaacguccccgagaagcagacccgcggccucuucggcgccaucgccggcuucaucgagaacggcugggagggcaugaucgacggcugguacggcuuccgccaccagaacuccgagggcaccggccaggccgccgaccucaaguccacccaggccgccaucgaccagaucaacggcaagcucaaccgcgucaucgagaagaccaacgagaaguuccaccagaucgagaaggaguucuccgaggucgagggccgcauccaggaccucgagaaguacgucgaggacaccaagaucgaccucugguccuacaacgccgagcuccucgucgcccucgagaaccagcacaccaucgaccucaccgacuccgagaugaacaagcucuucgagaagacccgccgccagcuccgcgagaacgccgaggacaugggcaacggcugcuucaagaucuaccacaagugcgacaacgccugcaucgaguccauccgcaacggcaccuacgaccacgacgucuaccgcgacgaggcccucaacaaccgcuuccagaucaagggcgucgagcucaaguccggcuacaaggacuggauccucuggaucuccuucgccaucuccugcuuccuccucugcgucguccuccucggcuucaucaugugggccugccagcgcggcaacauccgcugcaacaucugcaucuga

SEQ ID NO: 98447 - RNA, 1701 nt, Artificial Sequence
  derived and/or modified CDS sequence (opt2) from hemagglutinin__InfluenzaA__ACI06163
augaagaccaucaucgcccucuccuacaucuucugccucgcccucggccaggaccuccccggcaacgacaacuccaccgccacccucugccucggccaccacgccguccccaacggcacccucgucaagaccaucaccgacgaccagaucgaggucaccaacgccaccgagcucguccaguccuccuccaccggcaagaucugcaacaacccccaccgcauccucgacggcaucgacugcacccucaucgacgcccuccucggcgacccccacugcgacgucuuccagaacgagaccugggaccucuucgucgagcgcuccaaggccuucuccaacugcuaccccuacgacguccccgacuacgccucccuccgcucccucgucgccuccuccggcacccucgaguucaucaccgagggcuucaccuggaccggcgucacccagaacggcggcuccaacgccugcaagcgcggccccggcuccggcuucuucucccgccucaacuggcucaccaaguccggcuccaccuaccccguccucaacgucaccaugcccaacaacgacaacuucgacaagcucuacaucuggggcguccaccaccccuccaccaaccaggagcagaccucccucuacguccaggccuccggccgcgucaccgucuccacccgccgcucccagcagaccaucauccccaacaucggcucccgccccuggguccgcggccucuccucccgcaucuccaucuacuggaccaucgucaagcccggcgacguccucgucaucaacuccaacggcaaccucaucgccccccgcggcuacuucaagaugcgcaccggcaaguccuccaucaugcgcuccgacgcccccaucgacaccugcaucuccgagugcaucacccccaacggcuccauccccaacgacaagcccuuccagaacgucaacaagaucaccuacggcgccugccccaaguacgucaagcagaacacccucaagcucgccaccggcaugcgcaacguccccgagaagcagacccgcggccucuucggcgccaucgccggcuucaucgagaacggcugggagggcaugaucgacggcugguacggcuuccgccaccagaacuccgagggcaccggccaggccgccgaccucaaguccacccaggccgccaucgaccagaucaacggcaagcucaaccgcgucaucgagaagaccaacgagaaguuccaccagaucgagaaggaguucuccgaggucgagggccgcauccaggaccucgagaaguacgucgaggacaccaagaucgaccucugguccuacaacgccgagcuccucgucgcccucgagaaccagcacaccaucgaccucaccgacuccgagaugaacaagcucuucgagaagacccgccgccagcuccgcgagaacgccgaggacaugggcaacggcugcuucaagaucuaccacaagugcgacaacgccugcaucgaguccauccgcaagggcaccuacgaccacgacgucuaccgcgacgaggcccucaacaaccgcuuccagaucaagggcgucgagcucaaguccggcuacaaggacuggauccucuggaucuccuucgccaucuccugcuuccuccucugcgucguccuccucggcuucaucaugugggccugccagcgcggcaacauccgcugcaacaucugcaucuga

SEQ ID NO: 98448 - RNA, 1701 nt, Artificial Sequence
  derived and/or modified CDS sequence (opt2) from hemagglutinin__InfluenzaA__ACI06164
augaagaccaucaucgcccucuccuacaucuucugccucgcccucggccaggaccuccccggcaacgacaacuccaccgccacccucugccucggccaccacgccguccccaacggcacccucgucaagaccaucaccgacgaccagaucgaggucaccaacgccaccgagcucguccaguccuccuccaccggcaagaucugcaacaacccccaccgcauccucgacggcaucgacugcacccucaucgacgcccuccucggcgacccccacugcgacgucuuccagaacgagaccugggaccucuucgucgagcgcuccaaggccuucuccaacugcuaccccuacgacguccccgacuacgccucccuccgcucccucgucgccuccuccggcacccucgaguucaucaccgagggcuucaccuggaccggcgucacccagaacggcggcuccaacgccugcaagcgcggccccggcuccggcuucuucucccgccucaacuggcucaccaaguccggcuccaccuaccccguccucaacgucaccaugcccaacaacgacaacuucgacaagcucuacaucuggggcguccaccaccccuccaccaaccaggagcagaccucccucuacguccaggccuccggccgcgucaccgucuccacccgccgcucccagcagaccaucauccccaacaucggcucccgccccuggguccgcggccucuccucccgcaucaacaucuacuggaccaucgucaagcccggcgacguccucgucaucaacuccaacggcaaccucaucgccccccgcggcuacuucaagaugcgcaacggcaaguccuccaucaugcgcuccgacgcccccaucgacaccugcaucuccgagugcaucacccccaacggcuccauccccaacgacaagcccuuccagaacgucaacaagaucaccuacggcgccugccccaaguacgucaagcagaacacccucaagcucgccaccggcaugcgcaacguccccgagaagcagacccgcggccucuucggcgccaucgccggcuucaucgagaacggcugggagggcaugaucgacggcugguacggcuuccgccaccagaacuccgagggcaccggccaggccgccgaccucaaguccacccaggccgccaucgaccagaucaacggcaagcucaaccgcgucaucgagaagaccaacgagaaguuccaccagaucgagaaggaguucuccgaggucgagggccgcauccaggaccucgagaaguacgucgaggacaccaagaucgaccucugguccuacaacgccgagcuccucgucgcccucgagaaccagcacaccaucgaccucaccgacuccgagaugaacaagcucuucgagaagacccgccgccagcuccgcgagaacgccgaggacaugggcaacggcugcuucaagaucuaccacaagugcgacaacgccugcaucgaguccauccgcaacggcaccuacgaccacgacgucuaccgcgacgaggcccucaacaaccgcuuccagaucaagggcgucgagcucaaguccggcuacaaggacuggauccucuggaucuccuucgccaucuccugcuuccuccucugcgucguccuccucggcuucaucaugugggccugccagcgcggcaacauccgcugcaacaucugcaucuga

SEQ ID NO: 98449 - RNA, 1701 nt, Artificial Sequence
  derived and/or modified CDS sequence (opt2) from hemagglutinin__InfluenzaA__ACI06165
augaagaccaucaucgcccucuccuacaucuucugccucgcccucggccaggaccuccccggcaacgacaacuccaccgccacccucugccucggccaccacgccguccccaacggcacccucgucaagaccaucaccgacgaccagaucgaggucaccaacgccaccgagcucguccaguccuccuccaccggcaagaucugcaacaacccccaccgcauccucgacggcaucgacugcacccucaucgacgcccuccucggcgacccccacugcgacgucuuccagaacgagaccugggaccucuucgucgagcgcuccaaggccuucuccaacugcuaccccuacgacguccccgacuacgccucccuccgcucccucgucgccuccuccggcacccucgaguucaucaccgagggcuucaccuggaccggcgucacccagaacggcggcuccaacgccugcaagcgcggccccggcuccggcuucuucucccgccucaacuggcucaccaaguccggcuccaccuaccccguccucaacgucaccaugcccaacaacgacaacuucgacaagcucuacaucuggggcguccaccaccccuccaccaaccaggagcagaccucccucuacguccaggccuccggccgcgucaccgucuccacccgccgcucccagcagaccaucauccccaacaucggcucccgccccuggguccgcggccucuccucccgcaucuccaucuacuggaccaucgucaagcccggcgacguccucgucaucaacuccaacggcaaccucaucgccccccgcggcuacuucaagaugcgcaacggcaaguccuccaucaugcgcuccgacgcccccaucgacaccugcaucuccgagugcaucacccccaacggcuccauccccaacgacaagcccuuccagaacgucaacaagaucaccuacggcgccugccccaaguacgucaagcagaacacccucaagcucgccaccggcaugcgcaacguccccgagaagcagacccgcggccucuucggcgccaucgccggcuucaucgagaacggcugggagggcaugaucgacggcugguacggcuuccgccaccagaacuccgagggcaccggccaggccgccgaccucaaguccacccaggccgccaucgaccagaucaacggcaagcucaaccgcgucaucgagaagaccaacgagaaguuccaccagaucgagaaggaguucuccgaggucgagggccgcauccaggaccucgagaaguacgucgaggacaccaagaucgaccucugguccuacaacgccgagcuccucgucgcccucgagaaccagcacaccaucgaccucaccgacuccgagaugaacaagcucuucgagaagacccgccgccagcuccgcgagaacgccgaggacaugggcaacggcugcuucaagaucuaccacaagugcgacaacgccugcaucgaguccauccgcaacggcaccuacgaccacgacgucuaccgcgacgaggcccucaacaaccgcuuccagaucaagggcgucgagcucaaguccggcuacaaggacuggauccucuggaucuccuucgccaucuccugcuuccuccucugcgucguccuccucggcuucaucaugugggccugccagcgcggcaacauccgcugcaacaucugcaucuga

SEQ ID NO: 98450 - RNA, 1701 nt, Artificial Sequence
  derived and/or modified CDS sequence (opt2) from hemagglutinin__InfluenzaA__ACI06166
augaagaccaucaucgcccucuccuacaucuucugccucgcccucggccaggaccuccccggcaacgacaacuccaccgccacccucugccucggccaccacgccguccccaacggcacccucgucaagaccaucaccgacgaccagaucgaggucaccaacgccaccgagcucguccaguccuccuccaccggcaagaucugcaacaacccccaccgcauccucgacggcaucgacugcacccucaucgacgcccuccucggcgacccccacugcgacgucuuccagaacgagaccugggaccucuucgucgagcgcuccaaggccuucuccaacugcuaccccuacgacguccccgacuacgccucccuccgcucccucgucgccuccuccggcacccucgaguucaucaccgagggcuucaccuggaccggcgucacccagaacggcggcuccaacgccugcaagcgcggccccggcuccggcuucuucucccgccucaacuggcucaccaaguccggcuccaccuaccccguccucaacgucaccaugcccaacaacgacaacuucgacaagcucuacaucuggggcguccaccaccccuccaccaaccaggagcagaccucccucuacguccaggccuccggccgcgucaccgucuccacccgccgcucccagcagaccaucauccccaacaucggcucccgccccuggauccgcggccucuccucccgcaucaacaucuacuggaccaucgucaagcccggcgacguccucgucaucaacuccaacggcaaccucaucgccccccgcggcuacuucaagaugcgcaacggcaaguccuccaucaugcgcuccgacgcccccaucgacaccugcaucuccgagugcaucacccccaacggcuccauccccaacgacaagcccuuccagaacgucaacaagaucaccuacggcgccugccccaaguacgucaagcagaacacccucaagcucgccaccggcaugcgcaacguccccgagaagcagacccgcggccucuucggcgccaucgccggcuucaucgagaacggcugggagggcaugaucgacggcugguacggcuuccgccaccagaacuccgagggcaccggccaggccgccgaccucaaguccacccaggccgccaucgaccagaucaacggcaagcucaaccgcgucaucgagaagaccaacgagaaguuccaccagaucgagaaggaguucuccgaggucgagggccgcauccaggaccucgagaaguacgucgaggacaccaagaucgaccucugguccuacaacgccgagcuccucgucgcccucgagaaccagcacaccaucgaccucaccgacuccgagaugaacaagcucuucgagaagacccgccgccagcuccgcgagaacgccgaggacaugggcaacggcugcuucaagaucuaccacaagugcgacaacgccugcaucgaguccauccgcaacggcaccuacgaccacgacgucuaccgcgacgaggcccucaacaaccgcuuccagaucaagggcgucgagcucaaguccggcuacaaggacuggauccucuggaucuccuucgccaucuccugcuuccuccucugcgucguccuccucggcuucaucaugugggccugccagcgcggcaacauccgcugcaacaucugcaucuga

SEQ ID NO: 98451 - RNA, 1701 nt, Artificial Sequence; identical to SEQ ID NO: 98435
  derived and/or modified CDS sequence (opt2) from hemagglutinin__InfluenzaA__ACI06167

SEQ ID NO: 98452 - RNA, 1701 nt, Artificial Sequence
  derived and/or modified CDS sequence (opt2) from hemagglutinin__InfluenzaA__ACI06168
augaagaccaucaucgcccucuccuacaucuucugccucgcccucggccaggaccuccccggcaacgacaacuccaccgccacccucugccucggccaccacgccguccccaacggcacccucgucaagaccaucaccgacgaccagaucgaggucaccaacgccaccgagcucguccaguccuccuccaccggcaagaucugcaacaacccccaccgcauccucgacggcaucgacugcacccucaucgacgcccuccucggcgacccccacugcgacgucuuccagaacgagaccugggaccucuucgucgagcgcuccaaggccuucuccaacugcuaccccuacgacguccccgacuacgccucccuccgcucccucgucgccuccuccggcacccucgaguucaucaccgagggcuucaccuggaccggcgucacccagaacggcggcuccaacgccugcaagcgcggccccggcuccggcuucuucucccgccucaacuggcucaccaaguccggcuccaccuaccccguccucaacgucaccaugcccaacaacgacaacuucgacaagcucuacaucuggggcguccaccaccccuccaccaaccaggagcagaccucccucuacguccaggccuccggccgcgucaccgucuccacccgccgcucccagcagaccaucauccccaacaucggcucccgccccuggguccgcggccucuccucccgcaucuccaucuacuggaccaucgucaagcccggcgacguccucgucaucaacuccaacggcaaccucaucgccccccgcggcuacuucaagaugcgcaccggcaaguccuccaucaugcgcuccgacgcccccaucgacaccugcaucuccgagugcaucacccccaacggcuccauccccaacgacaagcccuuccagaacgucaacaagaucaccuacggcgccugccccaaguacgucaagcagaacacccucaagcucgccaccggcaugcgcaacguccccgagaagcagacccgcggccucuucggcgccaucgccggcuucaucgagaacggcugggagggcaugaucgacggcugguacggcuuccgccaccagaacuccgagggcaccggccaggccgccgaccucaaguccacccaggccgccaucgaccagaucaacggcaagcucaaccgcgucaucgagaagaccaacgagaaguuccaccagaucgagaaggaguucuccgaggucgagggccgcauccaggaccucgagaaguacgucgaggacaccaagaucgaccucugguccuacaacgccgagcuccucgucgcccucgagaaccagcacaccaucgaccucaccgacuccgagaugaacaagcucuucgagaagacccgcaagcagcuccgcgagaacgccgaggacaugggcaacggcugcuucaagaucuaccacaagugcgacaacgccugcaucgaguccauccgcaacggcaccuacgaccacgacgucuaccgcgacgaggcccucaacaaccgcuuccagaucaagggcgucgagcucaaguccggcuacaaggacuggauccucuggaucuccuucgccaucuccugcuuccuccucugcgucguccuccucggcuucaucaugugggccugccagcgcggcaacauccgcugcaacaucugcaucuga

SEQ ID NO: 98453 - RNA, 1701 nt, Artificial Sequence; identical to SEQ ID NO: 98354
  derived and/or modified CDS sequence (opt2) from hemagglutinin__InfluenzaA__ACI06169

SEQ ID NO: 98454 - RNA, 1701 nt, Artificial Sequence; identical to SEQ ID NO: 98371
  derived and/or modified CDS sequence (opt2) from hemagglutinin__InfluenzaA__ACI06171

SEQ ID NO: 98455 - RNA, 1701 nt, Artificial Sequence; identical to SEQ ID NO: 98371
  derived and/or modified CDS sequence (opt2) from hemagglutinin__InfluenzaA__ACI06172

SEQ ID NO: 98456 - RNA, 1701 nt, Artificial Sequence
  derived and/or modified CDS sequence (opt2) from hemagglutinin__InfluenzaA__ACI06173
augaagaccaucaucgcccucuccuacaucuucugccucgcccucggccaggaccuccccggcaacgacaacuccaccgccacccucugccucggccaccacgccguccccaacggcacccucgucaagaccaucaccgacgaccagaucgaggucaccaacgccaccgagcucguccaguccuccuccaccggcaagaucugcaacaacccccaccgcauccucgacggcaucgacugcacccucaucgacgcccuccucggcgacccccacugcgacgucuuccagaacgagaccugggaccucuucgucgagcgcuccaaggccuucuccaacugcuaccccuacgacguccccgacuacgccucccuccgcucccucgucgccuccuccggcacccucgaguucaucaccgagggcuucaccuggaccggcgucacccagaacggcggcuccaacgccugcaagcgcggccccggcuccggcuucuucucccgccucaacuggcucaccaaguccggcuccaccuaccccguccucaacgucaccaugcccaacaacgacaacuucgacaagcucuacaucuggggcguccaccaccccuccaccaaccaggagcagaccucccucuacguccaggccuccggccgcgucaccgucuccacccgccgcucccagcagaccaucauccccaacaucggcucccgccccuggguccgcggccucuccucccgcaucuccaucuacuggaccaucgucaagcccggcgacguccucgagaucaacuccaacggcaaccucaucgccccccgcggcuacuucaagaugcgcaccggcaaguccuccaucaugcgcuccgacgcccccaucgacaccugcaucuccgagugcaucacccccaacggcuccauccccaacgacaagcccuuccagaacgucaacaagaucaccuacggcgccugccccaaguacgucaagcagaacacccucaagcucgccaccggcaugcgcaacguccccgagaagcagacccgcggccucuucggcgccaucgccggcuucaucgagaacggcugggagggcaugaucgacggcugguacggcuuccgccaccagaacuccgagggcaccggccaggccgccgaccucaaguccacccaggccgccaucgaccagaucaacggcaagcucaaccgcgucaucgagaagaccaacgagaaguuccaccagaucgagaaggaguucuccgaggucgagggccgcauccaggaccucgagaaguacgucgaggacaccaagaucgaccucugguccuacaacgccgagcuccucgucgcccucgagaaccagcacaccaucgaccucaccgacuccgagaugaacaagcucuucgagaagacccgccgccagcuccgcgagaacgccgaggacaugggcaacggcugcuucaagaucuaccacaagugcgacaacgccugcaucgaguccauccgcaacggcaccuacgaccacgacgucuaccgcgacgaggcccucaacaaccgcuuccagaucaagggcgucgagcucaaguccggcuacaaggacuggauccucuggaucuccuucgccaucuccugcuuccuccucugcgucguccuccucggcuucaucaugugggccugccagcgcggcaacauccgcugcaacaucugcaucuga

SEQ ID NO: 98457 - RNA, 1701 nt, Artificial Sequence; identical to SEQ ID NO: 98371
  derived and/or modified CDS sequence (opt2) from hemagglutinin__InfluenzaA__ACI06174

SEQ ID NO: 98458 - RNA, 1701 nt, Artificial Sequence; identical to SEQ ID NO: 98372
  derived and/or modified CDS sequence (opt2) from hemagglutinin__InfluenzaA__ACI06175

SEQ ID NO: 98459 - RNA, 1701 nt, Artificial Sequence; identical to SEQ ID NO: 98372
  derived and/or modified CDS sequence (opt2) from hemagglutinin__InfluenzaA__ACI06176

SEQ ID NO: 98460 - RNA, 1701 nt, Artificial Sequence; identical to SEQ ID NO: 98372
  derived and/or modified CDS sequence (opt2) from hemagglutinin__InfluenzaA__ACI06177

SEQ ID NO: 98461 - RNA, 1689 nt, Artificial Sequence
  derived and/or modified CDS sequence (opt2) from hemagglutinin__InfluenzaA__ACI25724
auggccaucaucuaccucauccuccucuucgccaccguccgcggcgaccagaucugcaucggcuaccacgccaacaacuccaccgagaaggucgacaccauccucgagcgcaacgucaccgucacccacgccaaggacauccucgagaagacccacaacggcaagcucugcaagcucaacggcauccccccccucgagcucggcgacugcuccaucgccggcuggcuccucggcaaccccgagugcgaccgccuccuccgcguccccgagugguccuacaucauggagcgcgagaacccccgcuacucccucugcuaccccggcucccucaacgacuacgaggagcucaagcaccuccucuccuccgucaagcacuucgagaagguccgcauccuccccaaggaccgcuggacccagcacaccaccaccggcggcuccaaggccugcgccgucuccggcaagcccuccuucuuccgcaacauggucuggcucaccaagaagggccccaacuaccccgucgccaagggcuccuacaacaacaccuccggcgagcagaugcucaucaucuggggcguccaccaccccaaggacgaggccgagcagcgcgcccucuaccaggaggucggcaccuacgucuccgccuccaccuccacccucaacaagcgcuccauccccgagaucgccgcccgccccgaggucaacggccucggcucccgcauggaguucuccuggacccuccucgacgucugggacaccaucaacuucgaguccaccggcaaccucgucgcccccgaguacggcuucaagaucuccaagcgcggcuccuccggcaucaugaagaccgagggcacccucggcaacugcgagaccaagugccagaccccccucggcgccaucaacaccacccuccccuuccacaacguccacccccucaccaucggcgagugccccaaguacgucaaguccgagaagcucguccucgccaccggccuccgcaacgucccccagaucgagucccgcggccucuucggcgccaucgccggcuucaucgagggcggcuggcagggcauggucgacggcugguacggcuaccaccacuccaacgaccagggcuccggcuacgccgccgacaaggaguccacccagaaggccuucgacggcaucaccaacaaggucaacuccgucaucgagaagaugaacacccaguucgaggccgucggcaaggaguucaacaaccucgagaagcgccucgagaaccucaacaagaagauggaggacggcuuccucgacgucuggaccuacaacgccgagcuccucguccucauggagaacgagcgcacccucgacuuccacgacuccaacgucaagaaccucuacgagaagguccgcaugcagcuccgcgacaacgucaaggagcucggcaacggcugcuucgaguucuaccacaagugcgacgacgagugcaugaacuccgucaagaacggcaccuacgacuaccccaaguacgaggaggaguccaagcucaagcgcaacgagaucaagggcgucaagcucuccuccaugggcgucuaccagauccucgccaucuacgccaccgucgccggcucccucucccucgccaucauggucgccggcaucuccuucuggaugugcuccaacggcucccuccagugccgcaucugcaucuga

SEQ ID NO: 98462 - RNA, 1701 nt, Artificial Sequence
  derived and/or modified CDS sequence (opt2) from hemagglutinin__InfluenzaA__ACI25746
augaagaccaucaucgcccucuccuacaucuucugccucgcccucggccaguaccuccccggcaacgacaacuccaccgccacccucugccucggccaccacgccguccccaacggcacccucgucaagaccaucaccgacgaccagaucgaggucaccaacgccaccgagcucguccaguccuccuccaccggcaagaucugcaacaacccccaccgcauccucgacggcaucgacugcacccucaucgacgcccuccucggcgacccccacugcgacgucuuccagaacgagaccugggaccucuucgucgagcgcuccaaggccuucuccaacugcuaccccuacgacguccccgacuacgccucccuccgcucccucgucgccuccuccggcacccucgaguucaucaccgagggcuucaccuggaccggcgucacccagaacggcggcuccaacgccugcaagcgcggccccggcuccggcuucuucucccgccucaacuggcucaccaaguccggcuccaccuaccccguccucaacgucaccaugcccaacaacgacaacuucgacaagcucuacaucuggggcguccaccaccccuccaccaaccaggagcagaccucccucuacguccaggccuccggccgcgucaccgucuccacccgccgcucccagcagaccaucauccccaacaucggcucccgccccuggguccgcggccucuccucccgcaucuccaucuacuggaccaucgucaagcccggcgacguccucgucaucgacuccaacggcaaccucaucgccccccgcggcuacuucaagaugcgcaccggcaaguccuccaucaugcgcuccgacgcccccaucgacaccugcaucuccgagugcaucacccccaacggcuccauccccaacgacaagcccuuccagaacgucaacaagaucaccuacggcgccugccccaaguacgucaagcagaacacccucaagcucgccaccggcaugcgcaacguccccgagaagcagacccgcggccucuucggcgccaucgccggcuucaucgagaacggcugggagggcaugaucgacggcugguacggcuuccgccaccagaacuccgagggcaccggccaggccgccgaccucaaguccacccaggccgccaucgaccagaucaacggcaagcucaaccgcgucaucgagaagaccaacgagaaguuccaccagaucgagaaggaguucuccgaggucgagggccgcauccaggaccucgagaaguacgucgaggacaccaagaucgaccucugguccuacaacgccgagcuccucgucgcccucgagaaccagcacaccaucgaccucaccgacuccgagaugaacaagcucuucgagaagacccgccgccagcuccgcgagaacgccgaggacaugggcaacggcugcuucaagaucuaccacaagugcgacaacgccugcaucgaguccauccgcaacggcaccuacgaccacgacgucuaccgcgacgaggcccucaacaaccgcuuccagaucaagggcgucgagcucaaguccggcuacaaggacuggauccucuggaucuccuucgccaucuccugcuuccuccucugcgucguccuccucggcuucaucaugugggccugccagcgcggcaacauccgcugcaacaucugcaucuga

SEQ ID NO: 98463 - RNA, 1701 nt, Artificial Sequence
  derived and/or modified CDS sequence (opt2) from hemagglutinin__InfluenzaA__ACI25757
augaagaccaucaucgcccucuccuacaucuucugccucgcccucggccaggaccuccccggcaacgacaacuccaccgccacccucugccucggccaccacgccguccccaacggcacccucgucaagaccaucaccgacgaccagaucgaggucaccaacgccaccgagcucguccaguccuccuccaccggcaagaucugcaacaacccccaccgcauccucgacggcaucgacugcacccucaucgacgcccuccucggcgacccccacugcgacgucuuccagaacgagaccugggaccucuucgucgagcgcuccaaggccuucuccaacugcuaccccuacgacguccccgacuacgccucccuccgcucccucgucgccuccuccggcacccucgaguucaucaccgagggcuucaccuggaccggcgucacccagaacggcggcuccaacgccugcaagcgcggccccggcuccggcuucuucucccgccucaacuggcucaccaaguccggcuccaccuaccucguccucaacgucaccaugcccaacaacgacaacuucgacaagcucuacaucuggggcguccaccaccccuccaccaaccaggagcagaccucccucuacguccaggccuccggccgcgucaccgucuccacccgccgcucccagcagaccaucauccccaacaucggcucccgccccuggguccgcggccucuccucccgcaucuccaucuacuggaccaucgucaagcccggcgacguccucgucaucaacuccaacggcaaccucaucgccccccgcggcuacuucaagaugcgcaccggcaaguccuccaucaugcgcuccgacgcccccaucgacaccugcaucuccgagugcaucacccccaacggcuccauccccaacgacaagcccuuccagaacgucaacaagaucaccuacggcgccugccccaaguacgucaagcagaacacccucaagcucgccaccggcaugcgcaacguccccgagaagcagacccgcggccucuucggcgccaucgccggcuucaucgagaacggcugggagggcaugaucgacggcugguacggcuuccgccaccagaacuccgagggcaccggccaggccgccgaccucaaguccacccaggccgccaucgaccagaucaacggcaagcucaaccgcgucaucgagaagaccaacgagaaguuccaccagaucgagaaggaguucuccgaggucgagggccgcauccaggaccucgagaaguacgucgaggacaccaagaucgaccucugguccuacaacgccgagcuccucgucgcccucgagaaccagcacaccaucgaccucaccgacuccgagaugaacaagcucuucgagaagacccgccgccagcuccgcgagaacgccgaggacaugggcaacggcugcuucaagaucuaccacaagugcgacaacgccugcaucgaguccauccgcaacggcaccuacaaccacgacgucuaccgcgacgaggcccucaacaaccgcuuccagaucaagggcgucgagcucaaguccggcuacaaggacuggauccucuggaucuccuucgccaucuccugcuuccuccucugcgucguccuccucggcuucaucaugugggccugccagcgcggcaacauccgcugcaacaucugcaucuga

SEQ ID NO: 98464 - RNA, 1701 nt, Artificial Sequence; identical to SEQ ID NO: 98352
  derived and/or modified CDS sequence (opt2) from hemagglutinin__InfluenzaA__ACI25768

SEQ ID NO: 98465 - RNA, 1701 nt, Artificial Sequence
  derived and/or modified CDS sequence (opt2) from hemagglutinin__InfluenzaA__ACI25779
augaagaccaucaucgcccucuccuacaucuucugccucgcccucggccaggaccuccccggcaacgacaacuccaccgccacccucugccucggccaccacgccguccccaacggcacccucgucaagaccaucaccgacgaccagaucgaggucaccaacgccaccgagcucguccaguccuccuccaccggcaagaucugcaacaacccccaccgcauccucgacggcaucgacugcacccucaucgacgcccuccucggcgacccccacugcgacgucuuccagaacgagaccugggaccucuucgucgagcgcuccaaggccuucuccaacugcuaccccuacgacguccccgacuacgccucccuccgcucccucgucgccuccuccggcacccucgaguucaucaccgagggcuucaccuggaccggcgucacccagaacggcggcuccaacgccugcaagcgcggccccggcuccggcuucuucucccgccucaacuggcucaccaaguccggcuccaccuaccccguccucaacgucaccaugcccaacaacgacaacuucgacaagcucuacaucuggggcguccaccaccccuccaccaaccaggagcagaccucccucuacguccaggccuccggccgcgucaccgucuccacccgccgcucccagcagaccaucauccccaacaucuggucccgccccuggguccgcggccucuccucccgcaucuccaucuacuggaccaucgucaagcccggcgacguccucgucaucaacuccaacggcaaccucaucgccccccgcggcuacuucaagaugcgcaccggcaaguccuccaucaugcgcuccgacgcccccaucgacaccugcaucuccgagugcaucacccccaacggcuccauccccaacgacaagcccuuccagaacgucaacaagaucaccuacggcgccugccccaaguacgucaagcagaacacccucaagcucgccaccggcaugcgcaacguccccgagaagcagacccgcggccucuucggcgccaucgccggcuucaucgagaacggcugggagggcaugaucgacggcugguacggcuuccgccaccagaacuccgagggcaccggccaggccgccgaccucaaguccacccaggccgccaucgaccagaucaacggcaagcucaaccgcgucaucgagaagaccaacgagaaguuccaccagaucgagaaggaguucuccgaggucgagggccgcauccaggaccucgagaaguacgucgaggacaccaagaucgaccucugguccuacaacgccgagcuccucgucgcccucgagaaccagcacaccaucgaccucaccgacuccgagaugaacaagcucuucgagaagacccgccgccagcuccgcgagaacgccgaggacaugggcaacggcugcuucaagaucuaccacaagugcgacaacgccugcaucgaguccauccgcaacggcaccuacgaccacgacgucuaccgcgacgaggcccucaacaaccgcuuccagaucaagggcgucgagcucaaguccggcuacaaggacuggauccucuggaucuccuucgccaucuccugcuuccuccucugcgucguccuccucggcuucaucaugugggccugccagcgcggcaacauccgcugcaacaucugcaucuga

SEQ ID NO: 98466 - RNA, 1701 nt, Artificial Sequence
  derived and/or modified CDS sequence (opt2) from hemagglutinin__InfluenzaA__ACI25790
augaagaccaucaucgcccucuccuacaucuucugccucgcccucggccaggaccuccccggcaacgacaacuccaccgccacccucugccucggccaccacgccguccccaacggcacccucgucaagaccaucaccgacgaccagaucgaggucaccaacgccaccgagcucguccaguccuccuccaccggcaagaucugcaacaacccccaccgcauccucgacggcaucgacugcacccucaucgacgcccuccucggcgacccccacugcgacgucuuccagaacgagaccugggaccucuucgucgagcgcuccaaggccuucuccaacugcuaccccuacgacguccccgacuacgccucccuccgcucccucgucgccuccuccggcacccucgaguucaucaccgagggcuucaccuggaccggcgucacccagaacggcggcuccaacgccugcaagcgcggccccggcuccggcuucuucucccgccucaacuggcucaccaaguccggcuccaccuaccccguccucaacgucaccaugcccaacaacgacaacuucgacaagcucuacaucuggggcguccaccaccccuccaccaaccaggagcagaccucccucuacguccaggccuccggccgcgucaccgucuccacccgccgcucccagcagaccaucauccccaacaucuggucccgccccuggguccgcggccucuccucccgcaucuccaucuacuggaccaucgucaagcccggcgacguccucgucaucaacuccaacggcaaccucaucgccccccgcggcuacuucaagaugcgcaccggcaaguccuccaucaugcgcuccgacgcccccaucgacaccugcaucuccgagugcaucacccccaacggcuccauccccaacgacaagcccuuccagaacgucaacaagaucaccuacggcgccugccccaaguacgucaagcagaacacccucaagcucgccaccggcaugcgcaacguccccgagaagcagacccgcggccucuucggcgccaucgccggcuucaucgagaacggcugggagggcaugaucgacggcugguacggcuuccgccaccagaacuccgagggcaccggccaggccgccgaccucaaguccacccaggccgccaucgaccagaucaacggcaagcucaaccgcgucaucgagaagaccaacgagaaguuccaccagaucgagaaggaguucuccgaggucgagggccgcauccaggaccucgagaaguacgucgaggacaccaagaucgaccucugguccuacaacgccgagcuccucgucgcccucgagaaccagcacaccaucgaccucaccgacuccgagaugaacaagcucuucgagaagacccgccgccagcuccgcgagaacgccgaggacaugggcaacggcugcuucaagaucuaccacaagugcgacaacgccugcaucgaguccauccgcuccggcaccuacgaccacgacgucuaccgcgacgaggcccucaacaaccgcuuccagaucaagggcgucgagcucaaguccggcuacaaggacuggauccucuggaucuccuucgccaucuccugcuuccuccucugcgucguccuccucggcuucaucaugugggccugccagcgcggcaacauccgcugcaacaucugcaucuga

SEQ ID NO: 98467 - RNA, 1701 nt, Artificial Sequence
  derived and/or modified CDS sequence (opt2) from hemagglutinin__InfluenzaA__ACI25801
augaagaccaucaucgcccucuccuacaucuucugccucgcccucggccaggaccuccccggcaacgacaacuccaccgccacccucugccucggccaccacgccguccccaacggcacccucgucaagaccaucaccgacgaccagaucgaggucaccaacgccaccgagcucguccaguccuccuccaccggcaagaucugcaacaacccccaccgcauccucgacggcaucaacugcacccucaucgacgcccuccucggcgacccccacugcgacgucuuccagaacgagaccugggaccucuucgucgagcgcuccaaggccuucuccaacugcuaccccuacgacguccccgacuacgccucccuccgcucccucgucgccuccuccggcacccucgaguucaucaccgaggacuucaccuggaccggcgucacccagaacggcggcuccaacgccugcaagcgcggccccggcuccggcuucuucucccgccucaacuggcucaccaaguccggcuccaccuaccccguccucgacgucaccaugcccaacaacgacaacuucgacaagcucuacaucuggggcguccaccaccccuccaccaaccaggagcagaccucccucuacguccaggccuccggccgcgucaccgucuccacccgccgcucccagcagaccaucauccccaacaucggcucccgccccuggguccgcggccucuccucccgcaucuccaucuacuggaccaucgucaagcccggcgacguccucgucaucaacuccaacggcaaccucaucgccccccgcggcuacuucaagaugcgcaccggcaaguccuccaucaugcgcuccgacgcccccaucgacaccugcaucuccgagugcaucacccccaacggcuccauccccaacgacaagcccuuccagaacgucaacaagaucaccuacggcgccugccccaaguacgucaagcagaacacccucaagcucgccaccggcaugcgcaacguccccgagaagcagacccgcggccucuucggcgccaucgccggcuucaucgagaacggcugggagggcaugaucgacggcugguacggcuuccgccaccagaacuccgagggcaccggccaggccgccgaccucaaguccacccaggccgccaucgaccagaucaacggcaagcucaaccgcgucaucgagaagaccaacgagaaguuccaccagaucgagaaggaguucuccgaggucgagggccgcauccaggaccucgagaaguacgucgaggacaccaagaucgaccucugguccuacaacgccgagcuccucgucgcccucgagaaccagcacaccaucgaccucaccgacuccgagaugaacaagcucuucgagaagacccgccgccagcuccgcgagaacgccgaggacaugggcaacggcugcuucaagaucuaccacaagugcgacaacgccugcaucgaguccauccgcaacggcaccuacgaccacgacgucuaccgcgacgaggcccucaacaaccgcuuccagaucaagggcgucgagcucaaguccggcuacaaggacuggauccucuggaucuccuucgccaucuccugcuuccuccucugcgucguccuccucggcuucaucaugugggccugccagcgcggcaacauccgcugcaacaucugcaucuga

SEQ ID NO: 98468 - RNA, 1689 nt, Artificial Sequence; identical to SEQ ID NO: 98386
  derived and/or modified CDS sequence (opt2) from hemagglutinin__InfluenzaA__ACI26274

SEQ ID NO: 98469 - RNA, 1698 nt, Artificial Sequence
  derived and/or modified CDS sequence (opt2) from hemagglutinin__InfluenzaA__ACI26307
augaagaccaucaucgcccucuccuacauccucugccucgucuucacccagaagcuccccggcaacgacaacuccaccgccacccucugccucggccaccacgccguccccaacggcaccaucgucaagaccaucaccaacgaccagaucgaggucaccaacgccaccgagcucguccaguccuccuccaccggcgagaucugcgacuccccccaccagauccucgacggcgagaacugcacccucaucgacgcccuccucggcgacccccagugcgacggcuuccagaacaagaagugggaccucuucgucgagcgcuccaaggccuacuccaacugcuaccccuacgacguccccgacuacgccucccuccgcucccucgucgccuccuccggcacccucgaguucaacaacgaguccuucaacuggaccggcgucacccagaacggcaccuccuccgccugcauccgccgcuccaacaacuccuucuucucccgccucaacuggcucacccaccucaaguucaaguaccccgcccucaacgucaccaugcccaacaacgagaaguucgacaagcucuacaucuggggcguccaccaccccgucaccgacaacgaccagaucuuccucuacgcccaguccggccgcaucaccgucuccaccaagcgcucccagcagaccgucauccccaacaucggcucccgcccccgcguccgcaacucccccucccgcaucuccaucuacuggaccaucgucaagcccggcgacauccuccucaucaacuccaccggcaaccucaucgccccccgcggcuacuucaagauccgcuccggcaaguccuccaucaugcgcuccgacgcccccaucggcaagugcaacuccgagugcaucacccccaacggcuccauccccaacgacaagcccuuccagaacgucaaccgcaucaccuacggcgccugcccccgcuacgucaagcagaacacccucaagcucgccaccggcaugcgcaacguccccgagaagcagacccgcggcaucuucggcgccaucgccggcuucaucgagaacggcugggagggcauggucgacggcugguacggcuuccgccaccagaacuccgagggcaucggccaggccgccgaccucaaguccacccaggccgccaucgaccagaucaacggcaagcucaaccgccucaucggcaagaccaacgagaaguuccaccagaucgagaaggaguucuccgaggucgagggccgcauccaggaccucgagaaguacgucgaggacaccaagaucgaccucugguccuacaacgccgagcuccucgucgcccucgagaaccagcacaccaucgaccucaccgacuccgagaugaacaagcucuucgagaagaccaagaagcagcuccgcgagaacgccgaggacaugggcaacggcugcuucaagaucuaccacaagugcgacaacgccugcaucggcuccauccgcaacggcaccuacgaccacgacgucuaccgcgacgaggcccucaacaaccgcuuccagaucaagggcgucgagcucaaguccggcuacaaggacuggauccucuggaucuccuucgccaucuccugcuuccuccucugcgucgcccuccucggcuucaucaugugggccugccagaagggcaacauccgcugcaacaucugcaucuga

SEQ ID NO: 98470 - RNA, 1701 nt, Artificial Sequence
  derived and/or modified CDS sequence (opt2) from hemagglutinin__InfluenzaA__ACI26362
augaagaccaucaucgcccucuccuacauccucugccucgucuucgcccagaagcuccccggcaacgacaacuccaccgccacccucugccucggccaccacgccguccccaacggcaccaucgucaagaccaucaccaacgaccagaucgaggucaccaacgccaccgagcucguccaguccuccuccaccggcgagaucugcgacuccccccaccagauccucgacggcgagaacugcacccucaucgacgcccuccucggcgacccccagugcgacggcuuccagaacaagaagugggaccucuucgucgagcgcuccaaggccuacuccaacugcuaccccuacgacguccccgacuacgccucccuccgcucccucgucgccuccuccggcacccucgaguucaacaacgaguccuucaacuggaccggcgucacccagaacggcaccuccuccgccugcauccgccgcuccaacaacuccuucuucucccgccucaacuggcucacccaccucaaguucaaguaccccgcccucaacgucaccaugcccaacaacgagcaguucgacaagcucuacaucuggggcguccaccaccccggcaccgacaacgaccagaucuuccucuacgcccaggccuccggccgcaucaccgucuccaccaagcgcucccagcagaccgucauccccaacaucggcucccgcccccgcguccgcaacauccccucccgcaucuccaucuacuggaccaucgucaagcccggcgacauccuccucaucaacuccaccggcaaccucaucgccccccgcggcuacuucaagauccgcuccggcaaguccuccaucaugcgcuccgacgcccccaucggcaagugcaacuccgagugcaucacccccaacggcuccauccccaacgacaagcccuuccagaacgucaaccgcaucaccuacggcgccugcccccgcuacgucaagcagaacacccucaagcucgccaccggcaugcgcaacguccccgagaagcagacccgcggcaucuucggcgccaucgccggcuucaucgagaacggcugggagggcauggucgacggcugguacggcuuccgccaccagaacuccgagggccgcggccaggccgccgaccucaaguccacccaggccgccaucgaccagaucaacggcaagcucaaccgccucaucggcaagaccaacgagaaguuccaccagaucgagaaggaguucuccgaggucgagggccgcauccaggaccucgagaaguacgucgaggacaccaagaucgaccucugguccuacaacgccgagcuccucgucgcccucgagaaccagcacaccaucgaccucaccgacuccgagaugaacaagcucuucgagaagaccaagaagcagcuccgcgagaacgccgaggacaugggcaacggcugcuucaagaucuaccacaagugcgacaacgccugcaucggcuccauccgcaacggcaccuacgaccacgacgucuaccgcgacgaggcccucaacaaccgcuuccagaucaagggcgucgagcucaaguccggcuacaaggacuggauccucuggaucuccuucgccaucuccugcuuccuccucugcgucgcccuccucggcuucaucaugugggccugccagaagggcaacauccgcugcaacaucugcaucuga

SEQ ID NO: 98471 - RNA, 1701 nt, Artificial Sequence
  derived and/or modified CDS sequence (opt2) from hemagglutinin__InfluenzaA__ACI26373
augaagaccaucaucgcccucuccuacauccucugccucgucuucgcccagaagcuccccggcaacgacaacuccaccgccacccucugccucggccaccacgccguccccaacggcaccaucgucaagaccaucaccaacgaccagaucgaggucaccaacgccaccgagcucguccaguccuccuccaccggcgagaucugcgacuccccccaccagauccucgacggcgagaacugcacccucaucgacgcccuccucggcgacccccagugcgacggcuuccagaacaagaagugggaccucuucgucgagcgcuccaaggccuacuccaacugcuaccccuacgacguccccgacuacgccucccuccgcucccucgucgccuccuccggcacccucgaguucaacaacgaguccuucaacugggccggcgucacccagaacggcaccuccuccgccugcauccgcaaguccaacaacuccuucuucucccgccucaacuggcucacccaccucaaguucaaguaccccgcccucaacgucaccaugcccaacaacgagcaguucgacaagcucuacaucuggggcguccaccaccccggcaccgacaacgaccagaucuuccucuacgcccaggccuccggccgcaucaccgucuccaccaagcgcucccagcagaccgucauccccaacaucggcucccgcccccgcguccgcaacauccccucccgcaucuccaucuacuggaccaucgucaagcccggcgacauccuccucaucaacuccaccggcaaccucaucgccccccgcggcuacuucaagauccgcuccggcaaguccuccaucaugcgcuccgacgcccccaucggcaagugcaacuccgagugcaucacccccaacggcuccauccccaacgacaagcccuuccagaacgucaaccgcaucaccuacggcgccugcccccgcuacgucaagcagaacacccucaagcucgccaccggcaugcgcaacguccccgagaagcagacccgcggcaucuucggcgccaucgccggcuucaucgagaacggcugggagggcauggucgacggcugguacggcuuccgccaccagaacuccgagggccgcggccaggccgccgaccucaaguccacccaggccgccaucgaccagaucaacggcaagcucaaccgccucaucggcaagaccaacgagaaguuccaccagaucgagaaggaguucuccgaggucgagggccgcauccaggaccucgagaaguacgucgaggacaccaagaucgaccucugguccuacaacgccgagcuccucgucgcccucgagaaccagcacaccaucgaccucaccgacuccgagaugaacaagcucuucgagaagaccaagaagcagcuccgcgagaacgccgaggacaugggcaacggcugcuucaagaucuaccacaagugcgacaacgccugcaucggcuccauccgcaacggcaccuacgaccacgacgucuaccgcgacgaggcccucaacaaccgcuuccagaucaagggcgucgagcucaaguccggcuacaaggacuggauccucuggaucuccuucgccaucuccugcuuccuccucugcgucgcccuccucggcuucaucaugugggccugccagaagggcaacauccgcugcaacaucugcaucuga

SEQ ID NO: 98472 - RNA, 1701 nt, Artificial Sequence; identical to SEQ ID NO: 98337
  derived and/or modified CDS sequence (opt2) from hemagglutinin__InfluenzaA__ACI26395

SEQ ID NO: 98473 - RNA, 1701 nt, Artificial Sequence
  derived and/or modified CDS sequence (opt2) from hemagglutinin__InfluenzaA__ACI26406
augaagaccaucaucgcccucuccuacauccucugccucgucuucgcccagaagcuccccggcaacgacaacuccaccgccacccucugccucggccaccacgccguccccaacggcaccaucgucaagaccaucaccaacgaccagaucgaggucaccaacgccaccgagcucguccaguccuccuccaccggcgagaucugcgacuccccccaccagauccucgacggcgagaacugcacccucaucgacgcccuccucggcgacccccagugcgacggcuuccagaacaagaagugggaccucuucgucgagcgcuccaaggccuacuccaacugcuaccccuacgacguccccgacuacgccucccuccgcucccucgucgccuccuccggcacccucgaguucaacaacgaguccuucaacuggaccggcgucacccagaacggcaccuccuccgccugcauccgccgcuccaacaacuccuucuucucccgccucaacuggcucacccaccucaaguucaagcaccccgcccucaacgucaccaugcccaacaacgagaaguucgacaagcucuacaucuggggcguccaccaccccggcaccgacaacgaccagaucuuccucuacgcccaggccuccggccgcaucaccgucuccaccaagcgcucccagcagaccgucauccccaacaucggcucccgcccccgcguccgcaacauccccucccgcaucuccaucuacuggaccaucgucaagcccggcgacauccuccucaucaacuccaccggcaaccucaucgccccccgcggcuacuucaagauccgcuccggcaaguccuccaucaugcgcuccgacgcccccaucggcaagugcaacuccgagugcaucacccccaacggcuccauccccaacgacaagcccuuccagaacgucaaccgcaucaccuacggcgccugcccccgcuacgucaagcagaacacccucaagcucgccaccggcaugcgcaacguccccgagaagcagacccgcggcaucuucggcgccaucgccggcuucaucgagaacggcugggagggcauggucgacggcugguacggcuuccgccaccagaacuccgagggcaucggccaggccgccgaccucaaguccacccaggccgccaucgaccagaucaacggcaagcucaaccgccucaucggcaagaccaacgagaaguuccaccagaucgagaaggaguucuccgaggucgagggccgcauccaggaccucgagaaguacgucgaggacaccaagaucgaccucugguccuacaacgccgagcuccucgucgcccucgagaaccagcacaccaucgaccucaccgacuccgagaugaacaagcucuucgagaagaccaagaagcagcuccgcgagaacgccgaggacaugggcaacggcugcuucaagaucuaccacaagugcgacaacgccugcaucggcuccauccgcaacggcaccuacgaccacgacgucuaccgcgacgaggcccucaacaaccgcuuccagaucaagggcgucgagcucaaguccggcuacaaggacuggauccucuggaucuccuucgccaucuccugcuuccuccucugcgucgcccuccucggcuucaucaugugggccugccagaagggcaacauccgcugcaacaucugcaucuga

SEQ ID NO: 98474 - RNA, 1701 nt, Artificial Sequence; identical to SEQ ID NO: 97964
  derived and/or modified CDS sequence (opt2) from hemagglutinin__InfluenzaA__ACI26417

SEQ ID NO: 98475 - RNA, 1701 nt, Artificial Sequence
  derived and/or modified CDS sequence (opt2) from hemagglutinin__InfluenzaA__ACI26428
augaagaccaucaucgcccucuccuacauccucugccucgucuucgcccagaagcuccccggcaacgacaacuccaccgccacccucugccucggccaccacgccguccccaacggcaccaucgucaagaccaucaccaacgaccagaucgaggucaccaacgccaccgagcucguccagaucuccuccaccggcggcaucugcgacuccccccaccagauccucgacggcgagaacugcacccucaucgacgcccuccucggcgacccccagugcgacggcuuccagaacaagaagugggaccucuucgucgagcgcuccaaggccuacuccaacugcuaccccuacgacguccccgacuacgccucccuccgcucccucgucgccuccuccggcacccucgaguucaacaacgaguccuucaacuggaccggcgucacccagaacggcaccuccuccuccugcaagcgccgcuccaacaacuccuucuucucccgccucaacuggcucacccaccucaaguucaaguaccccgcccucaacgucaccaugcccaacaacgagaaguucgacaagcucuacaucuggggcguccaccaccccgucaccgacaacgaccagauccgccucuacgcccaggccuccggccgcaucaccgucuccaccaagcgcucccagcagaccgucauccccaacaucggcuaccgcccccgcguccgcgacauccccucccgcaucuccaucuacuggaccaucgucaagcccggcgacauccuccucaucaacuccaccggcaaccucaucgccccccgcggcuacuucaagauccgcuccggcaaguccuccaucaugcgcuccgacgcccccaucggcaagugcaacuccgagugcaucacccccaacggcuccauccccaacgacaagcccuuccagaacgucaaccgcaucaccuacggcgccugcccccgcuacgucaagcagaacacccucaagcucgccaccggcaugcgcaacguccccgagaagcagacccgcggcaucuucggcgccaucgccggcuucaucgagaacggcugggagggcauggucgacggcugguacggcuuccgccaccagaacuccgagggcaucggccaggccgccgaccucaaguccacccaggccgccaucaaccagaucaacggcaagcucaaccgccucaucggcaagaccaacgagaaguuccaccagaucgagaaggaguucuccgaggucgagggccgcauccaggaccucgagaaguacgucgaggacaccaagaucgaccucugguccuacaacgccgagcuccucgucgcccucgagaaccagcacaccaucgaccucaccgacuccgagaugaacaagcucuucgagcgcaccaagaagcagcuccgcgagaacgccgaggacaugggcaacggcugcuucaagaucuaccacaagugcgacaacgccugcaucggcuccauccgcaacggcaccuacgaccacgacgucuaccgcgacgaggcccucaacaaccgcuuccagaucaagggcgucgagcucaaguccggcuacaaggacuggauccucuggaucuccuucgccaucuccugcuuccuccucugcgucguccuccucggcuucaucaugugggccugccagaagggcaacauccgcugcaacaucugcaucuga

SEQ ID NO: 98476 - RNA, 1698 nt, Artificial Sequence
  derived and/or modified CDS sequence (opt2) from hemagglutinin__InfluenzaA__ACI26439
augaaggucaagcuccucguccuccucugcaccuucaccgccaccuacgccgacaccaucugcaucggcuaccacgccaacaacuccaccgacaccgucgacaccguccucgagaagaacgucaccgucacccacuccgucaaccuccucgaggacucccacaacggcaagcucugccuccucaagggcaucgccccccuccagcucggcaacugcuccgucgccggcuggauccucggcaaccccgagugcgagcuccucaucuccaaggaguccugguccuacaucgucgagaagcccaaccccgagaacggcaccugcuaccccggccacuucgccgacuacgaggagcuccgcgagcagcucuccuccgucuccuccuucgagcgcuucgagaucuuccccaaggaguccuccuggcccaaccacaccgucaccggcgucuccgccuccugcucccacaacggcaaguccuccuucuacaagaaccuccucuggcucaccggcaagaacggccucuaccccaaccucuccaaguccuacgccaacaacaaggagaaggagguccucguccucuggggcguccaccacccccccaacaucggcaaccagcgcgcccucuaccacaccgagaacgccuacgucuccgucgucuccucccacuacucccgcaaguucacccccgagaucgccaagcgccccaagguccgcgaccaggagggccgcaucaacuacuacuggacccuccucgagcccggcgacaccaucaucuucgaggccaacggcaaccucaucgccccccgcuacgccuucgcccucucccgcggcuucggcuccggcaucaucaacuccaacgcccccauggacgagugcgacgccaagugccagaccccccagggcgccaucaacuccucccuccccuuccagaacguccaccccgucaccaucggcgagugccccaaguacguccgcuccgccaagcuccgcauggucaccggccuccgcaacauccccuccauccagucccgcggccucuucggcgccaucgccggcuucaucgagggcggcuggaccggcauggucgacggcugguacggcuaccaccaccagaacgagcagggcuccggcuacgccgccgaccagaaguccacccagaacgccaucaacggcaucaccaacaaggucaacuccgucaucgagaagaugaacacccaguucaccgccgucggcaaggaguucaacaagcucgagcgccgcauggagaaccucaacaagaaggucgacgacggcuucaucgacgucuggaccuacaacgccgagcuccucguccuccucgagaacgagcgcacccucgacuuccacgacuccaacgucaagaaccucuacgagaaggucaagucccagcucaagaacaacgccaaggagaucggcaacggcugcuucgaguucuaccacaagugcaacgacgagugcauggaguccgucaagaacggcaccuacgacuaccccaaguacuccgaggaguccaagcucucccgcgagaagaucgacggcgucaagcucgaguccaugggcgucuaccagauccucgccaucuacuccaccgucgccuccucccucguccuccucgucucccucggcgccaucuccuucuggaugugcuccaacggcucccuccagugccgcaucugcaucuga

SEQ ID NO: 98477 - RNA, 1698 nt, Artificial Sequence; identical to SEQ ID NO: 98476
  derived and/or modified CDS sequence (opt2) from hemagglutinin__InfluenzaA__ACI26450

SEQ ID NO: 98478 - RNA, 1701 nt, Artificial Sequence
  derived and/or modified CDS sequence (opt2) from hemagglutinin__InfluenzaA__ACI26461
augaagaccaucaucgcccucuccuacauccucugccucgucuucacccagaagcuccccggcaacgacaacuccaccgccacccucugccucggccaccacgccguccccaacggcaccaucgucaagaccaucaccaacgaccagaucgaggucaccaacgccaccgagcucguccaguccuccuccaccggcgagaucugcgacuccccccaccagauccucgacggcgagaacugcacccucaucgacgcccuccucggcgacccccagugcgacggcuuccagaacaagaagugggaccucuucgucgagcgcuccaaggccuacuccaacugcuaccccuacgacguccccgacuacgccucccuccgcucccucgucgccuccuccggcacccucgaguucaacaacgaguccuucaacuggaccggcgucacccagaacggcaccuccuccgccugcauccgccgcuccaacaacuccuucuucucccgccucaacuggcucacccaccucaaguucaaguaccccgcccucaacgucaccaugcccaacaacgagaaguucgacaagcucuacaucuggggcguccaccaccccggcaccgacaacgaccagaucuuccccuacgcccaggccuccggccgcaucaccgucuccaccaagcgcucccagcagaccgucauccccaacaucggcucccgcccccgcguccgcaacauccccucccgcaucuccaucuacuggaccaucgucaagcccggcgacauccuccucaucaacuccaccggcaaccucaucgccccccgcggcuacuucaagauccgcuccggcaaguccuccaucaugcgcuccgacgcccccaucggcaagugcaacuccgagugcaucacccccaacggcuccauccccaacgacaagcccuuccagaacgucaaccgcaucaccuacggcgccugcccccgcuacgucaagcagaacacccucaagcucgccaccggcaugcgcaacguccccgagaagcagacccgcggcaucuucggcgccaucgccggcuucaucgagaacggcugggagggcauggucgacggcugguacggcuuccgccaccagaacuccgagggcaucggccaggccgccgaccucaaguccacccaggccgccaucgaccagaucaacggcaagcucaaccgccucaucggcaagaccaacgagaaguuccaccagaucgagaaggaguucuccgaggucgagggccgcauccaggaccucgagaaguacgucgaggacaccaagaucgaccucugguccuacaacgccgagcuccucgucgcccucgagaaccagcacaccaucgaccucaccgacuccgagaugaacaagcucuucgagaagaccaagaagcagcuccgcgagaacgccgaggacaugggcaacggcugcuucaagaucuaccacaagugcgacaacgccugcaucggcuccauccgcaacggcaccuacgaccacaacgucuaccgcgacgaggcccucaacaaccgcuuccagaucaagggcgucgagcucaaguccggcuacaaggacuggauccucuggaucuccuucgccaucuccugcuuccuccucugcgucgcccuccucggcuucaucaugugggccugccagaagggcaacauccgcugcaacaucugcaucuga

SEQ ID NO: 98479 - RNA, 1698 nt, Artificial Sequence
  derived and/or modified CDS sequence (opt2) from hemagglutinin__InfluenzaA__ACI26472
augaagaccaucaucgcccucuccuacauccucugccucgucuucacccagaagcuccccggcaacgacaacuccaccgccacccucugccucggccaccacgccguccccaacggcaccaucgucaagaccaucaccaacgaccagaucgaggucaccaacgccaccgagcucguccaguccuccuccaccggcgagaucugcgacuccccccaccagauccucgacggcgagaacugcacccucaucgacgcccuccucggcgacccccagugcgacggcuuccagaacaagaagugggaccucuucgucgagcgcuccaaggccuacuccaacugcuaccccuacgacguccccgacuacgccucccuccgcucccucgucgccuccuccggcacccucgaguucaacaacgaguccuucaacuggaccggcgucacccagaacggcaccuccuccgccugcauccgccgcuccaacaacuccuucuucucccgccucaacuggcucacccaccucaaguucaaguaccccgcccucaacgucaccaugcccaacaacgagaaguucgacaagcucuacaucuggggcguccaccaccccgucaccgacaacgaccagaucuuccucuacgcccaguccggccgcaucaccgucuccaccaagcgcucccagcagaccgucauccccaacaucggcuaccgcccccgcguccgcaacauccccucccgcaucuccaucuacuggaccaucgucaagcccggcgacauccuccucaucaacuccaccggcaaccucaucgccccccgcggcuacuucaagauccgcuccggcaaguccuccaucaugcgcuccgacgcccccaucggcaagugcaacuccgagugcaucacccccaacggcuccauccccaacgacaagcccuuccagaacgucaaccgcaucaccuacggcgccugcccccgcuacgucaagcagaacacccucaagcucgccaccggcaugcgcaacguccccgagaagcagacccgcggcaucuucggcgccaucgccggcuucaucgagaacggcugggagggcauggucgacggcugguacggcuuccgccaccagaacuccgagggcaucggccaggccgccgaccucaaguccacccaggccgccaucgaccagaucaacggcaagcucaaccgccucaucggcaagaccaacgagaaguuccaccagaucgagaaggaguucuccgaggucgagggccgcauccaggaccucgagaaguacgucgaggacaccaagaucgaccucugguccuacaacgccgagcuccucgucgcccucgagaaccagcacaccaucgaccucaccgacuccgagaugaacaagcucuucgagaagaccaagaagcagcuccgcgagaacgccgaggacaugggcaacggcugcuucaagaucuaccacaagugcgacaacgccugcaucggcuccauccgcaacggcaccuacgaccacgacgucuaccgcgacgaggcccucaacaaccgcuuccagaucaagggcgucgagcucaaguccggcuacaaggacuggauccucuggaucuccuucgccaucuccugcuuccuccucugcgucgcccuccucggcuucaucaugugggccugccagaagggcaacauccgcugcaacaucugcaucuga

SEQ ID NO: 98480 - RNA, 1701 nt, Artificial Sequence; identical to SEQ ID NO: 98471
  derived and/or modified CDS sequence (opt2) from hemagglutinin__InfluenzaA__ACI26483

SEQ ID NO: 98481 - RNA, 1701 nt, Artificial Sequence
  derived and/or modified CDS sequence (opt2) from hemagglutinin__InfluenzaA__ACI26505
augaagaccaucaucgcccucuccuacauccucugccucgucuucgcccagaagcuccccggcaacgacaacuccaccgccacccucugccucggccaccacgccguccccaacggcaccaucgucaagaccaucaccaacgaccagaucgaggucaccaacgccaccgagcucguccaguccuccuccaccggcgagaucugcgacuccccccaccagauccucgacggcgagaacugcacccucaucgacgcccuccucggcgacccccagugcgacggcuuccagaacaagaagugggaccucuucgucgagcgcuccaaggccuacuccaacugcuaccccuacgacguccccgacuacgccucccuccgcucccucgucgccuccuccggcacccucgaguucaacaacgaguccuucaacugggccggcgucacccagaacggcaccuccuccgccugcauccgcaaguccaacaacuccuucuucucccgccucaacuggcucacccaccucaaguucaaguaccccgcccucaacgucaccaugcccaacaacgagcaguucgacaagcucuacaucuggggcguccaccaccccggcaccgacaacgaccagaucuuccucuacgcccaggccuccggccgcaucaccgucuccaccaagcgcucccagcagaccgucauccccaacaucggcucccgcccccgcguccgcaacauccccucccgcaucuccaucuacuggaccaucgucaagcccggcgacauccuccucaucaacuccaccggcaaccucaucgccccccgcggcuacuucaagauccgcuccggcaaguccuccaucaugcgcuccgacgcccccaucggcaagugcaacuccgagugcaucacccccaacggcuccauccccaacgacaagcccuuccagaacgucaaccgcaucaccuacggcgccugcccccgcuacgucaagcagaacacccucaagcucgccaccggcaugcgcaacguccccgagaagcagacccgcggcaucuucggcgccaucgccggcuucaucgagaacggcugggagggcauggucgacggcugguacggcuuccgccaccagaacuccgagggccgcggccaggccgccgaccucaaguccacccaggccgccaucgaccagaucaacggcaagcucaaccgccucaucggcaagaccaacgagaaguuccaccagaucgagaaggaguucuccgaggucgagggccgcauccaggaccucgagaaguacgucgaggacaccaagaucgaccucugguccuacaacgccgagcuccucgucgcccucgagaaccagcacaccaucgaccucaccgacuccgagaugaacaagcucuucgagaagaccaagaagcagcuccgcgagaacgccgaggacaugggcaacggcugcuucaagaucuaccacaagugcgacaacgccugcauccgcuccauccgcaacggcaccuacgaccacgacgucuaccgcgacgaggcccucaacaaccgcuuccagaucaagggcgucgagcucaaguccggcuacaaggacuggauccucuggaucuccuucgccaucuccugcuuccuccucugcgucgcccuccucggcuucaucaugugggccugccagaagggcaacauccgcugcaacaucugcaucuga

SEQ ID NO: 98482 - RNA, 1701 nt, Artificial Sequence; identical to SEQ ID NO: 98470
  derived and/or modified CDS sequence (opt2) from hemagglutinin__InfluenzaA__ACI26516

SEQ ID NO: 98483 - RNA, 1701 nt, Artificial Sequence; identical to SEQ ID NO: 98471
  derived and/or modified CDS sequence (opt2) from hemagglutinin__InfluenzaA__ACI26527

SEQ ID NO: 98484 - RNA, 1701 nt, Artificial Sequence
  derived and/or modified CDS sequence (opt2) from hemagglutinin__InfluenzaA__ACI26538
augaagaccaucaucgcccucuccuacauccucugccucgucuucgcccagaagcuccccggcaacgacaacuccaccgccacccucugccucggccaccacgccguccccaacggcaccaucgucaagaccaucaccaacgaccagaucgaggucaccaacgccaccgagcucguccaguccuccuccaccggcgagaucugcgacuccccccaccagauccucgacggcgagaacugcacccucaucgacgcccuccucggcgacccccagugcgacggcuuccagaacaagaagugggaccucuucgucgagcgcuccaaggccuacuccaacugcuaccccuacgacguccccgacuacgccucccuccgcucccucgucgccuccuccggcacccucgaguucaacaacgaguccuucaacuggaccggcgucacccagaacggcaccuccuccgccugcauccgccgcuccaacaacuccuucuucucccgccucaacuggcucacccaccucaaguucaaguaccccgcccucaacgucaccaugcccaacaacgagcaguucgacaagcucuacaucuggggcguccaccaccccggcaccgacaacgaccagaucuuccucuacgcccaggccuccggccgcaucaccgucuccaccaagcgcucccagcagaccgucauccccaacaucggcucccgcccccgcguccgcaacauccccucccgcaucuccaucuacuggaccaucgucaagcccggcgacauccuccucaucaacuccaccggcaaccucaucgccccccgcggcuacuucaagauccgcuccggcaaguccuccaucaugcgcuccgacgcccccaucggcaagugcaacuccgagugcaucacccccaacggcuccauccccaacgacaagcccuuccagaacgucaaccgcaucaccuacggcgccugcccccgcuacgucaagcagaacacccucaagcucgccaccggcaugcgcaacguccccgacaagcagacccgcggcaucuucggcgccaucgccggcuucaucgagaacggcugggagggcauggucgacggcugguacggcuuccgccaccagaacuccgagggccgcggccaggccgccgaccucaaguccacccaggccgccaucgaccagaucaacggcaagcucaaccgccucaucggcaagaccaacgagaaguuccaccagaucgagaaggaguucuccgaggucgagggccgcauccaggaccucgagaaguacgucgaggacaccaagaucgaccucugguccuacaacgccgagcuccucgucgcccucgagaaccagcacaccaucgaccucaccgacuccgagaugaacaagcucuucgagaagaccaagaagcagcuccgcgagaacgccgaggacaugggcaacggcugcuucaagaucuaccacaagugcgacaacgccugcaucggcuccauccgcaacggcaccuacgaccacgacgucuaccgcgacgaggcccucaacaaccgcuuccagaucaagggcgucgagcucaaguccggcuacaaggacuggauccucuggaucuccuucgccaucuccugcuuccuccucugcgucgcccuccucggcuucaucaugugggccugccagaagggcaacauccgcugcaacaucugcaucuga

SEQ ID NO: 98485 - RNA, 1701 nt, Artificial Sequence
  derived and/or modified CDS sequence (opt2) from hemagglutinin__InfluenzaA__ACI26549
augaagaccaucaucgcccucuccuacaucuucugccucgucuucgcccagaagcuccccggcaacgacaacuccaccgccacccucugccucggccaccacgccguccccaacggcacccucgucaagaccaucaccaacgaccagaucgaggucaccaacgccaccgagcucguccaguccuccuccaccggccgcaucugcgacuccccccaccgcauccucgacggcaagaacugcacccucaucgacgcccuccucggcgacccccacugcgacggcuuccagaacgagaagugggaccucuucgucgagcgcuccaaggccuacuccaacugcuaccccuacgacguccccgacuacgccucccuccgcucccucgucgccuccuccggcacccucgaguucaucaacgaggacuucaacuggaccggcgucacccaguccggcggcuccuacuccugcaagcgcggcuccgucaacuccuucuucucccgccucaacuggcuccacgaguccgaguacaaguaccccgcccucaacgucaccaugcccaacaacggcaaguucgacaagcucuacaucuggggcguccaccaccccuccaccgaccgcgagcagaccaagcucuacguccgcgccuccggccgcgucaccgucuccaccaagcgcucccagcagaccgucauccccaacaucggcucccgccccuggguccgcggccucuccucccgcaucuccaucuacuggaccaucgucaagcccggcgacauccuccucaucaacuccaccggcaaccucaucgccccccgcggcuacuucaagauccgcaccggcaaguccuccaucaugcgcuccgacgcccccaucggcaccugcuccuccgagugcaucacccccaacggcuccauccccaacgacaagcccuuccagaacgucaacaagaucaccuacggcgccugcccccgcuacgucaagcagaacacccucaagcucgccaccggcaugcgcaacguccccgagaagcagacccgcggcaucuucggcgccaucgccggcuucaucgagaacggcugggagggcauggucgacggcugguacggcuuccgccaccagaacuccgagggcaccggccaggccgccgaccucaaguccacccaggccgccaucgaccagaucaacggcaagcucaaccgccucaucgagaagaccaacgagaaguuccaccagaucgagaaggaguucuccgaggucgagggccgcauccaggaccucgaggaguacgucgaggacaccaagaucgaccucugguccuacaacgccgagcuccucgucgcccucgagaaccagcacaccaucgaccucaccgacuccgagaugaacaagcucuucgagaagacccgcaagcagcuccgcgagaacgccgaggacaugggcaacggcugcuucaagaucuaccacaagugcgacaacgccugcaucggcuccauccgcaacggcaccuacgaccacgacgucuaccgcgacgaggcccucaacaaccgcuuccagaucaagggcgucgagcucaaguccggcuacaaggacuggauccucuggaucuccuucgccaucuccugcuuccuccucugcgucguccuccucggcuucaucaugugggccugccagaagggcaacauccgcugcaacaucugcaucuga

SEQ ID NO: 98486 - RNA, 1701 nt, Artificial Sequence
  derived and/or modified CDS sequence (opt2) from hemagglutinin__InfluenzaA__ACI26560
augaagaccaucaucgcccucuccuacaucuucugccucgucuucgcccagaagcuccccggcaacgacaacuccaccgccacccucugccucggccaccacgccguccccaacggcacccucgucaagaccaucaccaacgaccagaucgaggucaccaacgccaccgagcucguccaguccuccuccaccggccgcaucugcgacuccccccaccgcauccucgacggcaagaacugcacccucaucgacgcccuccucggcgacccccacugcgacggcuuccagaacaaggagugggaccucuucgucgagcgcuccaaggccuacuccaacugcuaccccuacgacguccccgacuacgccucccuccgcucccucgucgccuccuccggcacccucgaguucaucaacgaggacuucaacuggaccggcgucgcccaguccggcggcuccuacgccugcaagcgcggcuccgucaacuccuucuucucccgccucaacuggcuccacgaguccgaguacaaguaccccgcccucaacgucaccaugcccaacaacggcaaguucgacaagcucuacaucuggggcguccaccaccccaucaccgaccgcgagcagaccaaccucuacguccgcgccuccggccgcgucaccgucuccaccaagcgcucccagcagaccgucauccccaacaucggcucccgccccuggguccgcggccucuccucccgcaucuccaucuacuggaccaucgucaagcccggcgacauccuccucaucaacuccaccggcaaccucaucgccccccgcggcuacuucaagauccgcaccggcaaguccuccaucaugcgcuccgacgcccccaucggcaccugcuccuccgagugcaucacccccaacggcuccauccccaacgacaagcccuuccagaacgucaaccgcaucaccuacggcgccugcccccgcuacgucaagcagaacacccucaagcucgccaccggcaugcgcaacguccccgagaagcagacccgcggcaucuucggcgccaucgccggcuucaucgagaacggcugggagggcauggucgacggcugguacggcuuccgccaccagaacuccgagggcaccggccaggccgccgaccucaaguccacccaggccgccaucgaccagaucaacggcaagcucaaccgccucaucgagaagaccaacgagaaguuccaccagaucgagaaggaguucuccgaggucgagggccgcauccaggaccucgagaaguacgucgaggacaccaagaucgaccucugguccuacaacgccgagcuccucgucgcccucgagaaccagcacaccaucgaccucaccgacuccgagaugaacaagcucuucgagaagacccgcaagcagcuccgcgagaacgccgaggacaugggcaacggcugcuucaagaucuaccacaagugcgacaacgccugcaucggcuccauccgcaacggcaccuacgaccacgacgucuaccgcgacgaggcccucaacaaccgcuuccagaucaagggcgucgagcucaaguccggcuacaaggacuggauccucuggaucuccuucgccaucuccugcuuccuccucugcgucguccuccucggcuucaucaugugggccugccagaagggcaacauccgcugcaacaucugcaucuga

SEQ ID NO: 98487 - RNA, 1701 nt, Artificial Sequence
  derived and/or modified CDS sequence (opt2) from hemagglutinin__InfluenzaA__ACI26571
augaagaccaucaucgcccucuccuacaucuucugccucgucuucgcccagaagcuccccggcaacgacaacuccaccgccacccucugccucggccaccacgccguccccaacggcacccucgucaagaccaucaccaacgaccagaucgaggucaccaacgccaccgagcucguccaguccuccuccaccggccgcaucugcgacuccccccaccgcauccucgacggcaagaacugcacccucaucgacgcccuccucggcgacccccacugcgacggcuuccagaacaaggagugggaccucuucgucgagcgcuccaaggccuacuccaacugcuaccccuacgacguccccgacuacgccucccuccgcucccucgucgccuccuccggcacccucgaguucaucaacgaggacuucaacuggaccggcgucgcccaguccggcggcuccuacgccugcaagcgcggcuccgucaacuccuucuucucccgccucaacuggcuccacgaguccgaguacaaguaccccgcccucaacgucaccaugcccaacaacggcaaguucgacaagcucuacaucuggggcguccaccaccccuccaccgaccgcgagcagaccaagcucuacguccgcgccuccggccgcgucaccgucuccaccaagcgcucccagcagaccgucauccccaacaucggcucccgccccuggguccgcggccucuccucccgcaucuccaucuacuggaccaucgucaagcccggcgacauccuccucaucaacuccaccggcaaccucaucgccccccgcggcuacuucaagauccgcaccggcaaguccuccaucaugcgcuccgacgcccccaucggcaccugcuccuccgagugcaucacccccaacggcuccauccccaacgacaagcccuuccagaacgucaaccgcaucaccuacggcgccugcccccgcuacgucaagcagaacacccucaagcucgccaccggcaugcgcaacguccccgagaagcagacccgcggcaucuucggcgccaucgccggcuucaucgagaacggcugggagggcauggucgacggcugguacggcuuccgccaccagaacuccgagggcaccggccaggccgccgaccucaaguccacccaggccgccaucgaccagaucaacggcaagcucaaccgccucaucgagaagaccaacgagaaguuccaccagaucgagaaggaguucuccgaggucgagggccgcauccaggaccucgagaaguacgucgaggacaccaagaucgaccucugguccuacaacgccgagcuccucgucgcccucgagaaccagcacaccaucgaccucaccgacuccgagaugaacaagcucuucgagaagacccgcaagcagcuccgcgagaacgccgaggacaugggcaacggcugcuucaagaucuaccacaagugcgacaacgccugcaucggcuccauccgcaacggcaccuacaaccacgacgucuaccgcgacgaggcccucaacaaccgcuuccagaucaagggcgucgagcucaaguccggcuacaaggacuggauccucuggaucuccuucgccaucuccugcuuccuccucugcgucguccuccucggcuucaucaugugggccugccagaagggcaacauccgcugcaacaucugcaucuga

SEQ ID NO: 98488 - RNA, 1701 nt, Artificial Sequence
  derived and/or modified CDS sequence (opt2) from hemagglutinin__InfluenzaA__ACI26593
augaagaccaucaucgcccucuccuacauccucugccucgucuucgcccagaagcuccccggcaacgacaacuccaccgccacccucugccucggccaccacgccguccccaacggcacccucgucaagaccaucaccaacgaccagaucgaggucaccaacgccaccgagcucguccaguccuccuccaccggccgcaucugcgacuccccccaccgcauccucgacggcaagaacugcacccucaucgacgcccuccucggcgacccccacugcgacggcuuccagaacaaggagugggaccucuucgucgagcgcuccaaggccuacuccaacugcuaccccuacgacguccccgacuacgccucccuccgcucccucgucgccuccuccggcacccucgaguucaccaacgaggacuucaacuggaccggcgucgcccaguccggcgaguccuacgccugcaagcgcggcuccgucaaguccuucuucucccgccucaacuggcuccacaaguccgacuacaaguaccccgcccucaacgucaccaugcccaacaacggcaaguucgacaagcucuacaucuggggcguccaccaccccuccaccgaccgcgagcagaccucccucuacguccgcgccuccggccgcgucaccgucuccaccaagcgcucccagcagaccgucauccccaacaucggcucccgccccuggguccgcggccucuccucccgcaucuccaucuacuggaccaucgucaagcccggcgacauccuccucaucaacuccaccggcaaccucaucgccccccgcggcuacuucaagauccgcaccggcaaguccuccaucaugcgcuccgacgcccccaucggcaccugcuccuccgagugcaucacccccaacggcuccauccccaacgacaagcccuuccagaacgucaaccgcaucaccuacggcgccugcccccgcuacgucaagcagaacacccucaagcucgccaccggcaugcgcaacguccccgagaagcagacccgcggcaucuucggcgccaucgccggcuucaucgagaacggcugggagggcauggucgacggcugguacggcuuccgccaccagaacuccgagggcaccggccaggccgccgaccucaaguccacccaggccgccaucgaccagaucaacggcaagcucaaccgccucaucgagaagaccaacgagaaguuccaccagaucgagaaggaguucuccgaggucgagggccgcauccaggaccucgagaaguacgucgaggacaccaagaucgaccucugguccuacaacgccgagcuccucgucgcccucgagaaccagcacaccaucgaccucaccgacuccgagaugaacaagcucuucgagaagacccgcaagcagcuccgcgagaacgccgaggacaugggcaacggcugcuucaagaucuaccacaagugcgacaacgccugcaucggcuccauccgcaacggcaccuacgaccacgacgucuaccgcgacgaggcccucaacaaccgcuuccagaucaagggcgucgagcucaaguccggcuacaaggacuggauccucuggaucuccuucgccaucuccugcuuccuccucugcgucguccuccucggcuucaucaugugggccugccagaagggcaacauccgcugcaacaucugcaucuga

SEQ ID NO: 98489 - RNA, 1698 nt, Artificial Sequence
  derived and/or modified CDS sequence (opt2) from hemagglutinin__InfluenzaA__ACI32715
augaaggucaagcuccucguccuccucugcaccuucaccgccaccuacgccgacaccaucugcaucggcuaccacgccaacaacuccaccgacaccgucgacaccguccucgagaagaacgucaccgucacccacuccgucaaccuccucgaggacucccacaacggcaagcucugccuccucaagggcaucgccccccuccagcucggcaacugcuccgucgccggcuggauccucggcaaccccgagugcgagcuccucaucuccaaggaguccugguccuacaucgucgagacccccaaccccgagaacggcaccugcuaccccggcuacuucgccgacuacgaggagcuccgcgagcagcucuccuccgucuccuccuucgagcgcuucgagaucuuccccaaggaguccuccuggcccaaccacaccgucaccggcgucuccgccuccugcucccacaacggcaaguccuccuucuaccgcaaccuccucuggcucaccggcaagaacggccucuaccccaaccucuccaaguccuacgccaacaacaaggagaaggagguccucguccucuggggcguccaccacccccccaacaucggcgaccagcgcgcccucuaccacaccgagaacgccuacgucuccgucgucuccucccacuacucccgccgcuucacccccgagaucgccaagcgccccaagguccgcgaccaggagggccgcaucaacuacuacuggacccuccucgagcccggcgacaccaucaucuucgaggccaacggcaaccucaucgccccccgcuucgccuucgcccucucccgcggcuucggcuccggcaucaucaccuccaacgcccccauggacgagugcgacgccaagugccagaccccccagggcgccaucaacuccucccuccccuuccagaacguccaccccgucaccaucggcgagugccccaaguacguccgcuccgccaagcuccgcauggccaccggccuccgcaacauccccuccauccagucccgcggccucuucggcgccaucgccggcuucaucgagggcggcuggaccggcauggucgacggcugguacggcuaccaccaccagaacgagcagggcuccggcuacgccgccgaccagaaguccacccagaacgccaucaacggcaucaccaacaaggucaacaccgucaucgagaagaugaacacccaguucaccgccgucggcaaggaguucuccaagcucgagcgccgcauggagaaccucaacaagaaggucgacgacggcuuccucgacaucuggaccuacaacgccgagcuccucguccuccucgagaacgagcgcacccucgacuuccacgacuccaacgucaagaaccucuacgagaaggucaagucccagcucaagaacaacgccaaggagaucggcaacggcugcuucgaguucuaccacaagugcaacgacgagugcauggaguccgucaagaacggcaccuacgacuaccccaaguacuccgaggaguccaagcucaaccgcgagaagaucgacggcgucaagcucgaguccaugggcgucuaccagauccucgccaucuacuccaccgucgccuccucccucguccuccucgucucccucggcgccaucuccuucuggaugugcuccaacggcucccuccagugccgcaucugcaucuga

SEQ ID NO: 98490 - RNA, 1698 nt, Artificial Sequence
  derived and/or modified CDS sequence (opt2) from hemagglutinin__InfluenzaA__ACI32716
augaaggucaagcuccucguccuccucugcaccuucaccgccaccuacgccgacaccaucugcaucggcuaccacgccaacaacuccaccgacaccgucgacaccguccucgagaagaacgucaccgucacccacuccgucaaccuccucgaggacucccacaacggcaagcucugccuccucaagggcaucgccccccuccagcucggcaacugcuccgucgccggcuggauccucggcaaccccgagugcgagcuccucaucuccaaggaguccugguccuacaucgucgagacccccaaccccgagaacggcaccugcuaccccggcuacuucgccgacuacgaggagcuccgcgagcagcucuccuccgucuccuccuucgagcgcuucgagaucuuccccaaggaguccuccuggcccaaccacaccgucaccggcgucuccgccuccugcucccacaacggcaaguccuccuucuaccgcaaccuccucuggcucaccggcaagaacggccucuaccccaaccucuccaaguccuacgccaacaacaaggagaaggagguccucguccucuggggcguccaccacccccccaacaucggcgaccagcgcgcccucuaccacaccgagaacgccuacgucuccgucgucuccucccacuacucccgccgcuucacccccgagaucgccaagcgccccaagguccgcgaccaggagggccgcaucaacuacuacuggacccuccucgagcccggcgacaccaucaucuucgaggccaacggcaaccucaucgccccccgcuucgccuucgcccucucccgcggcuucggcuccggcaucaucaccuccaacgcccccauggacgagugcgacgccaagugccagaccccccagggcgccaucaacuccucccuccccuuccagaacguccaccccgucaccaucggcgagugccccaaguacguccgcuccgccaagcuccgcauggccaccggccuccgcaacauccccuccauccagucccgcggccucuucggcgccaucgccggcuucaucgagggcggcuggaccggcauggucgacggcugguacggcuaccaccaccagaacgagcagggcuccggcuacgccgccgaccagaaguccacccagaacgccaucaacggcaucaccaacaaggucaacuccgucaucgagaagaugaacacccaguucaccgccgucggcaaggaguucuccaagcucgagcgccgcauggagaaccucaacaagaaggucgacgacggcuuccucgacaucuggaccuacaacgccgagcuccucguccuccucgagaacgagcgcacccucgacuuccacgacuccaacgucaagaaccucuacgagaaggucaagucccagcucaagaacaacgccaaggagaucggcaacggcugcuucgaguucuaccacaagugcaacgacgagugcauggaguccgucaagaacggcaccuacgacuaccccaaguacuccgaggaguccaagcucaaccgcgagaagaucgacggcgucaagcucgaguccaugggcgucuaccagauccucgccaucuacuccaccgucgccuccucccucguccuccucgucucccucggcgccaucuccuucuggaugugcuccaacggcucccuccagugcaccaucugcaucuga

SEQ ID NO: 98491 - RNA, 1698 nt, Artificial Sequence
  derived and/or modified CDS sequence (opt2) from hemagglutinin__InfluenzaA__ACI32717
augaaggucaagcuccucguccuccucugcaccuucaccgccaccuacgccgacaccaucugcaucggcuaccacgccaacaacuccaccgacaccgucgacaccguccucgagaagaacgucaccgucacccacuccgucaaccuccucgaggacucccacaacggcaagcucugccuccucaagggcaucgccccccuccagcucggcaacugcuccgucgccggcuggauccucggcaaccccgagugcgagcuccucaucuccaaggaguccugguccuacaucgucgagacccccaaccccgagaacggcaccugcuaccccggcuacuucgccgacuacgaggagcuccgcgagcagcucuccuccgucuccuccuucgagcgcuucgagaucuuccccaaggaguccuccuggcccaaccacaccgucaccggcgucuccgccuccugcucccacaacggcaaguccuccuucuaccgcaaccuccucuggcucaccggcaagaacggccucuaccccaaccucuccaaguccuacgccaacaacaaggagaaggagguccucguccucuggggcguccaccacccccccaacaucggcgaccagcgcgcccucuaccacaccgagaacgccuacgucuccgucgucuccucccacuacucccgccgcuucacccccgagaucgccaagcgccccaagguccgcgaccaggagggccgcaucaacuacuacuggacccuccucgagcccggcgacaccaucaucuucgaggccaacggcaaccucaucgccccccgcuucgccuucgcccucucccgcggcuucggcuccggcaucaucaccuccaacgcccccauggacgagugcgacgccaagugccagaccccccagggcgccaugaacuccucccuccccuuccagaacguccaccccgucaccaucggcgagugccccaaguacguccgcuccgccaagcuccgcauggccaccggccuccgcaacauccccuccauccagucccgcggccucuucggcgccaucgccggcuucaucgagggcggcuggaccggcauggucgacggcugguacggcuaccaccaccagaacgagcagggcuccggcuacgccgccgaccagaaguccacccagaacgccaucaacggcaucaccaacaaggucaacuccgucaucgagaagaugaacacccaguucaccgccgucggcaaggaguucuccaagcucgagcgccgcauggagaaccucaacaagaaggucgacgacggcuuccucgacaucuggaccuacaacgccgagcuccucguccuccucgagaacgagcgcacccucgacuuccacgacuccaacgucaagaaccucuacgagaaggucaagucccagcucaagaacaacgccaaggagaucggcaacggcugcuucgaguucuaccacaagugcaacgacgagugcauggaguccgucaagaacggcaccuacgacuaccccaaguacuccgaggaguccaagcucaaccgcgagaagaucgacggcgucaagcucgaguccaugggcgucuaccagauccucgccaucuacuccaccgucgccuccucccucguccuccucgucucccucggcgccaucaacuucuggaugugcuccaacggcucccuccagugcaagaucugcaucuga

SEQ ID NO: 98492 - RNA, 1698 nt, Artificial Sequence
  derived and/or modified CDS sequence (opt2) from hemagglutinin__InfluenzaA__ACI32718
augaaggucaagcuccucguccuccucugcaccuucaccgccaccuacgccgacaccaucugcaucggcuaccacgccaacaacuccaccgacaccgucgacaccguccucgagaagaacgucaccgucacccacuccgucaaccuccucgaggacucccacaacggcaagcucugccuccucaagggcaucgccccccuccagcucggcaacugcuccgucgccggcuggauccucggcaaccccgagugcgagcuccucaucuccaaggaguccugguccuacaucgucgagacccccaaccccgagaacggcaccugcuaccccggcuacuucgccgacuacgaggagcuccgcgagcagcucuccuccgucuccuccuucgagcgcuucgagaucuuccccaaggaguccuccuggcccaaccacaccgccaccggcgucuccgccuccugcucccacaacggcaaguccuccuucuaccgcaaccuccucuggcucaccggcaagaacggccucuaccccaaccucuccaaguccuacgccaacaacaaggagaaggagguccucguccucuggggcguccaccacccccccaacaucggcgaccagcgcgcccucuaccacaccgagaacgccuacgucuccgucgucuccucccacuacucccgccgcuucacccccgagaucgccaagcgccccaagguccgcgaccaggagggccgcaucaacuacuacuggacccuccucgagcccggcgacaccaucaucuucgaggccaacggcaaccucaucgccccccgcuucgccuucgcccucucccgcggcuucggcuccggcaucaucaccuccaacgcccccauggacgagugcgacgccaagugccagaccccccagggcgccaucaacuccucccuccccuuccagaacguccaccccgucaccaucggcgagugccccaaguacguccgcuccgccaagcuccgcauggccaccggccuccgcaacauccccuccauccagucccgcggccucuucggcgccaucgccggcuucaucgagggcggcuggaccggcauggucgacggcugguacggcuaccaccaccagaacgagcagggcuccggcuacgccgccgaccagaaguccacccagaacgccaucaacggcaucaccaacaaggucaacuccgucaucgagaagaugaacacccaguucaccgccgucggcaaggaguucuccaagcucgagcgccgcauggagaaccucaacaagaaggucgacgacggcuuccucgacaucuggaccuacaacgccgagcuccucguccuccucgagaacgagcgcacccucgacuuccacgacuccaacgucaagaaccucuacgagaaggucaagucccagcucaagaacaacgccaaggaggucggcaacggcugcuucgaguucuaccacaagugcaacgacgagugcauggaguccgucaagaacggcaccuacgacuaccccaaguacuccgaggaguccaagcucaaccgcgagaagaucgacggcgucaagcucgaguccaugggcgucuaccagauccucgccaucuacuccaccgucgccuccucccucguccuccucgucucccucggcgccaucuccuucuggaugugcuccaacggcucccuccagugcaccaucugcaucuga

SEQ ID NO: 98493 - RNA, 1698 nt, Artificial Sequence; identical to SEQ ID NO: 98490
  derived and/or modified CDS sequence (opt2) from hemagglutinin__InfluenzaA__ACI32719

SEQ ID NO: 98494 - RNA, 1698 nt, Artificial Sequence; identical to SEQ ID NO: 98490
  derived and/or modified CDS sequence (opt2) from hemagglutinin__InfluenzaA__ACI32720

SEQ ID NO: 98495 - RNA, 1698 nt, Artificial Sequence
  derived and/or modified CDS sequence (opt2) from hemagglutinin__InfluenzaA__ACI32721
augaaggucaagcuccucguccuccucugcaccuucaccgccaccuacgccgacaccaucugcaucggcuaccacgccaacaacuccaccgacaccgucgacaccguccucgagaagaacgucaccgucacccacuccgucaaccuccucgaggacucccacaacggcaagcucugccuccucaagggcaucgccccccuccagcucggcaacugcuccgucgccggcuggauccucggcaaccccgagugcgagcuccucaucuccaaggaguccugguccuacaucgucgagacccccaaccccgagaacggcaccugcuaccccggcuacuucgccgacuacgaggagcuccgcgagcagcucuccuccgucuccuccuucgagcgcuucgagaucuuccccaaggaguccuccuggcccaaccacaccgucaccggcgucuccgccuccugcucccacaacggcaaguccuccuucuaccgcaaccuccucuggcucaccggcaagaacggccucuaccccaaccucuccaaguccuacgccaacaacaaggagaaggagguccucguccucuggggcguccaccacccccccaacaucggcgaccagcgcgcccucuaccacaccgagaacgccuacgucuccgucgucuccucccacuacucccgccgcuucacccccgagaucgccaagcgccccaagguccgcgaccaggagggccgcaucuccuacuacuggacccuccucgagcccggcgacaccaucaucuucgaggccaacggcaaccucaucgccccccgcuucgccuucgcccucucccgcggcuucggcuccggcaucaucaccuccaacgcccccauggacgagugcgacgccaagugccagaccccccagggcgccaucaacuccucccuccccuuccagaacguccaccccgucaccaucggcgagugccccaaguacguccgcuccgccaagcuccgcauggccaccggccuccgcaacauccccuccauccagucccgcggccucuucggcgccaucgccggcuucaucgagggcggcuggaccggcauggucgacggcugguacggcuaccaccaccagaacgagcagggcuccggcuacgccgccgaccagaaguccacccagaacgccaucaacggcaucaccaacaaggucaacuccgucaucgagaagaugaacacccaguucaccgccgucggcaaggaguucuccaagcucgagcgccgcauggagaaccucaacaagaaggucgacgacggcuuccucgacaucuggaccuacaacgccgagcuccucguccuccucgagaacgagcgcacccucgacuuccacgacuccaacgucaagaaccucuacgagaaggucaagucccagcucaagaacaacgccaaggagaucggcaacggcugcuucgaguucuaccacaagugcaacgacgagugcauggaguccgucaagaacggcaccuacgacuaccccaaguacuccgaggaguccaagcucaaccgcgagaagaucgacggcgucaagcucgaguccaugggcgucuaccagauccucgccaucuacuccaccgucgccuccucccucguccuccucgucucccucggcgccaucuccuucuggaugugcuccaacggcucccuccagugccgcaucugcaucuga

SEQ ID NO: 98496 - RNA, 1698 nt, Artificial Sequence; identical to SEQ ID NO: 98490
  derived and/or modified CDS sequence (opt2) from hemagglutinin__InfluenzaA__ACI32722

SEQ ID NO: 98497 - RNA, 1698 nt, Artificial Sequence
  derived and/or modified CDS sequence (opt2) from hemagglutinin__InfluenzaA__ACI32723
augaaggucaagcuccucguccuccucugcaccuucaccgccaccuacgccgacaccaucugcaucggcuaccacgccaacaacuccaccgacaccgucgacaccguccucgagaagaacgucaccgucacccacuccgucaaccuccucgaggacucccacaacggcaagcucugccuccucaagggcaucgccccccuccagcucggcaacugcuccgucgccggcuggauccucggcaaccccgagugcgagcuccucaucuccaaggaguccugguccuacaucgucgagacccccaaccccgagaacggcaccugcuaccccggcuacuucgccgacuacgaggagcuccgcgagcagcucuccuccgucuccuccuucgagcgcuucgagaucuuccccaaggaguccuccuggcccaaccacaccgucaccggcgucuccgccuccugcucccacaacggcaaguccuccuucuaccgcaaccuccucuggcucaccggcaagaacggccucuaccccaaccucuccaaguccuacgccaacaacaaggagaaggagguccucguccucuggggcguccaccacccccccaacaucggcgaccagcgcgcccucuaccacaccgagaacgccuacgucuccgucgucuccucccacuacucccgccgcuucacccccgagaucgccaagcgccccaagguccgcgaccaggagggccgcaucaacuacuacuggacccuccucgagcccggcgacaccaucaucuucgaggccaacggcaaccucaucgccccccgcuucgccuucgcccucucccgcggcuucggcuccggcaucaucaccuccaacgcccccauggacgagugcgacgccaagugccagaccccccagggcgccaucaacuccucccuccccuuccagaacguccaccccgucaccaucggcgagugccccaaguacguccgcuccgccaagcuccgcauggccaccggccuccgcaacauccccuccauccagucccgcggccucuucggcgccaucgccggcuucaucgagggcggcuggaccggcauggucgacggcugguacggcuaccaccaccagaacgagcagggcuccggcuacgccgccgaccagaaguccacccagaacgccaucaacggcaucaccaacaaggucaacuccgucaucgagaagaugaacacccaguucaccgccgucggcaaggaguucuccaagcucgagcgccgcauggagaaccucaacaagaaggucgacgacggcuuccucgacaucuggaccuacaacgccgagcuccucguccuccucgagaacgagcgcacccucgacuuccacgacuccaacgucaagaaccucuacgagaaggucaagucccagcucaagaacaacgccaaggagaucggcaacggcugcuucgaguucuaccacaagugcaacgacgagugcauggaguccgucaagaacggcaccuacgacuaccccaaguacuccgaggaguccaagcucaaccgcgagaagaucgacggcgucaagcucgaguccaugggcgucuaccagauccucgccaucuacuccaccgucgccuccucccucguccuccucgucucccucggcgccaucuccuucuggaugugcuccaacggcucccuccagugccgcaucugcuucuga

SEQ ID NO: 98498 - RNA, 1698 nt, Artificial Sequence
  derived and/or modified CDS sequence (opt2) from hemagglutinin__InfluenzaA__ACI32724
augaaggucaagcuccucguccuccucugcaccuucaccgccaccuacgccgacaccaucugcaucggcuaccacgccaacaacuccaccgacaccgucgacaccguccucgagaagaacgucaccgucacccacuccgucaaccuccucgaggacucccacaacggcaagcucugccuccucaagggcaucgccccccuccagcucggcaacugcuccgucgccggcuggauccucggcaaccccgagugcgagcuccucaucuccaaggaguccugguccuacaucgucgagacccccaaccccgagaacggcaccugcuaccccggcuacuucgccgacuacgaggagcuccgcgagcagcucuccuccgucuccuccuucgagcgcuucgagaucuuccccaaggaguccuccuggcccaaccacaccgucaccggcgucuccgccuccugcucccacaacggcaaguccuccuucuaccgcaaccuccucuggcucaccggcaagaacggccucuaccccaaccucuccaaguccuacgccaacaacaaggagaaggagguccucguccucuggggcguccaccacccccccaacaucggcgaccagcgcgcccucuaccacaccgagaacgccuacgucuccgucgucuccucccacuacucccgccgcuucacccccgagaucgccaagcgccccaagguccgcgaccaggagggccgcaucaacuacuacuggacccuccucaagcccggcgacaccaucaucuucgaggccaacggcaaccucaucgccccccgcuucgccuucgcccucucccgcggcuucggcuccggcaucaucaccuccaacgcccccauggacgagugcgacgccaagugccagaccccccagggcgccaucaacuccucccuccccuuccagaacguccaccccgucaccaucggcgagugccccaaguacguccgcuccgccaagcuccgcauggccaccggccuccgcaacauccccuccauccagucccgcggccucuucggcgccaucgccggcuucaucgagggcggcuggaccggcauggucgacggcugguacggcuaccaccaccagaacgagcagggcuccggcuacgccgccgaccagaaguccacccagaacgccaucaacggcaucaccaacaaggucaacuccgucaucgagaagaugaacacccaguucaccgccgucggcaaggaguucuccaagcucgagcgccgcauggagaaccucaacaagaaggucgacgacggcuuccucgacaucuggaccuacaacgccgagcuccucguccuccucgagaacgagcgcacccucgacuuccacgacuccaacgucaagaaccucuacgagaaggucaagucccagcucaagaacaacgccaaggagaucggcaacggcugcuucgaguucuaccacaagugcaacgacgagugcauggaguccgucaagaacggcaccuacgacuaccccaaguacuccgaggaguccaagcucaaccgcgagaagaucgacggcgucaagcucgaguccaugggcgucuaccagauccucgccaucuacuccaccgucgccuccucccucguccuccucgucucccucggcgccaucuccuucuggaugugcuccaacggcucccuccagugcaagaucugcaucuga

SEQ ID NO: 98499 - RNA, 1698 nt, Artificial Sequence; identical to SEQ ID NO: 97421
  derived and/or modified CDS sequence (opt2) from hemagglutinin__InfluenzaA__ACI32725

SEQ ID NO: 98500 - RNA, 1698 nt, Artificial Sequence
  derived and/or modified CDS sequence (opt2) from hemagglutinin__InfluenzaA__ACI32726
augaaggucaagcuccucguccuccucugcaccuucaccgccaccuacgccgacaccaucugcaucggcuaccacgccaacaacuccaccgacaccgucgacaccguccucgagaagaacgucaccgucacccacuccgucaaccuccucgaggacucccacaacggcaagcucugccuccucaagggcaucgccccccuccagcucggcaacugcuccgucgccggcuggauccucggcaaccccgagugcgagcuccucaucuccaaggaguccugguccuacaucgucgagacccccaaccccgagaacggcaccugcuaccccggcuacuucgccgacuacgaggagcuccgcgagcagcucuccuccgucuccuccuucgagcgcuucgagaucuuccccaaggaguccuccuggcccaaccacaccgucaccggcgucuccgccuccugcucccacaacggcaaguccuccuucuaccgcaaccuccucuggcucaccggcaagaacggccucuaccccaaccucuccaaguccuacgccaacaacaaggagaaggagguccucguccucuggggcguccaccacccccccaacaucggcgaccagcgcgcccucuaccacaccgagaacgccuacgucuccgucgucuccucccacuacucccgccgcuucacccccgagaucgccaagcgccccaagguccgcgaccaggagggccgcaucaacuacuacuggacccuccucgagcccggcgacaccaucaucuucgaggccaacggcaaccucaucgccccccgcuucgccuucgcccucucccgcggcuucggcuccggcaucaucaccuccaacgcccccauggacgagugcgacgccaagugccagaccccccagggcgccaucaacuccucccuccccuuccagaacguccaccccgucaccaucggcgagugccccaaguacguccgcuccgccaagcuccgcauggccaccggccuccgcaacauccccuccauccagucccgcggccucuucggcgccaucgccggcuucaucgagggcggcuggaccggcauggucgacggcugguacggcuaccaccaccagaacgagcagggcuccggcuacgccgccgaccagaaguccacccagaacgccaucaacggcaucaccaacaaggucaacuccgucaucgagaagaugaacacccaguucaccgccgucggcaaggaguucuccaagcucgagaagcgcauggagaaccucaacaagaaggucgacgacggcuuccucgacaucuggaccuacaacgccgagcuccucguccuccucgagaacgagcgcacccucgacuuccacgacuccaacgucaagaaccucuacgagaaggucaagucccagcucaagaacaacgccaaggagaucggcaacggcugcuucgaguucuaccacaagugcaacgacgagugcauggaguccgucaagaacggcaccuacgacuaccccaaguacuccgaggaguccaagcucaaccgcgagaagaucgacggcgucaagcucgaguccaugggcaucuaccagauccucgccaucuacuccaccgucaccuccucccucguccuccucgucucccucggcgccaucuccuucuggaugugcuccaacggcucccuccagugccgcaucugcaucuga

SEQ ID NO: 98501 - RNA, 1698 nt, Artificial Sequence
  derived and/or modified CDS sequence (opt2) from hemagglutinin__InfluenzaA__ACI32727
augaaggucaagcuccucguccuccucugcaccuucaccgccaccuacgccgacaccaucugcaucggcuaccacgccaacaacuccaccgacaccgucgacaccguccucgagaagaacgucaccgucacccacuccgucaaccuccucgaggacucccacaacggcaagcucugccuccucaagggcaucgccccccuccagcucggcaacugcuccgucgccggcuggauccucggcaaccccgagugcgagcuccucaucuccaaggaguccugguccuacaucgucgagacccccaaccccgagaacggcaccugcuaccccggcuacuucgccgacuacgaggagcuccgcgagcagcucuccuccaucuccuccuucgagcgcuucgagaucuuccccaaggaguccuccuggcccaaccacaccgucaccggcgucuccgccuccugcucccacaacggcaaguccuccuucuaccgcaaccuccucuggcucaccggcaagaacggccucuaccccaaccucuccaaguccuacgccaacaacaaggagaaggagguccucguccucuggggcguccaccacccccccaacaucggcgaccagcgcgcccucuaccacaccgagaacgccuacgucuccgucgucuccucccacuacucccgccgcuucacccccgagaucgccaagcgccccaagguccgcgaccaggagggccgcaucaacuacuacuggacccuccucgagcccggcgacaccaucaucuucgaggccaacggcaaccucaucgccccccgcuucgccuucgcccucucccgcggcuucggcuccggcaucaucaccuccaacgcccccauggacgagugcgacgccaagugccagaccccccagggcgccaucaacuccucccuccccuuccagaacguccaccccgucaccaucggcgagugccccaaguacguccgcuccgccaagcuccgcauggccaccggccuccgcaacauccccuccauccagucccgcggccucuucggcgccaucgccggcuucaucgagggcggcuggaccggcauggucgacggcugguacggcuaccaccaccagaacgagcagggcuccggcuacgccgccgaccagaaguccacccagaacgccaucaacggcaucaccaacaaggucaacuccgucaucgagaagaugaacacccaguucaccgccgucggcaaggaguucuccaagcucgagcgccgcauggagaaccucaacaagaaggucgacgacggcuuccucgacaucuggaccuacaacgccgagcuccucguccuccucgagaacgagcgcacccucgacuuccacgacuccaacgucaagaaccucuacgagaaggucaagucccagcucaagaacaacgccaaggagaucggcaacggcugcuucgaguucuaccacaagugcaacgacgagugcauggaguccgucaagaacggcaccuacgacuaccccaaguacuccgaggaguccaagcucaaccgcgagaagaucgacggcgucaagcucgaguccaugggcgucuaccagauccucgccaucuacuccaccgucgccuccucccucguccuccucgucacccucggcgccaucuccuucuggaugugcuccaacggcucccuccagugcaccaucugcaucuga

SEQ ID NO: 98502 - RNA, 1698 nt, Artificial Sequence
  derived and/or modified CDS sequence (opt2) from hemagglutinin__InfluenzaA__ACI32729
augaaggucaagcuccucguccuccucugcaccuucaccgccaccuacgccgacaccaucugcaucggcuaccacgccaacaacuccaccgacaccgucgacaccguccucgagaagaacgucaccgucacccacuccgucaaccuccucgaggacucccacaacggcaagcucugccuccucaagggcaucgccccccuccagcucggcaacugcuccgucgccggcuggauccucggcaaccccgagugcgagcuccucauccccaaggaguccugguccuacaucgucgagacccccaaccccgagaacggcaccugcuaccccggcuacuucgccgacuacgaggagcuccgcgagcagcucuccuccgucuccuccuucgagcgcuucgagaucuuccccaaggaguccuccuggcccaaccacaccgucaccggcgucuccgccuccugcucccacaacggcaaguccuccuucuaccgcaaccuccucuggcucaccggcaagaacggccucuaccccaaccucuccaaguccuacgccaacaacaaggagaaggagguccucguccucuggggcguccaccacccccccaacaucggcgaccagcgcgcccucuaccacaccgagaacgccuacgucuccgucgucuccucccacuacucccgccgcuucacccccgagaucgccaagcgccccaagguccgcgaccaggagggccgcaucaacuacuacuggacccuccucgagcccggcgacaccaucaucuucgaggccaacggcaaccucaucgccccccgcuucgccuucgcccucucccgcggcuucggcuccggcaucaucaccuccaacgcccccauggacgagugcgacgccaagugccagaccccccagggcgccaucaacuccucccuccccuuccagaacguccaccccgucaccaucggcgagugccccaaguacguccgcuccgccaagcuccgcauggucaccggccuccgcaacauccccuccauccagucccgcggccucuucggcgccaucgccggcuucaucgagggcggcuggaccggcauggucgacggcugguacggcuaccaccaccagaacgagcagggcuccggcuacgccgccgaccagaaguccacccagaacgccaucaacggcgucaccaacaaggucaacuccgucaucgagaagaugaacacccaguucaccgccgucggcaaggaguucaacaagcucgagcgccgcauggagaaccucaacaagaaggucgacgacggcuuccucgacaucuggaccuacaacgccgagcuccucguccuccucgagaacgagcgcacccucgacuuccacgacuccaacgucaagaaccucuacgagaaggucaagucccagcucaagaacaacgccaaggagaucggcaacggcugcuucgaguucuaccacaagugcaacgacgagugcauggaguccgucaagaacggcaccuacgacuaccccaaguacuccgaggaguccaagcucaaccgcgagaagaucgacggcgucaagcucgaguccaugggcgucuaccagauccucgccaucuacuccaccgucgccuccucccucguccuccucgucucccucggcgccaucuccuucuggaugugcuccaacggcucccuccagugccgcaucugcaucuga

SEQ ID NO: 98503 - RNA, 1698 nt, Artificial Sequence; identical to SEQ ID NO: 98502
  derived and/or modified CDS sequence (opt2) from hemagglutinin__InfluenzaA__ACI32730

SEQ ID NO: 98504 - RNA, 1698 nt, Artificial Sequence
  derived and/or modified CDS sequence (opt2) from hemagglutinin__InfluenzaA__ACI32731
augaaggucaagcuccucguccuccucugcaccuucaccgccaccuacgccgacaccaucugcaucggcuaccacgccaacaacuccaccgacaccgucgacaccguccucgagaagaacgucaccgucacccacuccgucaaccuccucgaggacucccacaacggcaagcucugccuccucaagggcaucgccccccuccagcucggcaacugcuccgucgccggcuggauccucggcaaccccgagugcgagcuccucaucuccaaggaguccugguccuacaucgucgagaagcccaaccccgagaacggcaccugcuaccccggccacuucgccgacuacgaggagcuccgcgagcagcucuccuccgucuccuccuucgagcgcuucgagaucuuccccaaggaguccuccuggcccaaccacaccgucaccggcgucuccgccuccugcucccacaacggcaaguccuccuucuacaagaaccuccucuggcucaccggcaagaacggccucuaccccaaccucuccaaguccuacgccaacaacaaggagaaggagguccucguccucuggggcguccaccacccccccaacaucggcgaccagaaggcccucuaccacaccgagaacgccuacgucuccgucgucuccucccacuacucccgcaaguucaaccccgagaucgccaagcgccccaagguccgcgaccaggagggccgcaucaacuacuacuggacccuccucgagcccggcgacaccaucaucuucgaggccaacggcaaccucaucgccccccgcuacgccuucgcccucucccgcggcuucggcuccggcaucaucaacuccaacgcccccauggacgagugcgacgccaagugccagaccccccagggcgccaucaacuccucccuccccuuccagaacguccaccccgucaccaucggcgagugccccaaguacguccgcuccgccaagcuccgcauggucaccggccuccgcaacauccccuccauccagucccgcggccucuucggcgccaucgccggcuucaucgagggcggcuggaccggcauggucgacggcugguacggcuaccaccaccagaacgagcagggcuccggcuacgccgccgaccagaaguccacccagaacgccaucaacggcaucaccaacaaggucaacuccgucaucgagaagaugaacacccaguucaccgccgucggcaaggaguucaacaagcucgagcgccgcauggagaaccucaacaagaaggucgacgacggcuucaucgacaucuggaccuacaacgccgagcuccucguccuccucgagaacgagcgcacccucgacuuccacgacuccaacgucaagaaccucuacgagaaggucaagucccagcucaagaacaacgccaaggagaucggcaacggcugcuucgaguucuaccacaagugcaacgacgagugcauggaguccgucaagaacggcaccuacgacuaccccaaguacuccgaggaguccaagcucaaccgcgagaagaucgacggcgucaagcucgaguccaugggcgucuaccagauccucgccaucuacuccaccgucgccuccucccucguccuccucgucucccucggcgccaucuccuucuggaugugcuccaacggcucccuccagugcaagaucugcaucuga

SEQ ID NO: 98505 - RNA, 1698 nt, Artificial Sequence
  derived and/or modified CDS sequence (opt2) from hemagglutinin__InfluenzaA__ACI32732
augaaggucaagcuccucguccuccucugcaccuucaccgccaccuacgccgacaccaucugcaucggcuaccacgccaacaacuccaccgacaccgucgacaccguccucgagaagaacgucaccgucacccacuccgucaaccuccucgaggacucccacaacggcaagcucugccuccucaagggcaucgccccccuccagcucggcaacugcuccgucgccggcuggauccucggcaaccccgagugcgagcuccucaucuccaaggaguccugguccuacaucgucgagacccccaaccccgagaacggcaccugcuaccccggcuacuucgccgacuacgaggagcuccgcgagcagcucuccuccgucuccuccuucgagcgcuucgagaucuuccccaaggaguccuccuggcccaaccacaccgucaccggcgucuccgccuccugcucccacaacggcaaguccuccuucuaccgcaaccuccucuggcucaccggcaagaacggccucuaccccaaccucuccaaguccuacgccaacaacaaggagaaggagguccucguccucuggggcguccaccacccccccaacaucggcgaccagcgcgcccucuaccacaccgagaacgccuacgucuccgucgucuccucccacuacucccgccgcuucacccccgagaucgccaagcgccccaagguccgcgaccaggagggccgcaucaacuacuacuggacccuccucgagcccggcgacaccaucaucuucgaggccaacggcaaccucaucgccccccgcuucgccuucgcccucucccgcggcuucggcuccggcaucaucaccuccaacgcccccauggacgagugcgacgccaagugccagaccccccagggcgccaucaacuccucccuccccuuccagaacguccaccccgucaccaucggcgagugccccaaguacguccgcuccgccaagcuccgcauggucaccggccuccgcaacauccccuccauccagucccgcggccucuucggcgccaucgccggcuucaucgagggcggcuggaccggcauggucgacggcugguacggcuaccaccaccagaacgagcagggcuccggcuacgccgccgaccagaaguccacccagaacgccaucaacggcaucaccaacaaggucaacuccgucaucgagaagaugaacacccaguucaccgccgucggcaaggaguucaacaagcucgagcgccgcauggagaaccucaacaagaaggucgacgacggcuuccucgacaucuggaccuacaacgccgagcuccucguccuccucgagaacgagcgcacccucgacuuccacgacuccaacgucaagaaccucuacgagaaggucaagucccagcucaagaacaacgccaaggagaucggcaacggcugcuucgaguucuaccacaagugcaacgacgagugcauggaguccgucaagaacggcaccuacgacuaccccaaguacuccgaggaguccaagcucaaccgcgagaagaucgacggcgucaagcucgaguccaugggcgucuaccagauccucgccaucuacuccaccgucgccuccucccucguccuccucgucucccucggcgccaucuccuucuggaugugcuccaacggcucccuccagugcaccaucugcaucuga

SEQ ID NO: 98506 - RNA, 1698 nt, Artificial Sequence
  derived and/or modified CDS sequence (opt2) from hemagglutinin__InfluenzaA__ACI32733
augaaggucaagcuccucguccuccucugcaccuucaccgccaccuacgccgacaccaucugcaucggcuaccacgccaacaacuccaccgacaccgucgacaccguccucgagaagaacgucaccgucacccacuccgucaaccuccucgaggacucccacaacggcaagcucugccuccucaagggcaucgccccccuccagcucggcaacugcuccgucgccggcuggauccucggcaaccccgagugcgagcuccucaucuccaaggaguccugguccuacaucgucgagaagcccaaccccgagaacggcaccugcuaccccggccacuucgccgacuacgaggagcuccgcgagcagcucuccuccgucuccuccuucgagcgcuucgagaucuuccccaaggaguccuccuggcccaaccacaccgucaccggcgucuccgccuccugcucccacaacggcaaguccuccuucuacaagaaccuccucuggcucaccggcaagaacggccucuaccccaaccucuccaaguccuacgccaacaacaaggagaaggagguccucguccucuggggcguccaccacccccccaacaucggcgaccagaaggcccucuaccacaccgagaacgccuacgucuccgucgucuccucccacuacucccgcaaguucaacuccgagaucgccaagcgccccaagguccgcgaccaggagggccgcaucaacuacuacuggacccuccucgagcccggcgacaccaucaucuucgaggccaacggcaaccucaucgccccccgcuacgccuucgcccucucccgcggcuucggcuccggcaucaucaacuccaacgcccccauggacgagugcgacgccaagugccagaccccccagggcgccaucaacuccucccuccccuuccagaacguccaccccgucaccaucggcgagugccccaaguacguccgcuccgccaagcuccgcauggucaccggccuccgcaacauccccuccauccagucccgcggccucuucggcgccaucgccggcuucaucgagggcggcuggaccggcauggucgacggcugguacggcuaccaccaccagaacgagcagggcuccggcuacgccgccgaccagaaguccacccagaacgccaucaacggcaucaccaacaaggucaacuccgucaucgagaagaugaacacccaguucaccgccgucggcaaggaguucaacaagcucgagcgccgcauggagaaccucaacaagaaggucgacgacggcuucaucgacaucuggaccuacaacgccgagcuccucguccuccucgagaacgagcgcacccucgacuuccacgacuccaacgucaagaaccucuacgagaaggucaagucccagcucaagaacaacgccaaggagaucggcaacggcugcuucgaguucuaccacaagugcaacgacgagugcauggaguccgucaagaacggcaccuacgacuaccccaaguacuccgaggaguccaagcucaaccgcgagaagaucgacggcgucaagcucgaguccaugggcgucuaccagauccucgccaucuacuccaccgucgccuccucccucguccuccucgucucccucggcgccaucuccuucuggaugugcuccaacggcucccuccagugcaccaucugcaucuga

SEQ ID NO: 98507 - RNA, 1698 nt, Artificial Sequence
  derived and/or modified CDS sequence (opt2) from hemagglutinin__InfluenzaA__ACI32734
augaaggucaagcuccucguccuccucugcaccuucaccgccaccuacgccgacaccaucugcaucggcuaccacgccaacaacuccaccgacaccgucgacaccguccucgagaagaacgucaccgucacccacuccgucaaccuccucgaggacucccacaacggcaagcucugccuccucaagggcaucgccccccuccagcucggcaacugcuccgucgccggcuggauccucggcaaccccgagugcgagcuccucaucuccaaggaguccugguccuacaucgucgagacccccaaccccgagaacggcaccugcuaccccggcuacuucgccgacuacgaggagcuccgcgagcagcucuccuccgucuccuccuucgagcgcuucgagaucuuccccaaggaguccuccuggcccaaccacaccgucaccggcgucuccgccuccugcucccacaacggcaaguccuccuucuaccgcaaccuccucuggcucaccggcaagaacggccucuaccccaaccucuccaaguccuacgccaacaacaagaagaaggagguccucguccucuggggcguccaccacccccccaacaucggcgaccagaaggcccucuaccacaccgagaacgccuacgucuccgucgucuccucccacuacucccgccgcuucacccccgagaucgccaagcgccccaagguccgcgaccaggagggccgcaucaacuacuacuggacccuccucgagcccggcgacaccaucaucuucgaggccaacggcaaccucaucgccccccgcuucgccuucgcccucucccgcggcuucggcuccggcaucaucaccuccaacgcccccauggacgagugcgacgccaagugccagaccccccagggcgccaucaacuccucccuccccuuccagaacguccaccccgucaccaucggcgagugccccaaguacguccgcuccgccaagcuccgcauggucaccggccuccgcaacauccccuccauccagucccgcggccucuucggcgccaucgccggcuucaucgagggcggcuggaccggcauggucgacggcugguacggcuaccaccaccagaacgagcagggcuccggcuacgccgccgaccagaaguccacccagaacgccaucaacggcaucaccaacaaggucaacuccgucaucgagaagaugaacacccaguucaccgccgucggcaaggaguucaacaagcucgagcgccgcauggagaaccucaacaagaaggucgacgacggcuuccucgacaucuggaccuacaacgccgagcuccucguccuccucgagaacgagcgcacccucgacuuccacgacuccaacgucaagaaccucuacgagaaggucaagucccagcucaagaacaacgccaaggagaucggcaacggcugcuucgaguucuaccacaagugcaacgacgagugcauggaguccgucaagaacggcaccuacgacuaccccaaguacuccgaggaguccaagcucaaccgcgagaagaucgacggcgucaagcucgaguccaugggcgucuaccagauccucgccaucuacuccaccgucgccuccucccucguccuccucgucucccucggcgccaucuccuucuggaugugcuccaacggcucccuccagugcaccaucugcaucuga

SEQ ID NO: 98508 - RNA, 1698 nt, Artificial Sequence
  derived and/or modified CDS sequence (opt2) from hemagglutinin__InfluenzaA__ACI32736
augaaggucaagcuccucguccuccucugcaccuucaccgccaccuacgccgacaccaucugcaucggcuaccacgccaacaacuccaccgacaccgucgacaccguccucgagaagaacgucaccgucacccacuccgucaaccuccucgaggacucccacaacggcaagcucugccuccucaagggcaucgccccccuccagcucggcaacugcuccgucgccggcuggauccucggcaaccccgagugcgagcuccucaucucccgcgaguccugguccuacaucgucgagaagcccaaccccgagaacggcaccugcuaccccggccacuucgccgacuacgaggagcuccgcgagcagcucuccuccgucuccuccuucgagcgcuucgagaucuuccccaaggaguccuccuggcccaaccacaccgccaccggcgucuccgccuccugcucccacaacggcaaguccuccuucuacaagaaccuccucuggcucaccggcaagaacggccucuaccccaaccucuccaaguccuacgccaacaacaaggagaaggagguccucguccucuggggcguccaccacccccccaacaucggcgaccagcgcgcccucuaccacaccgagaacgccuacgucuccgucgucuccucccacuacucccgcaaguucacccccgagaucgccaagcgccccaagguccgcgaccaggagggccgcaucaacuacuacuggacccuccucgagcccggcgacaccaucaucuucgaggccaacggcaaccucaucgccccccgcuacgccuucgcccucucccgcggcuucggcuccggcaucaucaacuccaacgcccccauggacgagugcgacgccaagugccagaccccccagggcgccaucaacuccucccuccccuuccagaacguccaccccgucaccaucggcgagugccccaaguacguccgcuccgccaagcuccgcauggucaccggccuccgcaacauccccuccauccagucccgcggccucuucggcgccaucgccggcuucaucgagggcggcuggaccggcauggucgacggcugguacggcuaccaccaccagaacgagcagggcuccggcuacgccgccgaccagaaguccacccagaacgccaucaacggcaucaccaacaaggucaacuccgucaucgagaagaugaacacccaguucaccgccgucggcaaggaguucaacaagcucgagcgccgcauggagaaccucaacaagaaggucgacgacggcuucaucgacaucuggaccuacaacgccgagcuccucguccuccucgagaacgagcgcacccucgacuuccacgacuccaacguccgcaaccucuacgagaaggucaagucccagcucaagaacaacgccaaggagaucggcaacggcugcuucgaguucuaccacaagugcaacgacgagugcauggaguccgucaagaacggcaccuacgacuaccccaaguacuccgaggaguccaagcucaaccgcgagaagaucgacggcgucaagcucgaguccaugggcgucuaccagauccucgccaucuacuccaccgucgccuccucccucguccuccucgucucccucggcgccaucuccuucuggaugugcuccaacggcucccuccagugccgcaucugcaucuga

SEQ ID NO: 98509 - RNA, 1698 nt, Artificial Sequence
  derived and/or modified CDS sequence (opt2) from hemagglutinin__InfluenzaA__ACI32737
augaaggucaagcuccucguccuccucugcaccuucaccgccaccuacgccgacaccaucugcaucggcuaccacgccaacaacuccaccgacaccgucgacaccguccucgagaagaacgucaccgucacccacuccgucaaccuccucgagaacucccacaacggcaagcucugccuccucaagggcaucgccccccuccagcucggcaacugcuccgucgccggcuggauccucggcaaccccgagugcgagcuccucauccccaaggaguccugguccuacaucgucgagauccccaaccccgagaacggcaccugcuaccccggcuacuucgccgacuacgaggagcuccgcgagcagcucuccuccgucuccuccuucgagcgcuucgagaucuuccccaaggaguccuccuggcccaaccacaccgucaccggcgucuccgccuccugcucccacaacggcaaguccuccuucuaccgcaaccuccucuggcucaccggcaagaacggccucuaccccaaccucuccaaguccuacgccaacaacaaggagaaggagguccucguccucuggggcguccaccacccccccaacaucggcgaccagcgcgcccucuaccacaccgagaacgccuacgucuccgucgucuccucccacuacucccgccgcuucacccccgagaucgccaagcgccccaagguccgcgaccaggagggccgcaucaacuacuacuggacccuccucgagcccggcgacaccaucaucuucgaggccaacggcaaccucaucgccccccgcuucgccuucgcccucucccgcggccucggcuccggcaucaucaccuccaacgcccccauggacgagugcgacgccaagugccagaccccccagggcgccaucaacuccucccuccccuuccagaacguccaccccgucaccaucggcgagugccccaaguacguccgcuccgccaagcuccgcauggucaccggccuccgcaacauccccuccauccagucccgcggccucuucggcgccaucgccggcuucaucgagggcggcuggaccggcauggucgacggcugguacggcuaccaccaccagaacgagcagggcuccggcuacgccgccgaccagaaguccacccagaacgccaucaacggcaucaccaacaaggucaacuccgucaucgagaagaugaacacccaguucaccgccgucggcaaggaguucaacaagcucgagcgccgcauggagaaccucaacaagaaggucgacgacggcuuccucgacaucuggaccuacaacgccgagcuccucguccuccucgagaacgagcgcacccucgacuuccacgacuccaacgucaagaaccucuacgagaaggucaagucccagcuccgcaacaacgccaaggagaucggcaacggcugcuucgaguucuaccacaagugcaacgacgagugcauggaguccgucaagaacggcaccuacgacuaccccaaguacuccgaggaguccaagcucaaccgcgagaagaucgacggcgucaagcucgaguccaugggcgucuaccagauccucgccaucuacuccaccgucgccuccucccucguccuccucgucucccucggcgccaucuccuucuggaugugcuccaacggcucccuccagugccgcaucugcaucuga

SEQ ID NO: 98510 - RNA, 1698 nt, Artificial Sequence
  derived and/or modified CDS sequence (opt2) from hemagglutinin__InfluenzaA__ACI32739
augaaggucaagcuccucauccuccucugcaccuucaccgccaccuacgccgacaccaucugcaucggcuaccacgccaacaacuccaccgacaccgucgacaccguccucgagaagaacgucaccgucacccacuccgucaaccuccucgaggacucccacaacggcaagcucugccuccucaagggcaucgccccccuccagcucggcaacugcuccgucgccggcuggauccucggcaaccccgagugcgagcuccucaucuccaaggaguccugguccuacaucgucgagacccccaaccccgagaacggcaccugcuaccccggcuacuucgccgacuacgaggagcuccgcgagcagcucuccuccgucuccuccuucgagcgcuucgagaucuuccccaaggaguccuccuggcccaaccacaccgucaccggcgucuccgccuccugcucccacaacggcaaguccuccuucuaccgcaaccuccucuggcucaccggcaagaacggccucuaccccaaccucuccaaguccuacgccaacaacaaggagaaggagguccucauccucuggggcguccaccacccccccaacaucggcaaccagcgcacccucuaccacaccgagaacgccuacgucuccgucgucuccucccacuacucccgccgcuucacccccgagaucaccaagcgccccaagguccgcgaccaggagggccgcaucaacuacuacuggacccuccucgagcccggcgacaccaucaucuucgaggccaacggcaaccucaucgcccccugguacgccuucgcccucucccgcggcuucggcuccggcaucaucaccuccaacgcccccauggacgagugcgacgccaagugccagaccccccagggcgccaucaacuccucccuccccuuccagaacguccaccccgucaccaucggcgagugccccaaguacguccgcuccgccaagcuccgcauggucaccggccuccgcaacauccccuccauccagucccgcggccucuucggcgccaucgccggcuucaucgagggcggcuggaccggcauggucgacggcugguacggcuaccaccaccagaacgagcagggcuccggcuacgccgccgaccagaaguccacccagaacgccaucaacggcaucaccaacaaggucaacuccgucaucgagaagaugaacacccaguucaccgccgucggcaaggaguucaacaagcucgagcgccgcauggagaaccucaacaagaaggucgacgacggcuuccucgacaucuggaccuacaacgccgagcuccucguccuccucgagaacgagcgcacccucgacuuccacgacuccaacgucaagaaccucuacgagaaggucaagucccagcucaagaacaacgccaaggagaucggcaacggcugcuucgaguucuaccacaagugcaacaacgagugcauggaguccgucaagaacggcaccuacgacuaccccaaguacuccgaggaguccaagcucaaccgcgagaagaucgacggcgucaagcucgaguccaugggcgucuaccagauccucgccaucuacuccaccgucgccuccucccucguccuccucgucucccucggcgccaucuccuucuggaugugcuccaacggcucccuccagugcaagaucugcaucuga

SEQ ID NO: 98511 - RNA, 1698 nt, Artificial Sequence
  derived and/or modified CDS sequence (opt2) from hemagglutinin__InfluenzaA__ACI32740
augaaggucaagcuccucauccuccucugcaccuucaccgccaccuacgccgacaccaucugcaucggcuaccacgccaacaacuccaccgacaccgucgacaccguccucgagaagaacgucaccgucacccacuccgucaaccuccucgaggacucccacaacggcaagcucugccuccucaagggcaucgccccccuccagcucggcaacugcuccgucgccggcuggauccucggcaaccccgagugcgagcuccucaucuccaaggaguccugguccuacaucgucgagacccccaaccccgagaacggcgccugcuaccccggcuacuucgccgacuacgaggagcuccgcgagcagcucuccuccgucuccuccuucgagcgcuucgagaucuuccccaaggaguccuccuggcccaagcacaccgucaccggcgucuccgccuccugcucccacaacggcaaguccuccuucuaccgcaaccuccucuggcucaccggcaagaacggccucuaccccaaccucuccaaguccuacgccaacaacaaggagaaggagguccucauccucuggggcguccaccacccccccaacaucggcgaccagcgcacccucuaccacaccgagaacgccuacgucuccgucgucuccucccacuacucccgccgcuucacccccgagaucaccaagcgccccaagguccgcgaccaggagggccgcaucaacuacuacuggacccuccucgagcccggcgacaccaucaucuucgaggccaacggcaaccucaucgcccccugguacgccuucgcccucucccgcggcuucggcuccggcaucaucaccuccaacgcccccauggacgagugcgacgccaagugccagaccccccagggcgccaucaacuccucccuccccuuccagaacguccaccccgucaccaucggcgagugccccaaguacguccgcuccgccaagcuccgcauggucaccggccuccgcaacauccccuccauccagucccgcggccucuucggcgccaucgccggcuucaucgagggcggcuggaccggcauggucgacggcugguacggcuaccaccaccagaacgagcagggcuccggcuacgccgccgaccagaaguccacccagaacgccaucaacggcaucaccaacaaggucaacuccgucaucgagaagaugaacacccaguucaccgccgucggcaaggaguucaacaagcucgagcgccgcauggagaaccucaacaagaaggucgacgacggcuuccucgacaucuggaccuacaacgccgagcuccucguccuccucgagaacgagcgcacccucgacuuccacgacuccaacgucaagaaccucuacgagaaggucaagucccagcucaagaacaacgccaaggagaucggcaacggcugcuucgaguucuaccacaagugcaacaacgagugcauggaguccgucaagaacggcaccuacgacuaccccaaguacuccgaggaguccaagcucaaccgcgagaagaucgacggcgucaagcucgacuccaugggcgucuaccagauccucgccaucuacuccaccgucgccuccucccucguccuccucgucucccucggcgccaucuccuucuggaugugccccaacggcucccuccagugcaccaucugcaucuga

SEQ ID NO: 98512 - RNA, 1698 nt, Artificial Sequence
  derived and/or modified CDS sequence (opt2) from hemagglutinin__InfluenzaA__ACI32741
augaaggucaagcuccucauccuccucugcaccuucaccgccaccuacgccgacaccaucugcaucggcuaccacgccaacaacuccaccgacaccgucgacaccguccucgagaagaacgucaccgucacccacuccgucaaccuccucgaggacucccacaacggcaagcucugccuccucaagggcaucgccccccuccagcucggcaacugcuccgucgccggcuggauccucggcaaccccgagugcgagcuccucaucuccaaggaguccugguccuacaucgucgagacccccaaccccgagaacggcgccugcuaccccggcuacuucgccgacuacgaggagcuccgcgagcagcucuccuccgucuccuccuucgagcgcuucgagaucuuccccaaggaguccuccuggcccaagcacaccgucaccggcgucuccgccuccugcucccacaacggcaaguccuccuucuaccgcaaccuccucuggcucaccggcaagaacggccucuaccccaaccucuccaaguccuacgccaacaacaaggagaaggagguccucauccucuggggcguccaccacccccccaacaucggcgaccagcgcacccucuaccacaccgagaacgccuacgucuccgucgucuccucccacuacucccgccgcuucacccccgagaucaccaagcgccccaagguccgcgaccaggagggccgcaucaacuacuacuggacccuccucgagcccggcgacaccaucaucuucgaggccaacggcaaccucaucgcccccugguacgccuucgcccucucccgcggcuucggcuccggcaucaucaccuccaacgcccccauggacgagugcgacgccaagugccagaccccccagggcgccaucaacuccucccuccccuuccagaacguccaccccgucaccaucggcgagugccccaaguacguccgcuccgccaagcuccgcauggucaccggccuccgcaacauccccuccauccagucccgcggccucuucggcgccaucgccggcuucaucgagggcggcuggaccggcauggucgacggcugguacggcuaccaccaccagaacgagcagggcuccggcuacgccgccgaccagaaguccacccagaacgccaucaacggcaucaccaacaaggucaacuccgucaucgagaagaugaacacccaguucaccgccgucggcaaggaguucaacaagcucgagcgccgcauggagaaccucaacaagaaggucgacgacggcuuccucgacaucuggaccuacaacgccgagcuccucguccuccucgagaacgagcgcacccucgacuuccacgacuccaacgucaagaaccucuacgagaaggucaagucccagcucaagaacaacgccaaggagaucggcaacggcugcuucgaguucuaccacaagugcaacaacgagugcauggaguccgucaagaacggcaccuacgacuaccccaaguacuccgaggaguccaagcucaaccgcgagaagaucgacggcgucaagcucgacuccaugggcgucuaccagauccucgccaucuacuccaccgucgccuccucccucguccuccucgucucccucggcgccaucuccuucuggaugugccccaacggcucccuccagugcaagaucugcaucuga

SEQ ID NO: 98513 - RNA, 1698 nt, Artificial Sequence
  derived and/or modified CDS sequence (opt2) from hemagglutinin__InfluenzaA__ACI32742
augaaggucaagcuccucauccuccucugcaccuucaccgccaccuacgccgacaccaucugcaucggcuaccacgccaacaacuccaccgacaccgucgacaccguccucgagaagaacgucaccgucacccacuccgucaaccuccucgaggacucccacaacggcaagcucugccuccucaagggcaucgccccccuccagcucggcaacugcuccgucgccggcuggauccucggcaaccccgagugcgagcuccucaucuccaaggaguccugguccuacaucgucgagacccccaaccccgagaacggcaccugcuaccccggcuacuucgccgacuacgaggagcuccgcgagcagcucuccuccgucuccuccuucgagcgcuucgagaucuuccccaaggaguccuccuggcccaaccacaccgucaccggcgucuccgccuccugcucccacaacggcaaguccuccuucuaccgcaaccuccucuggcucaccggcaagaacggccucuaccccaaccucuccaaguccuacgccaacaacaaggagaaggagguccucauccucuggggcguccaccacccccccaacaucggcgaccagcgcacccucuaccacaccgagaacgccuacgucuccgucgucuccucccacuacucccgccgcuucacccccgagaucaccaagcgccccaagguccgcgaccaggagggccgcaucaacuacuacuggacccuccucgagcccggcgacaccaucaucuucgaggccaacggcaaccucaucgcccccugguacgccuucgcccucucccgcggcuucggcuccggcaucaucaccuccaacgcccccauggacgagugcgacgccaagugccagaccccccagggcgccaucaacuccucccuccccuuccagaacguccaccccgucaccaucggcgagugccccaaguacguccgcuccgccaagcuccgcauggucaccggccuccgcaacauccccuccauccagucccgcggccucuucggcgccaucgccggcuucaucgagggcggcuggaccggcauggucgacggcugguacggcuaccaccaccagaacgagcagggcuccggcuacgccgccgaccagaaguccacccagaacgccaucaacggcaucaccaacaaggucaacuccgucaucgagaagaugaacacccaguucaccgccgucggcaaggaguucaacaagcucgagcgccgcauggagaaccucaacaagaaggucgacgacggcuuccucgacaucuggaccuacaacgccgagcuccucguccuccucgagaacgagcgcacccucgacuuccacgacuccaacgucaagaaccucuacgagaaggucaagucccagcucaagaacaacgccaaggagaucggcaacggcugcuucgaguucuaccacaagugcaacaacgagugcauggaguccgucaagaacggcaccuacgacuaccccaaguacuccgaggaguccaagcucaaccgcgagaagaucgacggcgucaagcucgacuccaugggcgucuaccagauccucgccaucuacuccaccgucgccuccucccucguccuccucgucucccucggcgccaucuccuucuggaugugcuccaacggcucccuccagugcaagaucugcaucuga

SEQ ID NO: 98514 - RNA, 1698 nt, Artificial Sequence
  derived and/or modified CDS sequence (opt2) from hemagglutinin__InfluenzaA__ACI32743
augaaggucaagcuccucauccuccucugcaccuucaccgccaccuacgccgacaccaucugcaucggcuaccacgccaacaacuccaccgacaccgucgacaccguccucgagaagaacgucaccgucacccacuccgucaaccuccucgaggacucccacaacggcaagcucugccuccucaagggcaucgccccccuccagcucggcaacugcuccgucgccggcuggauccucggcaaccccgagugcgagcuccucaucuccaaggaguccugguccuacaucgucgagacccccaaccccgagaacggcgccugcuaccccggcuacuucgccgacuacgaggagcuccgcgagcagcucuccuccgucuccuccuucgagcgcuucgagaucuuccccaagaaguccuccuggcccaaccacaccgucaccggcgucuccgccuccugcucccacaacggcaaguccuccuucuaccgcaaccuccucuggcucaccggcaagaacggccucuaccccaaccucuccaaguccuacgccaacaacaaggagaaggagguccucauccucuggggcguccaccacccccccaacaucggcaaccagcgcacccucuaccacaccgagaacgccuacgucuccgucgucuccucccacuacucccgccgcuucacccccgagaucaccaagcgccccaagguccgcgaccaggagggccgcaucaacuacuacuggacccuccucgagcccggcgacaccaucaucuucgaggccaacggcaaccucaucgcccccugguacgccuucgcccucucccgcggcuucggcuccggcaucaucaccuccaacgcccccauggacgagugcgacgccaagugccagaccccccagggcgccaucaacuccucccuccccuuccagaacguccaccccgucaccaucggcgagugccccaaguacguccgcuccgccaagcuccgcauggucaccggccuccgcaacauccccuccauccagucccgcggccucuucggcgccaucgccggcuucaucgagggcggcuggaccggcauggucgacggcugguacggcuaccaccaccagaacgagcagggcuccggcuacgccgccgaccagaaguccacccagaacgccaucaacggcaucaccaacaaggucaacuccgucaucgagaagaugaacacccaguucaccgccgucggcaaggaguucaacaagcucgagcgccgcauggagaaccucaacaagaaggucgacgacggcuuccucgacaucuggaccuacaacgccgagcuccucguccuccucgagaacgagcgcacccucgacuuccacgacuccaacgucaagaaccucuacgagaaggucaagucccagcucaagaacaacgccaaggagaucggcaacggcugcuucgaguucuaccacaagugcaacaacgagugcauggaguccgucaagaacggcaccuacgacuaccccaaguacuccgaggaguccaagcucaaccgcgagaagaucgacggcgucaagcucgacuccaugggcgucuaccagauccucgccaucuacuccaccgucgccuccucccucguccuccucgucucccucggcgccaucuccuucuggaugugcuccaacggcucccuccagugccgcaucugcaucuga

SEQ ID NO: 98515 - RNA, 1701 nt, Artificial Sequence
  derived and/or modified CDS sequence (opt2) from hemagglutinin__InfluenzaA__ACJ09818
augaagaccaucaucgcccucuccuacauccucugccucgucuucgcccagaagcuccccggcaacgacaacuccaccgccacccucugccucggccaccacgccguccccaacggcaccaucgucaagaccaucaccaacgaccaggucgaggucaccaacgccaccgagcucguccaguccuccuccaccggcgagaucugcgacuccccccaccagauccucgacggcgagaacugcacccucaucgacgcccuccucggcgacccccagugcgacggcuuccagaacaagaagugggaccucuucgucgagcgcuccaaggccuacuccaacugcuaccccuacgacguccccgacuacgccucccuccgcucccucgucgccuccuccggcacccucgaguucaacaacgaguccuucaacuggaccggcgucacccagaacggcaccuccuccgccugcauccgccgcuccaacaacuccuucuucucccgccucaacuggcucacccaccucaaguucaaguaccccgcccucaacgucaccaugcccaacaacgagaaguucgacaagcucuacaucuggggcguccaccaccccggcaccgacaacgaccagaucuuccucuacgcccaggccuccggccgcaucaccgucuccaccaagcgcucccagcagaccgucauccccaacaucggcucccgcccccgcguccgcaacauccccucccgcaucuccaucuacuggaccaucgucaagcccggcgacauccuccucaucaacuccaccggcaaccucaucgccccccgcggcuacuucaagauccgcuccggcaaguccuccaucaugcgcuccgacgcccccaucggcaagugcaacuccgagugcaucacccccaacggcuccauccccaacgacaagcccuuccagaacgucaaccgcaucaccuacggcgccugcccccgcuacgucaagcagaacacccucaagcucgccaccggcaugcgcaacguccccgagaagcagacccgcggcaucuucggcgccaucgccggcuucaucgagaacggcugggagggcauggucgacggcugguacggcuuccgccaccagaacuccgagggcaucggccaggccgccgaccucaaguccacccaggccgccaucgaccagaucaacggcaagcucaaccgccucaucggcaagaccaacgagaaguuccaccagaucgagaaggaguucuccgaggucgagggccgcauccaggaccucgagaaguacgucgaggacaccaagaucgaccucugguccuacaacgccgagcuccucgucgcccucgagaaccagcacaccaucgaccucaccgacuccgagaugaacaagcucuucgagaagaccaagaagcagcuccgcgagaacgccgaggacaugggcaacggcugcuucaagaucuaccacaagugcgacaacgccugcaucggcuccauccgcaacggcaccuacgaccacgacgucuaccgcgacgaggcccucaacaaccgcuuccagaucaagggcgucgagcucaaguccggcuacaaggacuggauccucuggaucuccuucgccauguccugcuuccuccucugcgucgcccuccucggcuucaucaugugggccugccagaagggcaacauccgcugcaacaucugcaucuga

SEQ ID NO: 98516 - RNA, 1683 nt, Artificial Sequence
  derived and/or modified CDS sequence (opt2) from hemagglutinin__InfluenzaA__ACJ67533
auggagaccaucucccucaucaccauccuccucgucgucaccgccuccaacgccgacaagaucugcaucggccaccaguccaccaacuccaccgagaccgucgacacccucaccgagaccaacguccccgucacccacgccaaggagcuccuccacaccgagcacaacggcaugcucugcgccaccucccucggccacccccucauccucgacaccugcaccaucgagggccucgucuacggcaaccccuccugcgaccuccuccucgagggccgcgagugguccuacaucgucgagcgcuccuccgccgucaacggcaccugcuaccccggcaacgucgagaaccucgaggagcuccgcacccucuucuccuccgccuccuccuaccagcgcauccagaucuuccccgacaccaccuggaacgucaccuacaccggcaccucccgcgccugcuccggcuccuucuaccgcuccaugcgcuggcucacccagaaguccggcuucuaccccguccaggacgcccaguacaccaacaaccgcggcaaguccauccucuucgucuggggcauccaccacccccccaccuacgccgagcagaccaaccucuacauccgcaacgacaccaccaccuccgucaccaccgaggaccucaaccgcaccuucaagcccgucaucggcccccgcccccucgucaacggccuccagggccgcaucgacuacuacugguccguccucaagcccggccagacccuccgcguccgcuccaacggcaaccucaucgcccccugguacggccacguccucuccggcggcucccacggccgcauccucaagaccgaccucaaguccggcuccugcgucguccagugccagaccgagaagggcggccucaacuccacccuccccuuccacaacaucuccaaguacgccuucggcaccugccccaaguacguccgcgucaacucccucaagcucgccgucggccuccgcaacguccccgcccgcuccucccgcggccucuucggcgccaucgccggcuucaucgagggcggcuggcccggccucgucgccggcugguacggcuuccagcacuccaacgaccagggcgucggcauggccgccgaccgcgacuccacccagaaggccaucgacaagaucaccuccaaggucaacaacaucgucgacaagaugaacaagcaguacgagaucaucgaccacgaguucuccgaggucgagacccgccucaacaugaucaacaacaagaucgacgaccagauccaggacgucugggccuacaacgccgagcuccucguccuccucgagaaccagaagacccucgacgagcacgacgccaacgucaacaaccucuacaacaaggucaagcgcgcccucggcuccaacgccauggaggacggcaagggcugcuucgagcucuaccacaagugcgacgaccagugcauggagaccauccgcaacggcaccuacaaccgccgcaaguaccgcgaggagucccgccucgagcgccagaagaucgagggcgucaagcucgaguccgagcgcaccuacaagauccucaccaucuacuccaccgucgccuccucccucguccucgccaugggcuucgccgccuuccucuucugggccauguccaacggcuccugccgcugcaacaucugcaucuga

SEQ ID NO: 98517 - RNA, 1704 nt, Artificial Sequence
  derived and/or modified CDS sequence (opt2) from hemagglutinin__InfluenzaA__ACJ68607
auggagaagaucguccuccuccucgccaucgucucccucgucaaguccgaccagaucugcaucggcuaccacgccaacaacuccaccgagcaggucgacaccaucauggagaagaacgucaccgucacccacgcccaggacauccucgagaagacccacaacggcaagcucugcgaccucgacggcgucaagccccucauccucggcgacugcuccgucgccggcuggcuccucggcaaccccaugugcgacgaguucaucaacguccccgagugguccuacaucgucgagaaggccaaccccgccaacgaccucugcuaccccggcaacuucaacgacuacgaggagcucaagcaccuccucucccgcaucaaccacuucgagaagauccagaucauccccaaguccuccugguccgaccacgaggccuccuccggcgucuccuccgccugccccuaccagggcacccccuccuucuuccgcaacgucgucuggcucaucaagaagaacaacaccuaccccaccaucaagcgcuccuacaacaacaccaaccaggaggaccuccucauccucuggggcauccaccacuccaacgacgccgccgagcagaccaagcucuaccagaaccccaccaccuacaucuccgucggcaccuccacccucaaccagcgccucguccccaagaucgccacccgcuccaaggucaacggccaguccggccgcauggacuucuucuggaccauccucaagcccaacgacgccaucaacuucgaguccaacggcaacuucaucgcccccgaguacgccuacaagaucgucaagaagggcgacuccgccaucaugaaguccgaggucgaguacggcaacugcaacaccaagugccagacccccaucggcgccaucaacuccuccaugcccuuccacaacauccacccccucaccaucggcgagugccccaaguacgucaaguccaacaagcucguccucgccaccggccuccgcaacuccccccuccgcgagcgccgccgcaagcgcggccucuucggcgccaucgccggcuucaucgagggcggcuggcagggcauggucgacggcugguacggcuaccaccacuccaacgagcagggcuccggcuacgccgccgacaaggaguccacccagaaggccaucgacggcgucaccaacaaggucaacuccaucaucgacaagaugaacacccaguucgaggccgucggccgcgaguucaacaaccucgagcgccgcaucgagaaccucaacaagaagauggaggacggcuuccucgacgucuggaccuacaacgccgagcuccucguccucauggagaacgagcgcacccucgacuuccacgacuccaacgucaagaaccucuacgacaagguccgccuccagcuccgcgacaacgccaaggagcucggcaacggcugcuucgaguucuaccacaagugcgacaacgagugcauggaguccguccgcaacggcaccuacgacuacccccaguacuccgaggaggcccgccucaagcgcgaggagaucuccggcgucaagcucgaguccaucggcaccuaccagauccucuccaucuacuccaccgucgccuccucccucgcccucgccaucauggucgccggccucucccucuggaugugcuccaacggcucccuccagugccgcaucugcaucuga

SEQ ID NO: 98518 - RNA, 1704 nt, Artificial Sequence
  derived and/or modified CDS sequence (opt2) from hemagglutinin__InfluenzaA__ACJ68609
auggagaagaucguccuccuccucgccaucgucucccucgucaaguccgaccagaucugcaucggcuaccacgccaacaacuccaccgagcaggucgacaccaucauggagaagaacgucaccgucacccacgcccaggacauccucgagaagacccacaacggcaagcucugcgaccucgacggcgucaagccccucauccuccgcgacugcuccgucgccggcuggcuccucggcaaccccaugugcgacgaguucaucaacguccccgagugguccuacaucgucgagaaggccaaccccgccaacgaccucugcuaccccggcaacuucaacgacuacgaggagcucaagcaccuccucucccgcaucaaccacuucgagaagauccagaucauccccaaguccuccugguccgaccacgaggccuccuccggcgucuccuccgccugccccuaccagggcacccccuccuucuuccgcaacgucgucuggcucaucaagaagaacaacaccuaccccaccaucaagcgcuccuacaacaacaccaaccaggaggaccuccucauccucuggggcauccaccacuccaacgacgccgccgagcagaccaagcucuaccagaaccccaccaccuacaucuccgucggcaccuccacccucaaccagcgccucguccccaagaucgccacccgcuccaaggucaacggccaguccggccgcauggacuucuucuggaccauccucaagcccaacgacgccaucaacuucgaguccaacggcaacuucaucgcccccgaguacgccuacaagaucgucaagaagggcgacuccgccaucaugaaguccgaggucgaguacggcaacugcaacaccaagugccagacccccaucggcgccaucaacuccuccaugcccuuccacaacauccacccccucaccaucggcgagugccccaaguacgucaaguccaacaagcucguccucgccaccggccuccgcaacuccccccuccgcgagcgccgccgcaagcgcggccucuucggcgccaucgccggcuucaucgagggcggcuggcagggcauggucgacggcugguacggcuaccaccacuccaacgagcagggcuccggcuacgccgccgacaaggaguccacccagaaggccaucgacggcgucaccaacaaggucaacuccaucaucgacaagaugaacacccaguucgaggccgucggccgcgaguucaacaaccucgagcgccgcaucgagaaccucaacaagaagauggaggacggcuuccucgacgucuggaccuacaacgccgagcuccucguccucauggagaacgagcgcacccucgacuuccacgacuccaacgucaagaaccucuacgacaagguccgccuccagcuccgcgacaacgccaaggagcucggcaacggcugcuucgaguucuaccacaagugcgacaacgagugcauggaguccguccgcaacggcaccuacgacuacccccaguacuccgaggaggcccgccuccgccgcgaggagaucuccggcgucaagcucgaguccaucggcaccuaccagauccucuccaucuacuccaccgucgccuccucccucgcccucgccaucauggucgccggccucucccucuggaugugcuccaacggcucccuccagugccgcaucugcaucuga

SEQ ID NO: 98519 - RNA, 1704 nt, Artificial Sequence
  derived and/or modified CDS sequence (opt2) from hemagglutinin__InfluenzaA__ACJ68610
auggagaagaucguccucuuccucgccaucgucucccucgucaaguccgaccagaucugcaucggcuaccacgccaacaacuccaccgagcaggucgacaccaucauggagaagaacgucaccgucacccacgcccaggacauccucgagaagacccacaacggcaagcucugcgaccucgacggcgucaagccccucauccuccgcgacugcuccgucgccggcuggcuccucggcaaccccaugugcgacgaguucaucaacguccccgagugguccuacaucgucgagaaggccaaccccgccaacgaccucugcuaccccggcaacuucaacgacuacgaggagcucaagcaccuccucucccgcaucaaccacuucgagaagauccagaucauccccaaguccuccugguccgaccacgaggccuccuccggcgucuccuccgccugccccuaccagggcacccccuccuucuuccgcaacgucgucuggcucaucaagaagaacaacaccuaccccaccaucaagcgcuccuacaacaacaccaaccaggaggaccuccucauccucuggggcauccaccacuccaacgacgccgccgagcagaccaagcucuaccagaaccccaccaccuacaucuccgucggcaccuccacccucaaccagcgccucguccccaagaucgccacccgcuccaaggucaacggccaguccggccgcauggacuucuucuggaccauccucaagcccaacgacgccaucaacuucgaguccaacggcaacuucaucgcccccgaguacgccuacaagaucgucaagaagggcgacuccgccaucaucaaguccgaggucgaguacggcaacugcaacaccaagugccagacccccaucggcgccaucaacuccuccaugcccuuccacaacauccacccccucaccaucggcgagugccccaaguacgucaaguccaacaagcucguccucgccaccggccuccgcaacuccccccuccgcgagcgccgccgcaagcgcggccucuucggcgccaucgccggcuucaucgagggcggcuggcagggcauggucgacggcugguacggcuaccaccacuccaacgagcagggcuccggcuacgccgccgacaaggaguccacccagaaggccaucgacggcgucaccaacaaggucaacuccaucaucgacaagaugaacacccaguucgaggccgucggccgcgaguucaacaaccucgagcgccgcaucgagaaccucaacaagaagauggaggacggcuuccucgacgucuggaccuacaacgccgagcuccucguccucauggagaacgagcgcacccucgacuuccacgacuccaacgucaagaaccucuacgacaagguccgccuccagcuccgcgacaacgccaaggagcucggcaacggcugcuucgaguucuaccacaagugcgacaacgagugcauggaguccguccgcaacggcaccuacgacuacccccaguacuccgaggaggcccgccucaagcgcgaggagaucuccggcgucaagcucgaguccaucggcaccuaccagauccucuccaucuacuccaccgucgccuccucccucgcccucgccaucauggucgccggccucucccucuggaugugcuccaacggcucccuccagugccgcaucugcaucuga

SEQ ID NO: 98520 - RNA, 1704 nt, Artificial Sequence
  derived and/or modified CDS sequence (opt2) from hemagglutinin__InfluenzaA__ACJ68611
auggagaagaucguccuccuccucgccaucgucucccucgucaaguccgaccagaucugcaucggcuaccacgccaacaacuccaccgagcaggucgacaccaucauggagaagaacgucaccgucacccacgcccaggacauccucgagaagacccacaacggcaagcucugcgaccucgacggcgucaagccccucauccuccgcgacugcuccgucgccggcuggcuccucggcaaccccaugugcgacgaguucaucaacguccccgagugguccuacaucgucgagaaggccaaccccgccaacgaccucugcuaccccggcaacuucaacgacuacgaggagcucaagcaccuccucucccgcaucaaccacuucgagaagauccagaucauccccaaguccuccugguccgaccacgaggccucccucggcgucuccuccgccugccccuaccagggcaugcccuccuucuuccgcaacgucgucuggcucaucaagaagaacaacaccuaccccaccaucaagcgcuccuacaacaacaccaaccaggaggaccuccucauccucuggggcauccaccacuccaacgacgccgccgagcagaccaagcucuaccagaaccccaccaccuacaucuccgucggcaccuccacccucaaccagcgccucguccccaagaucgccacccgcuccaaggucaacggccaguccggccgcauggacuucuucuggaccauccucaagcccaacgacgccaucaacuucgaguccaacggcaacuucaucgcccccgaguacgccuacaagaucgucaagaagggcgacuccgccaucaugaaguccgaggucggcuacggcaacugcaacaccaagugccagacccccaucggcgccaucaacuccuccaugcccuuccacaacauccacccccucaccaucggcgagugccccaaguacgucaaguccaacaagcucguccucgccaccggccuccgcaacuccccccuccgcgagcgccgccgcaagcgcggccucuucggcgccaucgccggcuucaucgagggcggcuggcagggcauggucgacggcugguacggcuaccaccacuccaacgagcagggcuccggcuacgccgccgacaaggaguccacccagaaggccaucgacggcgucaccaacaaggucaacuccaucaucgacaagaugaacacccaguucgaggccgucggccgcgaguucaacaaccucgagcgccgcaucgagaaccucaacaagaagauggaggacggcuuccucgacgucuggaccuacaacgccgagcuccucguccucauggagaacgagcgcacccucgacuuccacgacuccaacgucaagaaccucuacgacaagguccgccuccagcuccgcgacaacgccaaggagcucggcaacggcugcuucgaguucuaccacaagugcgacgacgagugcauggaguccguccgcaacggcaccuacgacuacccccaguacuccgaggaggcccgccucaagcgcgaggagaucuccggcgucaagcucgaguccaucggcaccuaccagauccucuccaucuacuccaccgucgccuccucccucgcccucgccaucauggucgccggccucucccucuggaugugcuccaacggcucccuccagugccgcaucugcaucuga

SEQ ID NO: 98521 - RNA, 1704 nt, Artificial Sequence
  derived and/or modified CDS sequence (opt2) from hemagglutinin__InfluenzaA__ACJ68612
auggagaagaucguccuccuccucgccaucgucucccucgucaaguccgaccagaucugcaucggcuaccacgccaacaacuccaccgagcaggucgacaccaucauggagaagaacgucaccgucacccacgcccaggacauccucgagaagacccacaacggcaagcucugcgaccucgacggcgucaagccccucauccuccgcgacugcuccgucgccggcuggcuccucggcaaccccaugugcgacgaguucaucaacguccccgagugguccuacaucgucgagaaggccaaccccgccaacgaccucugcuaccccggcaacuucaacgacuacgaggagcucaagcaccuccucucccgcaucaaccacuucgagaagauccagaucauccccaaguccuccuggcccgaccacgaggccuccuccggcgucuccuccgccugccccuaccagggcacccccuccuucuuccgcaacgucgucuggcucaucaagaagaacaacaccuaccccaccaucaagcgcuccuacaacaacaccaaccaggaggaccuccucauccucuggggcauccaccacuccaacaacgccgccgagcagaccaagcucuaccagaaccccaccaccuacaucuccgucggcaccuccacccucaaccuccgccucguccccaagaucgccacccgcuccaaggucaacggccaguccggccgcauggacuucuucuggaccauccucaagcccaacgacgccaucaacuucgaguccaacggcaacuucaucgcccccgaguacgccuacaagaucgucaagaagggcgacuccgccaucaugaaguccgaggucgaguacggcaacugcaacaccaagugccagacccccaucggcgccaucaacuccuccaugcccuuccacaacauccacccccucaccaucggcgagugccccaaguacgucaaguccaacaagcucguccucgccaccggccuccgcaacuccccccuccgcgagcgccgccgcaagcgcggccucuucggcgccaucgccggcuucaucgagggcggcuggcagggcauggucgacggcugguacggcuaccaccacuccaacgagcagggcuccggcuacgccgccgacaaggaguccacccagaaggccaucgacggcgucaccaacaaggucaacuccaucaucgacaagaugaacacccaguucgaggccgucggccgcgaguucaacaaccucgagcgccgcaucgagaaccucaacaagaagauggaggacggcuuccucgacgucuggaccuacaacgccgagcuccucguccucauggagaacgagcgcacccucgacuuccacgacuccaacgucaagaaccucuacgacaagguccgccuccagcuccgcgacaacgccaaggagcucggcaacggcugcuucgaguucuaccacaagugcgacaacgagugcauggaguccguccgcaacggcaccuacgacuacccccaguacuccgaggaggcccgccucaagcgcgaggagaucuccggcgucaagcucgaguccaucggcgccuaccagauccucuccaucuacuccaccgucgccuccucccucgcccucgccaucauggucgccggccucucccucuggaugugcuccaacggcucccuccagugccgcaucugcaucuga

SEQ ID NO: 98522 - RNA, 1704 nt, Artificial Sequence
  derived and/or modified CDS sequence (opt2) from hemagglutinin__InfluenzaA__ACJ68613
auggagaagaucguccucuuccucgccaucgucucccacgucaaguccgaccagaucugcaucggcuaccacgccaacaacuccaccgagcaggucgacaccaucauggagaagaacgucaccgucacccacgcccaggacauccucgagaagacccacaacggcaagcucugcgaccucggcggcgucaagccccucauccuccgcgacugcuccgucgccggcuggcuccucggcaaccccaugugcgacgaguucaucaacguccccgagugguccuacaucgucgagaaggccaaccccgccaacgaccucugcuaccccggcaacuucaacgacuacgaggagcucaagcaccuccucucccgcaucaaccacuucgagaagauccagaucauccccaaguccuccugguccgaccacgaggccuccuccggcgucuccuccgucugccccuaccagggcacccccuccuucuuccgcaacgucgucuggcucaucaagaagaacaacaccuaccccaccaucaagaaguccuacaacaacaccaaccaggaggaccuccucauccucuggggcauccaccacuccaacgacgccgccgagcagaccaagcucuaccagaaccccaccaccuacaucuccgucggcaccuccacccucaaccagcgccucguccccaagaucgccacccgcuccaaggucaacggccaguccggccgcauggacuucuucuggaccauccucaagcccaacgacgccaucaacuucgaguccaacggcaacuucaucgcccccgaguacgccuacaagaucgucaagaagggcgacuccgccaucaugaaguccgaggucgaguacggcaacugcaacaccaagugccagacccccaucggcgccaucaacuccuccaugcccuuccacaacauccacccccucaccaucggcgagugccccaaguacgucaaguccaacaagcucguccucgccaccggccuccgcaacuccccccuccgcgagcgccgccgcaagcgcggccucuucggcgccaucgccggcuucaucgagggcggcuggcagggcauggucgacggcugguacggcuaccaccacuccaacgagcagggcuccggcuacgccgccgacaaggaguccacccagaaggccaucgacggcgucaccaacaaggucaacuccaucaucgacaagaugaacacccaguucgaggccgucggccgcgaguucaacaaccucgagcgccgcaucgagaaccucaacaagaagauggaggacggcuuccucgacgucuggaccuacaacgccgagcuccucguccucauggagaacgagcgcacccucgacuuccacgacuccaacgucaagaaccucuacgacaagguccgccuccagcuccgcgacaacgccaaggagcucggcaacggcugcuucgaguucuaccacaagugcgacaacgagugcauggaguccguccgcaacggcaccuacgacuacccccaguacuccgaggaggcccgccucaagcgcgaggagaucuccggcgucaagcucgaguccaucggcaccuaccagauccucuccaucuacuccaccgucgccuccucccucgcccucgccaucauggucgccggccucucccucuggaugugcuccaacggcucccuccagugccgcaucugcaucuga

SEQ ID NO: 98523 - RNA, 1707 nt, Artificial Sequence
  derived and/or modified CDS sequence (opt2) from hemagglutinin__InfluenzaA__ACJ68614
auggagaagaucguccuccuccucgccaucgucucccucgucaaguccgaccagaucugcaucggcuaccacgccaacaacuccaccgagcaggucgacaccaucauggagaagaacgucaccgucacccacgcccaggacauccucgagaagacccacaacggcaagcucugcgaccucgacggcgucaagccccucauccuccgcgacugcuccgucgccggcuggcuccucggcaaccccaugugcgacgaguuccucaacguccccgagugguccuacaucgucgagaagaucaaccccgucaacgaccucugcuaccccggcaacuucaacgacuacgaggagcucaagcaccuccucucccgcaucaaccacuucgagaagauccagaucauccccaaguccuccugguccgaccacgaggccuccuccggcgucuccuccgccugccccuaccagggccgcuccuccuucuuccgcaacgucgucuggcucaucaagaagaacaacaccuaccccaccaucaagcgcuccuacaacaacaccaaccaggaggaccuccucguccucuggggcauccaccaccccaacgacgccgccgagcagacccgccucuaccagaaccccaccaccuacaucuccgucggcaccuccacccucaaccagcgccucguccccaagcucgccacccgcuccaaggucaacggccaguccggccgcauggaguucuucuggaccauccucaagcccaacgacgccaucaacuucgaguccaacggcaacuucaucgcccccgagaacgccuacaagaucgucaagaagggcgacuccaccaucaugaaguccgagcucgaguacggcaacugcaacaccaagugccagacccccaucggcgccaucaacuccuccaugcccuuccacaacauccacccccucaccaucggcgagugccccaaguacgucaaguccaaccgccucguccucgccaccggccuccgcaacuccccccagggcgagcgccgccgcaagaagcgcggccucuucggcgccaucgccggcuucaucgagggcggcuggcagggcauggucgacggcugguacggcuaccaccacuccaacgagcgcggcuccggcuacgccgccgacaaggaguccacccagaaggccaucgacggcgucaccaacaaggucaacuccaucaucgacaagaugaacacccaguucgaggccgucggccgcgaguucaacaaccucgagcgccgcaucgagaaccucaacaagaagauggaggacggcuuccucgacgucuggaccuacaacgccgagcuccucguccucauggagaacgagcgcacccucgacuuccacgacuccaacgucaagaaccucuacgacaagguccgccuccagcuccgcgacaacgccaaggagcucggcaacggcugcuucgaguucuaccaccgcugcgacaacgagugcauggaguccguccgcaacggcaccuacgacuacccccaguacuccgaggaggcccgccucaagcgcgaggagaucuccggcgucaagcucgaguccaucggcaccuaccagauccucuccaucuacuccaccgucgccuccucccucgcccucgccaucauggucgccggccucucccucuggaugugcuccaacggcucccuccagugccgcaucugcaucuga

SEQ ID NO: 98524 - RNA, 1698 nt, Artificial Sequence
  derived and/or modified CDS sequence (opt2) from hemagglutinin__InfluenzaA__ACK99007
augaaggucaagcuccucguccuccucugcaccuucaccgccaccuacgccgacaccaucugcaucggcuaccacgccaacaacuccaccgacaccgucgacaccguccucgagaagaacgucaccgucacccacuccgucaaccuccucgagaacucccacaacggcaagcucugccuccucaagggcaucgccccccuccagcucggcaacugcuccgucgccggcuggauccucggcaaccccgagugcgagcuccucaucuccaaggaguccugguccuacaucgucgagaagcccaaccccgagaacggcaccugcuaccccggccacuucgccgacuacgaggagcuccgcgagcagcucuccuccgucuccuccuucgagcgcuucgagaucuuccccaaggaguccuccuggcccaaccacaccgucaccggcgucuccgccuccugcucccacaacggcgaguccuccuucuaccgcaaccuccucuggcucaccggcaagaacggccucuaccccaaccucuccaaguccuacgccaacaacaaggagaaggagguccucguccucuggggcguccaccacccccccaacaucggcgaccagaaggcccucuaccacaccgagaacgccuacgucuccgucgucuccucccacuacucccgcaaguucacccccgagaucgccaagcgccccaagguccgcgaccaggagggccgcaucaacuacuacuggacccuccucgagcccggcgacaccaucaucuucgaggccaacggcaaccucaucgccccccgcuacgccuucgcccucucccgcggcuucggcuccggcaucaucaacuccaacgcccccauggacaagugcgacgccaagugccagaccccccagggcgccaucaacuccucccuccccuuccagaacguccaccccgucaccaucggcgagugccccaaguacguccgcuccgccaagcuccgcauggucaccggccuccgcaacauccccuccauccagucccgcggccucuucggcgccaucgccggcuucaucgagggcggcuggaccggcauggucgacggcugguacggcuaccaccaccagaacgagcagggcuccggcuacgccgccgaccagaaguccacccagaacgccaucaacggcaucaccaacaaggucaacuccgucaucgagaagaugaacacccaguucaccgccgucggcaaggaguucaacaagcucgagcgccgcauggagaaccucaacaagaaggucgacgacggcuucaucgacaucuggaccuacaacgccgagcuccucguccuccucgagaacgagcgcacccucgacuuccacgacuccaacgucaagaaccucuacgagaaggucaagucccagcucaagaacaacgccaaggagaucggcaacggcugcuucgaguucuaccacaagugcaacgacgagugcauggaguccgucaagaacggcaccuacgacuaccccaaguacuccgaggaguccaagcucaaccgcgagaagaucgacggcgucaagcucgaguccaugggcgucuaccagauccucgccaucuacuccaccgucgccuccucccucguccuccucgucucccucggcgccaucuccuucuggaugugcuccaacggcucccuccagugccgcaucugcaucuga

SEQ ID NO: 98525 - RNA, 1698 nt, Artificial Sequence
  derived and/or modified CDS sequence (opt2) from hemagglutinin__InfluenzaA__ACK99008
augaaggucaagcuccucguccuccucugcaccuucaccgccaccuacgccgacaccaucugcaucggcuaccacgccaacaacuccaccgacaccgucgacaccguccucgagaagaacgucaccgucacccacuccgucaaccuccucgagaacucccacaacggcaagcucugccuccucaagggcaucgccccccuccagcucggcaacugcuccgucgccggcuggauccucggcaaccccgagugcgagcuccucaucuccaaggaguccugguccuacaucgucgagaagcccaaccccgagaacggcaccugcuaccccggccacuucgccgacuacgaggagcuccgcgagcagcucuccuccgucuccuccuucgagcgcuucgagaucuuccccaaggaguccuccuggcccaaccacaccgucaccggcgucuccgccuccugcucccacaacggcgaguccuccuucuaccgcaaccuccucuggcucaccggcaagaacggccucuaccccaaccucuccaaguccuacgccaacaacaaggagaaggagguccucguccucuggggcguccaccacccccccaacaucggcgaccagaaggcccucuaccacaccgagaacgccuacgucuccgucgucuccucccacuacucccgcaaguucacccccgagaucgccaagcgccccaagguccgcgaccaggagggccgcaucaacuacuacuggacccuccucgagcccggcgacaccaucaucuucgaggccaacggcaaccucaucgccccccgcuacgccuucgcccucucccgcggcuucggcuccggcaucaucaacuccaacgcccccauggacaagugcgacgccaagugccagaccccccagggcgccaucaacuccucccuccccuuccagaacguccaccccgucaccaucggcgagugccccaaguacguccgcuccgccaagcuccgcauggucaccggccuccgcaacauccccuccauccagucccgcggccucuucggcgccaucgccggcuucaucgagggcggcuggaccggcauggucgacggcugguacggcuaccaccaccagaacgagcagggcuccggcuacgccgccgaccagaaguccacccagaacgccaucaacggcaucaccaacaaggucaacuccgucaucgagaagaugaacacccaguucaccgccgucggcaaggaguucaacaagcucgagcgccgcauggagaaccucaacaagaaggucgacgacggcuucaucgacaucuggaccuacaacgccgagcuccucguccuccucgagaacgagcgcacccucgacuuccacgacuccaacgucaagaaccucuacgagaaggucaagucccagcucaagaacaacgccaaggagaucggcaacggcugcuucgaguucuaccacaagugcaacgacgagugcauggaguccgucaagaacggcaccuacgacuaccccaaguacuccgaggaguccaagcucaaccgcgagaagaucgacggcgucaagcucgaguccauggaggucuaccagauccucgccaucuacuccaccgucgccuccucccucguccuccucgucucccucggcgccaucuccuucuggaugugcuccaacggcucccuccagugccgcaucugcaucuga

SEQ ID NO: 98526 - RNA, 1698 nt, Artificial Sequence
  derived and/or modified CDS sequence (opt2) from hemagglutinin__InfluenzaA__ACK99009
augaaggucaagcuccucguccuccucugcaccuucaccgccaccuacgccgacaccaucugcaucggcuaccacgccaacaacuccaccgacaccgucgacaccguccucgagaagaacgucaccgucacccacuccgucaaccuccucgagaacucccacaacggcaagcucugccuccucaagggcaucgccccccuccagcucggcaacugcuccgucgccggcuggauccucggcaaccccgagugcgagcuccucaucuccaaggaguccugguccuacaucgucgagaagcccaaccccgagaacggcaccugcuaccccggccacuucgccgacuacgaggagcuccgcgagcagcucuccuccgucuccuccuucgagcgcuucgagaucuuccccaaggaguccuccuggcccaaccacaccgucaccggcgucuccgccuccugcucccacaacggcgaguccuccuucuaccgcaaccuccucuggcucaccggcaagaacggccucuaccccaaccucuccaaguccuacgccaacaacaaggagaaggagguccucguccucuggggcguccaccacccccccaacaucggcgaccagaaggcccucuaccacaccgagaacgccuacgucuccgucgucuccucccacuacucccgcaaguucacccccgagaucgccaagcgccccaagguccgcgaccaggagggccgcaucaacuacuacuggacccuccucgagcccggcgacaccaucaccuucgaggccaacggcaaccucaucgccccccgcuacgccuucgcccucucccgcggcuucggcuccggcaucaucaacuccaacgcccccauggacaagugcgacgccaagugccagaccccccagggcgccaucaacuccucccuccccuuccagaacguccaccccgucaccaucggcgagugccccaaguacguccgcuccgccaagcuccgcauggucaccggccuccgcaacauccccuccauccagucccgcggccucuucggcgccaucgccggcuucaucgagggcggcuggaccggcauggucgacggcugguacggcuaccaccaccagaacgagcagggcuccggcuacgccgccgaccagaaguccacccagaacgccaucaacggcaucaccaacaaggucaacuccgucaucgagaagaugaacacccaguucaccgccgucggcaaggaguucaacaagcucgagcgccgcauggagaaccucaacaagaaggucgacgacggcuucaucgacaucuggaccuacaacgccgagcuccucguccuccucgagaacgagcgcacccucgacuuccacgacuccaacgucaagaaccucuacgagaaggucaagucccagcucaagaacaacgccaaggagaucggcaacggcugcuucgaguucuaccacaagugcaacgacgagugcauggaguccgucaagaacggcaccuacgacuaccccaaguacuccgaggaguccaagcucaaccgcgagaagaucgacggcgucaagcucgaguccaugggcgucuaccagauccucgccaucuacuccaccgucgccuccucccucguccuccucgucucccucggcgccaucuccuucuggaugugcuccaacggcucccuccagugccgcaucugcaucuga

SEQ ID NO: 98527 - RNA, 1698 nt, Artificial Sequence; identical to SEQ ID NO: 98524
  derived and/or modified CDS sequence (opt2) from hemagglutinin__InfluenzaA__ACK99011

SEQ ID NO: 98528 - RNA, 1698 nt, Artificial Sequence
  derived and/or modified CDS sequence (opt2) from hemagglutinin__InfluenzaA__ACK99012
augaaggucaagcuccucguccuccucugcaccuucaccgccaccuacgccgacaccaucugcaucggcuaccacgccaacaacuccaccgacaccgucgacaccguccucgagaagaacgucaccgucacccacuccgucaaccuccucgagaacucccacaacggcaagcucugccuccucaagggcaucgccccccuccagcucggcaacugcuccgucgccggcuggauccucggcaaccccgagugcgagcuccucaucuccaaggaguccugguccuacaucgucgagaagcccaaccccgagaacggcaccugcuaccccggccacuucgccgacuacgaggagcuccgcgagcagcucuccuccgucuccuccuucgagcgcuucgagaucuuccccaaggaguccuccuggcccaaccacaccgucaccggcgucuccgccuccugcucccacaacggcgaguccuccuucuaccgcaaccuccucuggcucaccggcaagaacggccucuaccccaaccucuccaaguccuacgccaacaacaaggagaaggagguccucguccucuggggcguccaccacccccccaacaucggcgaccagaaggcccucuaccacaccgagaacgccuacgucuccgucgucuccucccacuacucccgcaaguucacccccgagaucgccaagcgccccaagguccgcgaccaggagggccgcaucaacuacuacuggacccuccucgagcccggcgacaccaucaucuucgaggccaacggcaaccucaucgccccccgcuacgccuucgcccucucccgcggcuucggcuccggcaucaucaacuccaacgcccccauggacaagugcgacgccaagugccagaccccccagggcgccaucaacuccucccuccccuuccagaacguccaccccgucaccaucggcgagugccccaaguacguccgcuccgccaagcuccgcauggucaccggccuccgcaacauccccuccauccagucccgcggccucuucggcgccaucgccggcuucaucgagggcggcuggaccggcauggucgacggcugguacggcuaccaccaccagaacgagcagggcuccggcuacgccgccgaccagaaguccacccagaacgccaucaacggcaucaccaacaaggucaacuccgucaucgagaagaugaacacccaguucaccgccgucggcaaggaguucaacaagcucgagcgccgcauggagaaccucaacaagaaggucgacgacggcuucaucgacaucuggaccuacaacgccgagcuccucguccuccucgagaacgagcgcacccucgacuuccacgacuccaacgucaagaaccucuacgagaaggucaagucccagcucaagaacaacgccaaggagaucggcaacggcugcuucgaguucuaccacaagugcaacgacgagugcauggaguccgucaagaacggcaccuacgacuaccccaaguacuccgaggaguccaagcucaaccgcgagaagaucgacggcgucaagcucgaguccaugggcgucuaccagauccucgccaucuacuccaccgucgccuccucccucguccuccucaucucccucggcgccaucuccuucuggaugugcuccaacggcucccuccagugccgcaucugcaucuga

SEQ ID NO: 98529 - RNA, 1698 nt, Artificial Sequence; identical to SEQ ID NO: 98524
  derived and/or modified CDS sequence (opt2) from hemagglutinin__InfluenzaA__ACK99013

SEQ ID NO: 98530 - RNA, 1698 nt, Artificial Sequence
  derived and/or modified CDS sequence (opt2) from hemagglutinin__InfluenzaA__ACK99014
augaaggucaagcuccucguccuccucugcaccuucaccgccaccuacgccgacaccaucugcaucggcuaccacgccaacaacuccaccgacaccgucgacaccguccucgagaagaacgucaccgucacccacuccgucaaccuccucgagaacucccacaacggcaagcucugccuccucaagggcaucgccccccuccagcucggcaacugcuccgucgccggcuggauccucggcaaccccgagugcgagcuccucaucuccaaggaguccugguccuacaucgucgagaagcccaaccccgagaacggcaccugcuaccccggccacuucgccgacuacgaggagcuccgcgagcagcucuccuccgucuccuccuucgagcgcuucgagaucuuccccaaggaguccuccuggcccaaccacaccgucaccggcgucuccgccuccugcucccacaacggcgaguccuccuucuaccgcaaccuccucuggcucaccggcaagaacggccucuaccccaaccucuccaaguccuacgccaacaacaaggagaaggagguccucguccucuggggcguccaccacccccccaacaucggcgaccagaaggcccucuaccacaccgagaacgccuacgucuccgucgucuccucccacuacucccgcaaguucacccccgagaucgccaagcgccccaagguccgcgaccaggagggccgcaucaacuacuacuggacccuccucgagcccggcgacaccaucaucuucgaggccaacggcaaccucaucgccccccgcuacgccuucacccucucccgcggcuucggcuccggcaucaucaacuccaacgcccccauggacaagugcgacgccaagugccagaccccccagggcgccaucaacuccucccuccccuuccagaacguccaccccgucaccaucggcgagugccccaaguacguccgcuccgccaagcuccgcauggucaccggccuccgcaacauccccuccauccagucccgcggccucuucggcgccaucgccggcuucaucgagggcggcuggaccggcauggucgacggcugguacggcuaccaccaccagaacgagcagggcuccggcuacgccgccgaccagaaguccacccagaacgccaucaacggcaucaccaacaaggucaacuccgucaucgagaagaugaacacccaguucaccgccgucggcaaggaguucaacaagcucgagcgccgcauggagaaccucaacaagaaggucgacgacggcuucaucgacaucuggaccuacaacgccgagcuccucguccuccucgagaacgagcgcacccucgacuuccacgacuccaacgucaagaaccucuacgagaaggucaagucccagcucaagaacaacgccaaggagaucggcaacggcugcuucgaguucuaccacaagugcaacgacgagugcauggaguccgucaagaacggcaccuacgacuaccccaaguacuccgaggaguccaagcucaaccgcgagaagaucgacggcgucaagcucgaguccaugggcgucuaccagauccucgccaucuacuccaccgucgccuccucccucguccuccucgucucccucggcgccaucuccuucuggaugugcuccaacggcucccuccagugccgcaucugcaucuga

SEQ ID NO: 98531 - RNA, 1698 nt, Artificial Sequence; identical to SEQ ID NO: 98524
  derived and/or modified CDS sequence (opt2) from hemagglutinin__InfluenzaA__ACK99016

SEQ ID NO: 98532 - RNA, 1698 nt, Artificial Sequence; identical to SEQ ID NO: 98524
  derived and/or modified CDS sequence (opt2) from hemagglutinin__InfluenzaA__ACK99018

SEQ ID NO: 98533 - RNA, 1698 nt, Artificial Sequence; identical to SEQ ID NO: 98524
  derived and/or modified CDS sequence (opt2) from hemagglutinin__InfluenzaA__ACK99023

SEQ ID NO: 98534 - RNA, 1698 nt, Artificial Sequence
  derived and/or modified CDS sequence (opt2) from hemagglutinin__InfluenzaA__ACK99026
augaaggucaagcuccucguccuccucugcaccuucaccgccaccuacgccgacaccaucugcaucggcuaccacgccaacaacuccaccgacaccgucgacaccguccucgagaagaacgucaccgucacccacuccgucaaccuccucgagaacucccacaacggcaagcucugccuccucaagggcaucgccccccuccagcucggcaacugcuccgucgccggcuggauccucggcaaccccgagugcgagcuccucaucuccaaggaguccugguccuacaucgucgagaagcccaaccccgagaacggcaccugcuaccccggccacuucgccgacuacgaggagcuccgcgagcagcucuccuccgucuccuccuucgagcgcuucgagaucuuccccaaggaguccuccuggcccaaccacaccgucaccggcgucuccgccuccugcucccacaacggcgaguccuccuucuaccgcaaccuccucuggcucaccggcaagaacggccucuaccccaaccucuccaaguccuacgccaacaacaaggagaaggagguccucguccucuggggcguccaccacccccccaacaucggcgaccagaaggcccucuaccacaccgagaacgccuacgucuccgucgucuccucccacuacucccgcaaguucacccccgagaucgccaagcgccccaagguccgcgaccaggagggccgcaucaacuacuacuggacccuccucgagcccggcgacaccaucaucuucgaggccaacggcaaccucaucgccccccgcuacgccuucgcccucucccgcggcuucggcuccggcaucaucaacuccaacgcccccauggacaagugcgacgccaagugccagaccccccagggcgccaucaacuccucccuccccuuccagaacguccaccccaucaccaucggcgagugccccaaguacguccgcuccgccaagcuccgcauggucaccggccuccgcaacauccccuccauccagucccgcggccucuucggcgccaucgccggcuucaucgagggcggcuggaccggcauggucgacggcugguacggcuaccaccaccagaacgagcagggcuccggcuacgccgccgaccagaaguccacccagaacgccaucaacggcaucaccaacaaggucaacuccgucaucgagaagaugaacacccaguucaccgccgucggcaaggaguucaacaagcucgagcgccgcauggagaaccucaacaagaaggucgacgacggcuucaucgacaucuggaccuacaacgccgagcuccucguccuccucgagaacgagcgcacccucgacuuccacgacuccaacgucaagaaccucuacgagaaggucaagucccagcucaagaacaacgccaaggagaucggcaacggcugcuucgaguucuaccacaagugcaacgacgagugcauggaguccgucaagaacggcaccuacgacuaccccaaguacuccgaggaguccaagcucaaccgcgagaagaucgacggcgucaagcucgaguccaugggcgucuaccagauccucgccaucuacuccaccgucgccuccucccucguccuccucgucucccucggcgccaucuccuucuggaugugcuccaacggcucccuccagugccgcaucugcaucuga

SEQ ID NO: 98535 - RNA, 1698 nt, Artificial Sequence; identical to SEQ ID NO: 98208
  derived and/or modified CDS sequence (opt2) from hemagglutinin__InfluenzaA__ACK99027

SEQ ID NO: 98536 - RNA, 1698 nt, Artificial Sequence
  derived and/or modified CDS sequence (opt2) from hemagglutinin__InfluenzaA__ACK99028
augaaggucaagcuccucguccuccucugcaccuucaccgccaccuacgccgacaccaucugcaucggcuaccacgccaacaacuccaccgacaccgucgacaccguccucgagaagaacgucaccgucacccacuccgucaaccuccucgagaacucccacaacggcaagcucugccuccucaagggcaucgccccccuccagcucggcaacugcuccgucgccggcuggauccucggcaaccccgagugcgagcuccucaucuccaaggaguccugguccuacaucgucgagaagcccaaccccgagaacggcaccugcuaccccggccacuucgccgacuacgaggagcuccgcgagcagcucuccuccgucuccuccuucgagcgcuucgagaucuuccccaaggaguccuccuggcccaaccacaccgucaccggcgucuccgccuccugcucccacaacggcgaguccuccuucuaccgcaaccuccucuggcucaccggcaagaacggccucuaccccaaccucuccaaguccuacgccaacaacaaggagaaggagguccucguccucuggggcguccaccacccccccaacaucggcgaccagaaggcccucuaccacaccgagaacgccuacgucuccgucgucuccucccacuacucccgcaaguucacccccgagaucgccaagcgccccaagguccgcgaccaggagggccgcaucaacuacuacuggacccuccucgagcccggcgacaccaucaucuucgaggccaacggcaaccucaucgccccccgcuacgccuucgcccucucccgcggcuucggcuccggcaucaucaacuccaacgcccccauggacaagugcgacgccaagugccagacccccaagggcgccaucaacuccucccuccccuuccagaacguccaccccgucaccaucggcgagugccccaaguacguccgcuccgccaagcuccgcauggucaccggccuccgcaacauccccuccauccagucccgcggccucuucggcgccaucgccggcuucaucgagggcggcuggaccggcauggucgacggcugguacggcuaccaccaccagaacgagcagggcuccggcuacgccgccgaccagaaguccacccagaacgccaucaacggcaucaccaacaaggucaacuccgucaucgagaagaugaacacccaguucaccgccgucggcaaggaguucaacaagcucgagcgccgcauggagaaccucaacaagaaggucgacgacggcuucaucgacaucuggaccuacaacgccgagcuccucguccuccucgagaacgagcgcacccucgacuuccacgacuccaacgucaagaaccucuacgagaaggucaagucccagcucaagaacaacgccaaggagaucggcaacggcugcuucgaguucuaccacaagugcaacgacgagugcauggaguccgucaagaacggcaccuacgacuaccccaaguacuccgaggaguccaagcucaaccgcgagaagaucgacggcgucaagcucgaguccaugggcgucuaccagauccucgccaucuacuccaccgucgccuccucccucguccuccucgucucccucggcgccaucuccuucuggaugugcuccaacggcucccuccagugccgcaucugcaucuga

SEQ ID NO: 98537 - RNA, 1698 nt, Artificial Sequence
  derived and/or modified CDS sequence (opt2) from hemagglutinin__InfluenzaA__ACK99029
augaaggucaagcuccucguccuccucugcaccuucaccgccaccuacgccgacaccaucugcaucggcuaccacgccaacaacuccaccgacaccgucgacaccguccucgagaagaacgucaccgucacccacuccgucaaccuccucgagaacucccacaacggcaagcucugccuccucaagggcaucgccccccuccagcucggcaacugcuccgucgccggcuggauccucggcaaccccgagugcgagcuccucaucuccaaggaguccugguccuacaucgucgagaagcccaaccccgagaacggcaccugcuaccccggccacuucgccgacuacgaggagcuccgcgagcagcucuccuccgucuccuccuucgagcgcuucgagaucuuccccaaggaguccuccuggcccaaccacaccgucaccggcgucuccgccuccugcucccacaacggcgaguccuccuucuaccgcaaccuccucuggcucaccggcaagaacggccucuaccccaaccucuccaaguccuacgccaacaacaaggagaaggagguccucguccucuggggcguccaccacccccccaacaucggcgaccagaaggcccucuaccacaccgagaacgccuacgucuccgucgucuccucccacuacucccgcaaguucacccccgagaucuccaagcgccccaagguccgcgaccaggagggccgcaucaacuacuacuggacccuccucgagcccggcgacaccaucaucuucgaggccaacggcaaccucaucgccccccgcuacgccuucgcccucucccgcggcuucggcuccggcaucaucaacuccaacgcccccauggacaagugcgacgccaagugccagaccccccagggcgccaucaacuccucccuccccuuccagaacguccaccccgucaccaucggcgagugccccaaguacguccgcuccgccaagcuccgcauggucaccggccuccgcaacauccccuccauccagucccgcggccucuucggcgccaucgccggcuucaucgagggcggcuggaccggcauggucgacggcugguacggcuaccaccaccagaacgagcagggcuccggcuacgccgccgaccagaaguccacccagaacgccaucaacggcaucaccaacaaggucaacuccgucaucgagaagaugaacacccaguucaccgccgucggcaaggaguucaacaagcucgagcgccgcauggagaaccucaacaagaaggucgacgacggcuucaucgacaucuggaccuacaacgccgagcuccucguccuccucgagaacgagcgcacccucgacuuccacgacuccaacgucaagaaccucuacgagaaggucaagucccagcucaagaacaacgccaaggagaucggcaacggcugcuucgaguucuaccacaagugcaacgacgagugcauggaguccgucaagaacggcaccuacgacuaccccaaguacuccgaggaguccaagcucaaccgcgagaagaucgacggcgucaagcucgaguccaugggcgucuaccagauccucgccaucuacuccaccgucgccuccucccucguccuccucgucucccucggcgccaucuccuucuggaugugcuccaacggcucccuccagugccgcaucugcaucuga

SEQ ID NO: 98538 - RNA, 1698 nt, Artificial Sequence; identical to SEQ ID NO: 98524
  derived and/or modified CDS sequence (opt2) from hemagglutinin__InfluenzaA__ACK99030

SEQ ID NO: 98539 - RNA, 1698 nt, Artificial Sequence; identical to SEQ ID NO: 98524
  derived and/or modified CDS sequence (opt2) from hemagglutinin__InfluenzaA__ACK99031

SEQ ID NO: 98540 - RNA, 1698 nt, Artificial Sequence; identical to SEQ ID NO: 98524
  derived and/or modified CDS sequence (opt2) from hemagglutinin__InfluenzaA__ACK99032

SEQ ID NO: 98541 - RNA, 1698 nt, Artificial Sequence; identical to SEQ ID NO: 98524
  derived and/or modified CDS sequence (opt2) from hemagglutinin__InfluenzaA__ACK99033

SEQ ID NO: 98542 - RNA, 1698 nt, Artificial Sequence
  derived and/or modified CDS sequence (opt2) from hemagglutinin__InfluenzaA__ACK99034
augaaggucaagcuccucguccuccucugcaccuucaccgccaccuacgccgacaccaucugcaucggcuaccacgccaacaacuccaccgacaccgucgacaccguccucgagaagaacgucaccgucacccacuccgucaaccuccucgagaacucccacaacggcaagcucugccuccucaagggcaucgccccccuccagcucggcaacugcuccgucgccggcuggauccucggcaaccccgagugcgagcuccucaucuccaaggaguccugguccuacaucgucgagaagcccaaccccgagaacggcaccugcuaccccggccacuucgccgacuacgaggagcuccgcgagcagcucuccuccgucuccuccuucgagcgcuucgagaucuuccccaaggaguccuccuggcccaaccacaccgucaccggcgucuccgccuccugcucccacaacggcgaguccuccuucuaccgcaaccuccucuggcucaccggcaagaacggccucuaccccaaccucuccaaguccuacgccaacaacaaggagaaggagguccucguccucuggggcguccaccacccccccaacaucggcgaccagaaggcccucuaccacaccgagaacgccuacgucuccgucgucuccucccacuacucccgcaaguucacccccgagaucgccaagcgccccaagguccgcgaccaggagggccgcaucaacuacuacuggacccuccucgagcccggcgacaccaucaucuucgaggccaacggcaaccucaucgccccccgcuacgccuucgcccucucccgcgacuucggcuccggcaucaucaacuccaacgcccccauggacaagugcgacgccaagugccagaccccccagggcgccaucaacuccucccuccccuuccagaacguccaccccgucaccaucggcgagugccccaaguacguccgcuccgccaagcuccgcauggucaccggccuccgcaacauccccuccauccagucccgcggccucuucggcgccaucgccggcuucaucgagggcggcuggaccggcauggucgacggcugguacggcuaccaccaccagaacgagcagggcuccggcuacgccgccgaccagaaguccacccagaacgccaucaacggcaucaccaacaaggucaacuccgucaucgagaagaugaacacccaguucaccgccgucggcaaggaguucaacaagcucgagcgccgcauggagaaccucaacaagaaggucgacgacggcuucaucgacaucuggaccuacaacgccgagcuccucguccuccucgagaacgagcgcacccucgacuuccacgacuccaacgucaagaaccucuacgagaaggucaagucccagcucaagaacaacgccaaggagaucggcaacggcugcuucgaguucuaccacaagugcaacgacgagugcauggaguccgucaagaacggcaccuacgacuaccccaaguacuccgaggaguccaagcucaaccgcgagaagaucgacggcgucaagcucgaguccaugggcgucuaccagauccucgccaucuacuccaccgucgccuccucccucguccuccucgucucccucggcgccaucuccuucuggaugugcuccaacggcucccuccagugccgcaucugcaucuga

SEQ ID NO: 98543 - RNA, 1698 nt, Artificial Sequence
  derived and/or modified CDS sequence (opt2) from hemagglutinin__InfluenzaA__ACK99035
augaaggucaagcuccucguccuccucugcaccuucaccgccaccuacgccgacaccaucugcaucggcuaccacgccaacaacuccaccgacaccgucgacaccguccucgagaagaacgucaccgucacccacuccgucaaccuccucgagaacucccacaacggcaagcucugccuccucaagggcaucgccccccuccagcucggcaacugcuccgucgccggcuggauccucggcaaccccgagugcgagcuccucaucuccaaggaguccugguccuacaucgucgagaagcccaaccccgagaacggcaccugcuaccccggccacuucgccgacuacgaggagcuccgcgagcagcucuccuccgucuccgccuucgagcgcuucgagaucuuccccaaggaguccuccuggcccaaccacaccgucaccggcgucuccgccuccugcucccacaacggcgaguccuccuucuaccgcaaccuccucuggcucaccggcaagaacggccucuaccccaaccucuccaaguccuacgccaacaacaaggagaaggagguccucguccucuggggcguccaccacccccccaacaucggcgaccagaaggcccucuaccacaccgagaacgccuacgucuccgucgucuccucccacuacucccgcaaguucacccccgagaucuccaagcgccccaagguccgcgaccaggagggccgcaucaacuacuacuggacccuccucgagcccggcgacaccaucaucuucgaggccaacggcaaccucaucgccccccgcuacgccuucgcccucucccgcggcuucggcuccggcaucaucaacuccaacacccccauggacaagugcgacgccaagugccagaccccccagggcgccaucaacuccucccuccccuuccagaacguccaccccgucaccaucggcgagugccccaaguacguccgcuccgccaagcuccgcauggucaccggccuccgcaacauccccuccauccagucccgcggccucuucggcgccaucgccggcuucaucgagggcggcuggaccggcauggucgacggcugguacggcuaccaccaccagaacgagcagggcuccggcuacgccgccgaccagaaguccacccagaacgccaucaacggcaucaccaacaaggucaacuccgucaucgagaagaugaacacccaguucaccgccgucggcaaggaguucaacaagcucgagcgccgcauggagaaccucaacaagaaggucgacgacggcuucaucgacaucuggaccuacaacgccgagcuccucguccuccucgagaacgagcgcacccucgacuuccacgacuccaacgucaagaaccucuacgagaaggucaagucccagcucaagaacaacgccaaggagaucggcaacggcugcuucgaguucuaccacaagugcaacgacgagugcauggaguccgucaagaacggcaccuacgacuaccccaaguacuccgaggaguccaagcucaaccgcgagaagaucgacggcgucaagcucgaguccaugggcgucuaccagauccucgccaucuacuccaccgucgccuccucccucguccuccucgucucccucggcgccaucuccuucuggaugugcuccaacggcucccuccagugccgcaucugcaucuga

SEQ ID NO: 98544 - RNA, 1701 nt, Artificial Sequence; identical to SEQ ID NO: 98374
  derived and/or modified CDS sequence (opt2) from hemagglutinin__InfluenzaA__ACK99421

SEQ ID NO: 98545 - RNA, 1689 nt, Artificial Sequence
  derived and/or modified CDS sequence (opt2) from hemagglutinin__InfluenzaA__ACK99432
auggccaucaucuaccucauccuccucuucaccgccguccgcggcgaccagaucugcaucggcuaccacgccaacaacuccaccgagaagaucgacaccauccucgagcgcaacgucaccgucacccacgccaaggacauccucgagaagacccacaacggcaagcucugcaagcucaacggcauccccccccucgagcucggcgacugcuccaucgccggcuggcuccucggcaaccccgagugcgaccgccuccuccgcguccccgagugguccuacaucauggagaaggagaacccccgcuacucccucugcuaccccggcuccuucaacgacuacgaggagcucaagcaccuccucuccuccgucaagcacuucgagaaggucaagauccuccccaaggaccgcuggacccagcacaccaccaccggcggcuccauggccugcgccgucuccggcaagcccuccuucuuccgcaacauggucuggcucaccaccaagggccccaacuaccccgucgcccagggcuccuacaacaacaccuccggcgagcagaugcucaucaucuggggcguccaccaccccaacgacgaggccgagcagcgcgcccucuaccagaaggucggcaccuacgucuccgccuccaccuccacccucuacaagcgcuccauccccgagaucgccgcccgccccaaggucaacggccucggcucccgcauggaguucuccuggacccuccucgacaugugggacaccaucaacuucgaguccaccggcaaccucgucgcccccgaguacggcuucaagaucuccaagcgcggcuccuccggcaucaugaagaccgagggcacccucgagaacugcgagaccaagugccagaccccccucggcgccaucaacaccacccuccccuuccacaacguccacccccucaccaucggcgagugccccaaguacgucaaguccgagaagcucguccucgccaccggccuccgcaacgucccccagaucgagucccgcggccucuucggcgccaucgccggcuucaucgagggcggcuggcagggcauggucgacggcugguacggcuaccaccacuccaacgaccagggcuccggcuacgccgccgacaaggaguccacccagaaggccuucgacggcaucaccaacaaggucaacuccgucaucgagaagaugaacacccaguucgaggccgucggcaaggaguucuccaaccucgagaagcgccucgagaaccucaacaagaagauggaggacggcuuccucgacgucuggaccuacaacgccgagcuccucguccucauggagaacgagcgcacccucgacuuccacgacuccaacgucaagaaccucuacgacaagguccgcaugcagcuccgcgacaacgucaaggagcucggcaacggcugcuucgaguucuaccacaagugcgacaacgagugcauggacuccgucaagaacggcaccuacgacuaccccaaguacgaggaggaguccaagcucaaccgcaacgagaucaagggcgucaagcucuccuccaugggcgucuaccagauccucgccaucuacgccaccgucgccggcucccucucccucgccaucaugauggccggcaucuccuucuggaugugcuccaacggcucccuccagugccgcaucugcaucuga

SEQ ID NO: 98546 - RNA, 1701 nt, Artificial Sequence
  derived and/or modified CDS sequence (opt2) from hemagglutinin__InfluenzaA__ACK99443
augaaggccaagcuccucguccuccucugcgccuucaccgccaccgacgccgacaccaucugcaucggcuaccacgccaacaacuccaccgacaccgucgacaccguccucgagaagaacgucaccgucacccacuccgucaaccuccucgaggacucccacaacggcaagcucugccgccucaagggcaucgccccccuccagcucggcaacugcuccaucgccggcuggauccucggcaaccccgagugcgagucccucuucuccaaggaguccugguccuacaucgccgagacccccaacuccgagaacggcaccugcuaccccggcuacuucgccgacuacgaggagcuccgcgagcagcucuccuccgucuccuccuucgagcgcuucgagaucuuccccaaggaguccuccuggcccaaccacaccgucaccaagggcgucaccgccgccugcucccacaacggcaaguccuccuucuaccgcaaccuccucuggcucaccgagaagaacggccucuaccccaaccucuccaaguccuacgucaacaacaaggagaaggagguccucguccucuggggcguccaccaccccuccaacaucggcgaccagcgcgccaucuaccacaccgagaacgccuacgucuccgucgucuccucccacuacucccgccgcuucacccccgagaucgccaagcgccccaagguccgcggccaggagggccgcaucaacuacuacuggacccuccucgagcccggcgacaccaucaucuucgaggccaacggcaaccucaucgcccccugguacgccuucgcccucucccgcggcuucggcuccggcaucaucaccuccaacgccuccauggacgagugcgacgccaagugccagaccccccagggcgccaucaacuccucccuccccuuccagaacguccaccccgucaccaucggcgagugccccaaguacguccgcuccaccaagcuccgcauggucaccggccuccgcaacauccccuccguccagucccgcggccucuucggcgccaucgccggcuucaucgagggcggcuggaccggcaugaucgacggcugguacggcuaccaccaccagaacgagcagggcuccggcuacgccgccgaccagaaguccacccagaacgccaucaacggcaucaccaacaaggucaacuccgucaucgagaagaugaacacccaguucaccgccgucggcaaggaguucaacaagcucgagcgccgcauggagaaccucaacaagaaggucgacgacggcuuccucgacaucuggaccuacaacgccgagcuccucguccuccucgagaacgagcgcacccucgacuuccacgacuccaacgucaagaaccucuacgagaaggucaagucccagcucaagaacaacgccaaggagaucggcaacggcugcuucgaguucuaccacaagugcaacaacgagugcauggaguccgucaagaacggcaccuacgacuaccccaaguacuccgaggaguccaagcucaaccgcgagaagaucgacggcgucaagcucgaguccaugggcgucuaccagauccucgccaucuacuccaccgucgccuccucccucguccuccucgucucccucggcgccaucuccuucuggaugugcuccaacggcucccuccagugccgcaucugcaucuga

SEQ ID NO: 98547 - RNA, 1701 nt, Artificial Sequence
  derived and/or modified CDS sequence (opt2) from hemagglutinin__InfluenzaA__ACK99465
augaaggccaagcuccucguccuccucugcgccuucaccgccaccuacgccgacaccaucugcaucggcuaccacgccaacaacuccaccgacaccgucgacaccguccucgagaagaacgucaccgucacccacuccgucaaccuccucgaggacucccacaacggcaagcucugccgccucaagggcaccgccccccuccagcucggcaacugcuccgucgccggcuggauccucggcaaccccgagugcgagucccucuucuccaaggaguccugguccuacaucgccgagaagcccaaccccgagaacggcaccugcuaccccggcuacuucgccgacuacgaggagcuccgcgagcagcucuccuccgucuccuccuucgagcgcuucgagaucuuccccaaggaguccuccuggcccaaccacaccgucaccaagggcgucaccgccuccugcucccacaacggcaaguccuccuucuacaagaaccuccucuggcucaccaagaagaacggccucuaccccaaccucuccaaguccuacgucaacaacaaggagaaggagguccucguccucuggggcguccaccaccccuccaacaucggcgaccagcgcgccaucuaccacaccgagaacgccuacgucuccgucgucuccucccacuacucccgccgcuucacccccgagaucgccaagcgccccaagguccgcgaccaggagggccgcaucaacuacuacuggacccuccucgagcccggcgacaccaucaucuucgaggccaacggcaaccucaucgcccccugguacgccuucgcccucucccgcggcuucggcuccggcaucaucaccuccaacgccuccaugggcgagugcgacgccaagugccagaccccccagggcgccaucaacuccucccuccccuuccagaacguccaccccgucaccaucggcgagugccccaaguacguccgcuccaccaagcuccgcauggucaccggccuccgcaacauccccuccauccagucccgcggccucuucggcgccaucgccggcuucaucgagggcggcuggaccggcaugaucgacggcugguacggcuaccaccaccagaacgagcagggcuccggcuacgccgccgacaagaaguccacccagaacgccaucgacggcaucaccaacaaggucaacuccgucaucgagaagaugaacacccaguucaccgccgucggcaaggaguucaacaagcucgagcgccgcauggagaaccucaacaagaaggucgacgacggcuuccucgacaucuggaccuacaacgccgagcuccucguccuccucgagaacgagcgcacccucgacuuccacgacuccaacgucaagaaccucuacgagaaggucaagaaccagcucaagaacaacgccaaggagaucggcaacggcugcuucgaguucuaccacaagugcaacaacgagugcauggaguccgucaagaacggcaccuacgacuaccccaaguacuccgaggaguccaagcucaagcgcgagaagaucgacggcgucaagcucgaguccaugggcgucuaccagauccucgccaucuacuccaccgucgccuccucccucguccuccucgucucccucggcgccaucuccuucuggaugugcuccaacggcucccuccagugccgcaucugcaucuga

SEQ ID NO: 98548 - RNA, 1701 nt, Artificial Sequence
  derived and/or modified CDS sequence (opt2) from hemagglutinin__InfluenzaA__ACK99476
augaagaccaucaucgcccucuccuacauccucugcauggucuucgcccagaagcuccccggcaacgacaacuccaccgccacccucugccucggccaccacgccguccccaacggcacccucgucaagaccaucaccaacgaccagaucgaggucaccaacgccaccgagcucguccaguccuccuccaccggccgcaucugcgacuccccccaccgcauccucgacggcaagaacugcacccucaucgacgcccuccucggcgacccccacugcgacgacuuccagaacaaggagugggaccucuucgucgagcgcuccaaggccuacuccaacugcuaccccuacgacguccccgacuacgccucccuccgcucccucgucgccuccuccggcacccucgaguucaacaacgaguccuucaacuggaccggcgucgcccagaacggcaccuccuacgccugcaagcgccgcuccgucaaguccuucuucucccgccucaacuggcuccacaagcucgaguacaaguaccccgcccucaacgucaccaugcccaacaacgacaaguucgacaagcucuacaucuggggcguccaccacccccgcaccgacuccgaccagaccucccucuacguccaggccuccggccgcgucaccgucuccaccaagcgcucccagcagaccgucauccccaacaucggcuccucccccuggguccgcggcgucuccucccgcaucuccaucuacuggaccaucgucaagcccggcgacauccuccucaucaacuccaccggcaaccucaucgccccccgcggcuacuucaagauccgcuccggcaaguccuccaucaugcgcuccgacgcccccaucggcaacugcaacuccgagugcaucacccccaacggcuccauccccaacgacaagcccuuccagaacgucaaccgcaucaccuacggcgccugcccccgcuacgucaagcagaacacccucaagcucgccaccggcaugcgcaacguccccgagaagcagacccgcggcaucuucggcgccaucgccggcuucaucgagaacggcugggagggcauggucgacggcugguacggcuuccgccaccagaacuccgagggcaccggccaggccgccgaccucaaguccacccaggccgccaucaaccagaucaacggcaagcucaaccgccucaucgagaagaccaacgagaaguuccaccagaucgagaaggaguucuccgaggucgagggccgcauccaggaccucgagaaguacgucgaggacaccaagaucgaccucugguccuacaacgccgagcuccucgucgcccucgagaaccagcacaccaucgaccucaccgacuccgagaugaacaagcucuucgagcgcacccgcaagcagcuccgcgagaacgccgaggacaugggcaacggcugcuucaagaucuaccacaagugcgacaacgccugcaucggcuccauccgcaacggcaccuacgaccacgacgucuaccgcgacgaggcccucaacaaccgcuuccagaucaagggcgucgagcucaaguccggcuacaaggacuggauccucuggaucuccuucgccaucuccugcuuccuccucugcgucguccuccucggcuucaucaugugggccugccagaagggcaacauccgcugcaacaucugcaucuga

SEQ ID NO: 98549 - RNA, 1698 nt, Artificial Sequence; identical to SEQ ID NO: 97950
  derived and/or modified CDS sequence (opt2) from hemagglutinin__InfluenzaA__ACL12063

SEQ ID NO: 98550 - RNA, 1701 nt, Artificial Sequence
  derived and/or modified CDS sequence (opt2) from hemagglutinin__InfluenzaA__ACL12129
augaagaccaucaucgcccucuccuacauccucugccucgucuucgcccagaagcuccccggcaacgacaacuccaccgccacccucugccucggccaccacgccguccccaacggcacccucgucaagaccaucaccaacgaccagaucgaggucaccaacgccaccgagcucguccaguccuccuccaccggccgcaucugcggcuccccccaccgcauccucgacggcaagaacugcacccucaucgacgcccuccucggcgacccccacugcgacggcuuccagaacaaggagugggaccucuucgucgagcgcuccaaggccuacuccaacugcuaccccuacgacguccccgacuacgccucccuccgcucccucgucgccuccuccggcacccucgaguucaucaacgaggacuucaacuggaccggcgucgcccaggacggcggcuccuacgccugcaagcgcggcuccgucaacuccuucuucucccgccucaacuggcuccacaagcucgaguacaaguaccccgcccucaacgucaccaugcccaacaacggcaaguucgacaagcucuacaucuggggcguccaccaccccuccaccgacuccgaccagaccucccucuacguccgcgccuccggccgcgucaccgucuccaccaagcgcucccagcagaccgucacccccaacaucggcucccgccccuggguccgcggccaguccucccgcaucuccaucuacuggaccaucgucaagcccggcgacauccuccucaucgacuccaccggcaaccucaucgccccccgcggcuacuucaagauccgcaacggcaaguccuccaucaugcgcuccgacgcccccaucggcaacugcuccuccgagugcaucacccccaacggcuccauccccaacgacaagcccuuccagaacgucaaccgcaucaccuacggcgccugcccccgcuacgucaagcagaacacccucaagcucgccaccggcaugcgcaacguccccgagaagcagacccgcggcaucuucggcgccaucgccggcuucaucgagaacggcugggagggcauggucgacggcugguacggcuuccgccaccagaacuccgagggcaccggccaggccgccgaccucaaguccacccaggccgccaucgaccagaucaacggcaagcucaaccgccucaucgagaagaccaacgagaaguuccagcagaucgagaaggaguucuccgaggucgagggccgcauccaggaccucgagaaguacgucgaggacaccaagaucgaccucugguccuacaacgccgagcuccucgucgcccucgagaaccagcacaccaucgaccucaccgacuccgagaugaacaagcucuucgagaagacccgcaagcagcuccgcgagaacgccgaggacaugggcaacggcugcuucaagaucuaccacaagugcgacaacgccugcaucggcuccauccgcaacggcaccuacgaccacgacgucuaccgcgacgaggcccucaacaaccgcuuccagaucaagggcgucgagcucaaguccggcuacaaggacuggauccucuggaucuccuucgccaucuccugcuuccuccucugcgucguccuccucggcuucaucaugugggccugccagaagggcaacauccgcugcaacaucugcaucuga

SEQ ID NO: 98551 - RNA, 1701 nt, Artificial Sequence; identical to SEQ ID NO: 98392
  derived and/or modified CDS sequence (opt2) from hemagglutinin__InfluenzaA__ACL12140

SEQ ID NO: 98552 - RNA, 1698 nt, Artificial Sequence; identical to SEQ ID NO: 98476
  derived and/or modified CDS sequence (opt2) from hemagglutinin__InfluenzaA__ACL12151

SEQ ID NO: 98553 - RNA, 1701 nt, Artificial Sequence; identical to SEQ ID NO: 98470
  derived and/or modified CDS sequence (opt2) from hemagglutinin__InfluenzaA__ACL12162

SEQ ID NO: 98554 - RNA, 1701 nt, Artificial Sequence
  derived and/or modified CDS sequence (opt2) from hemagglutinin__InfluenzaA__ACL12173
augaagaccaucaucgcccucuccuacauccucugccucgucuucgcccagaagcuccccggcaacgacaacuccaccgccacccucugccucggccaccacgccguccccaacggcaccaucgucaagaccaucaccaacgaccagaucgaggucaccaacgccaccgagcucguccaguccuccuccaccggcgagaucugcgacuccccccaccagauccucgacggcgagaacugcacccucaucgacgcccuccucggcgacccccagugcgacggcuuccagaacaagaagugggaccucuucgucgagcgcuccaaggccuacuccaacugcuaccccuacgacguccccgacuacgccucccuccgcucccucgucgccuccuccggcacccucgaguucaacaacgaguccuucaacuggaccggcgucacccagaacggcaccuccuccgccugcauccgccgcuccaacaacuccuucuucucccgccucaacuggcucacccaccucaaguucaaguaccccgcccucaacgucaccaugcccaacaacgagcaguucgacaagcucuacaucuggggcguccaccaccccggcaccgacaacgaccagaucuuccucuacgcccaggccuccggccgcaucaccgucuccaccaagcgcucccagcagaccgucauccccaacaucggcucccgcccccgcguccgcaacauccccucccgcaucuccaucuacuggaccaucgucaagcccggcgacauccuccucaucaacuccaccggcaaccucaucgccccccgcggcuacuucaagauccgcuccggcaaguccuccaucaugcgcuccgacgcccccaucggcaagugcaacuccgagugcaucacccccaacggcuccauccccaacgacaagcccuuccagaacgucaaccgcaucaccuacggcgccugcccccgcuacgucaagcagaacacccucaagcucgccaccggcaugcgcaacguccccgagaagcagacccgcggcaucuucggcgccaucgccggcuucaucgagaacggcugggagggcauggucgacggcugguacggcuuccgccaccagaacuccgagggccgcggccaggccgccgaccucaaguccacccaggccgccaucaaccagaucaacggcaagcucaaccgccucaucggcaagaccaacgagaaguuccaccagaucgagaaggaguucuccgaggucgagggccgcauccaggaccucgagaaguacgucgaggacaccaagaucgaccucugguccuacaacgccgagcuccucgucgcccucgagaaccagcacaccaucgaccucaccgacuccgagaugaacaagcucuucgagaagaccaagaagcagcuccgcgagaacgccgaggacaugggcaacggcugcuucaagaucuaccacaagugcgacaacgccugcaucggcuccauccgcaacggcaccuacgaccacgacgucuaccgcgacgaggcccucaacaaccgcuuccagaucaagggcgucgagcucaaguccggcuacaaggacuggauccucuggaucuccuucgccaucuccugcuuccuccucugcgucgcccuccucggcuucaucaugugggccugccagaagggcaacauccgcugcaacaucugcaucuga

SEQ ID NO: 98555 - RNA, 1701 nt, Artificial Sequence
  derived and/or modified CDS sequence (opt2) from hemagglutinin__InfluenzaA__ACL12184
augaagaccaucaucgcccucuccuacauccucugccucgucuucgcccagaagcuccccggcaacgacaacuccaccgccacccucugccucggccaccacgccguccccaacggcaccaucgucaagaccaucaccaacgaccagaucgaggucaccaacgccaccgagcucguccaguccuccuccaccggcgagaucugcgacuccccccaccagauccucgacggcgagaacugcacccucaucgacgcccuccucggcgacccccagugcgacggcuuccagaacaagaagugggaccucuucgucgagcgcuccaaggccuacuccaacugcuaccccuacgacguccccgacuacgccucccuccgcucccucgucgccuccuccggcacccucgaguucaacaacgaguccuucaacuggaccggcgucacccagaacggcaccuccuccgccugcauccgccgcuccaacaacuccuucuucucccgccucaacuggcucacccaccucaaguucaaguaccccgcccucaacgucaccaugcccaacaacgagcaguucgacaagcucuacaucuggggcguccaccaccccggcaccgacaacgaccagaucuuccucuacgcccaggccuccggccgcaucaccgucuccaccaagcgcucccagcagaccgucauccccaacaucggcucccgcccccgcguccgcaacauccccucccgcaucuccaucuacuggaccaucgucaagcccggcgacauccuccucaucaacuccaccggcaaccucaucgccccccgcggcuacuucaagauccgcuccggcaaguccuccaucaugcgcuccgacgcccccaucggcaagugcaacuccgagugcaucacccccaacggcuccauccccaacgacaagcccuuccagaacgucaaccgcaucaccuacggcgccugcccccgcuacgucaagcagaacacccucaagcucgccaccggcaugcgcaacguccccgagaagcagacccgcggcaucuucggcgccaucgccggcuucaucgagaacggcugggagggcauggucgacggcugguacggcuuccgccaccagaacuccgagggccgcggccaggccgccgaccucaaguccacccaggccgccaucgaccagaucaacggcaagcucaaccgccucaucggcaagaccaacgagaaguuccaccagaucgagaaggaguucuccgaggucgagggccgcauccaggaccucgagaaguacgucgaggacaccaagaucgaccucugguccuacaacgccgagcuccucgucgcccucgagaaccagcacaccaucgaccucaccgacuccgagaugaacaagcucuucgagaagaccaagaagcagcuccgcgagaacgccgaggacaugggcaacggcugcuucaagaucuaccacaagugcgacaacgccugcaucggcuccauccgcaacggcaccuacaaccacgacgucuaccgcgacgaggcccucaacaaccgcuuccagaucaagggcgucgagcucaaguccggcuacaaggacuggauccucuggaucuccuucgccaucuccugcuuccuccucugcgucgcccuccucggcuucaucaugugggccugccagaagggcaacauccgcugcaacaucugcaucuga

SEQ ID NO: 98556 - RNA, 1701 nt, Artificial Sequence; identical to SEQ ID NO: 98470
  derived and/or modified CDS sequence (opt2) from hemagglutinin__InfluenzaA__ACL12195

SEQ ID NO: 98557 - RNA, 1701 nt, Artificial Sequence
  derived and/or modified CDS sequence (opt2) from hemagglutinin__InfluenzaA__ACL12217
augaagaccaucaucgcccucuccuacauccucugccucgucuucgcccagaagcuccccggcaacgacaacuccaccgccacccucugccucggccaccacgccguccccaacggcaccaucgucaagaccaucaccaacgaccagaucgaggucaccaacgccaccgagcucguccaguccuccuccaccggcgagaucugcgacuccccccaccagauccucgacggcgagaacugcacccucaucgacgcccuccucggcgacccccagugcgacggcuuccagaacaagaagugggaccucuucgucgagcgcuccaaggccuacuccaacugcuaccccuacgacguccccgacuacgccucccuccgcucccucgucgccuccuccggcacccucgaguucaacaacgaguccuucaacuggaccggcgucacccagaacggcaccuccuccgccugcauccgccgcuccaacaacuccuucuucucccgccucaacuggcucacccaccucaaguucaaguaccccgcccucaacgucaccaugcccaacaacgagcaguucgacaagcucuacaucuggggcguccaccaccccggcaccgacaacgaccagaucuuccucuacgcccaggccuccggccgcaucaccgucuccaccaagcgcucccagcagaccgucauccccaacaucggcucccgcccccgcguccgcaacauccccucccgcaucuccaucuacuggaccaucgucaagcccggcgacguccuccucaucaacuccaccggcaaccucaucgccccccgcggcuacuucaagauccgcuccggcaaguccuccaucaugcgcuccgacgcccccaucggcaagugcaacuccgagugcaucacccccaacggcuccauccccaacgacaagcccuuccagaacgucaaccgcaucaccuacggcgccugcccccgcuacgucaagcagaacacccucaagcucgccaccggcaugcgcaacguccccgagaagcagacccgcggcaucuucggcgccaucgccggcuucaucgagaacggcugggagggcauggucgacggcugguacggcuuccgccaccagaacuccgagggccgcggccaggccgccgaccucaaguccacccaggccgccaucgaccagaucaacggcaagcucaaccgccucaucggcaagaccaacgagaaguuccaccagaucgagaaggaguucuccgaggucgagggccgcauccaggaccucgagaaguacgucgaggacaccaagaucgaccucugguccuacaacgccgagcuccucgucgcccucgagaaccagcacaccaucgaccucaccgacuccgagaugaacaagcucuucgagaagaccaagaagcagcuccgcgagaacgccgaggacaugggcaacggcugcuucaagaucuaccacaagugcgacaacgccugcaucggcuccauccgcaacggcaccuacgaccacgacgucuaccgcgacgaggcccucaacaaccgcuuccagaucaagggcgucgagcucaaguccggcuacaaggacuggauccucuggaucuccuucgccaucuccugcuuccuccucugcgucgcccuccucggcuucaucaugugggccugccagaagggcaacauccgcugcaacaucugcaucuga

SEQ ID NO: 98558 - RNA, 1701 nt, Artificial Sequence; identical to SEQ ID NO: 98470
  derived and/or modified CDS sequence (opt2) from hemagglutinin__InfluenzaA__ACL12228

SEQ ID NO: 98559 - RNA, 1701 nt, Artificial Sequence; identical to SEQ ID NO: 98470
  derived and/or modified CDS sequence (opt2) from hemagglutinin__InfluenzaA__ACL12239

SEQ ID NO: 98560 - RNA, 1701 nt, Artificial Sequence
  derived and/or modified CDS sequence (opt2) from hemagglutinin__InfluenzaA__ACL12250
augaagaccaucaucgcccucuccuacauccucugccucgucuucgcccagaaguuccccggcaacgacaacuccaccgccacccucugccucggccaccacgccguccccaacggcaccaucgucaagaccaucaccaacgaccagaucgaggucaccaacgccaccgagcucguccaguccuccuccaccggcgagaucugcgacuccccccaccagauccucgacggcgagaacugcacccucaucgacgcccuccucggcgacccccagugcgacggcuuccagaacaagaacugggaccucuucgucgagcgcuccaaggccuacuccaacugcuaccccuacgacguccccgacuacgucucccuccgcucccucgucgccuccuccggcacccucgaguucaacaacgaguccuucaacuggaccggcgucacccagaacggcaccuccuccgccugcauccgccgcuccaacaacuccuucuucucccgccucaacuggcucacccacuccaaguucaaguaccccgcccucaacgucaccaugcccaacaacgagaacuucgacaagcucuacaucuggggcguccaccaccccggcaccgacaacgaccagaucuuccucuacgcccaggccuccggccgcaucaccgucuccaccaagcgcucccagcagaccgucauccccaacaucggcucccgcccccgcguccgcaacauccccucccgcaucuccaucuacuggaccaucgucaagcccggcgacauccuccucaucaacuccaccggcaaccucaucgccccccgcggcuacuucaagauccgcuccggcaaguccuccaucaugcgcuccgacgcccccaucggcaagugcaacuccgagugcaucacccccaacggcuccauccccaacgacaagcccuuccagaacgucaaccgcaucaccuacggcgccugcccccgcuacgucaagcagaacacccucaagcucgccaccggcaugcgcaacguccccgagaagcagacccgcggcaucuucggcgccaucgccggcuucaucgagaacggcugggagggcauggucgacggcugguacggcuuccgccaccagaacuccgagggcaucggccaggccgccgaccucaaguccacccaggccgccaucgaccagaucaacggcaagcucaaccgccucaucggcaagaccaacgagaaguuccaccagaucgagaaggaguucuccgaggucgagggccgcauccaggaccucgagaaguacgucgaggacaccaagaucgaccucugguccuacaacgccgagcuccucgucgcccucgagaaccagcacaccaucgaccucaccgacuccgagaugaacaagcucuucgagaagaccaagaagcagcuccgcgagaacgccgaggacaugggcaacggcugcuucaagaucuaccacaagugcgacaacgccugcaucggcuccauccgcaacggcaccuacgaccacgacgucuaccgcgacgaggcccucaacaaccgcuuccagaucaagggcgucgagcucaaguccggcuacaaggacuggauccucuggaucuccuucgccaucuccugcuuccuccucugcaucgcccuccucggcuucaucaugugggccugccagaagggcaacauccgcugcaacaucugcaucuga

SEQ ID NO: 98561 - RNA, 1701 nt, Artificial Sequence
  derived and/or modified CDS sequence (opt2) from hemagglutinin__InfluenzaA__ACL12261
augaaggccaagcuccucguccuccucugcgccuucaccgccaccgacgccgacaccaucugcaucggcuaccacgccaacaacuccaccgacaccgucgacaccguccucgagaagaacgucaccgucacccacuccgucaaccuccucgaggacucccacaacggcaagcucugccgccucaagggcaucgccccccuccagcucggcaacugcuccaucgccggcuggauccucggcaaccccgagugcgagucccucuucuccaagaaguccugguccuacaucgccgagacccccaacuccgagaacggcaccugcuaccccggcuacuucgccgacuacgaggagcuccgcgagcagcucuccuccgucuccuccuucgagcgcuucgagaucuuccccaaggaguccuccuggcccaaccacaccgucaccaagggcgucaccgccgccugcucccacaagggccgcuccuccuucuaccgcaaccuccucuggcucaccgagaagaacggccucuaccccaaccucuccaaguccuacgucaacaacaaggagaaggagguccucguccucuggggcguccaccaccccuccaacaucggcgaccagcgcgccaucuaccacaccgagaacgccuacgucuccgucgucuccucccacuacaaccgccgcuucacccccgagaucgccaagcgccccaagguccgcggccaggagggccgcaucaacuacuacuggacccuccucgagcccggcgacaccaucaucuucgaggccaacggcaaccucaucgcccccugguacgccuucgcccucucccgcggcuucggcuccggcaucaucaccuccaacgccuccauggacgagugcgacgccaagugccagaccccccagggcgccaucaacuccucccuccccuuccagaacguccaccccgucaccaucggcgagugccccaaguacguccgcuccaccaagcuccgcauggucaccggccuccgcaacauccccuccauccagucccgcggccucuucggcgccaucgccggcuucaucgagggcggcuggaccggcaugaucgacggcugguacggcuaccaccaccagaacgagcagggcuccggcuacgccgccgaccagaaguccacccagaacgccaucaacggcaucaccaacaaggucaacuccgucaucgagaagaugaacacccaguucaccgccgucggcaaggaguucaacaagcucgagaagcgcauggagaaccucaacaagaaggucgacgacggcuuccucgacaucuggaccuacaacgccgagcuccucguccuccucgagaacgagcgcacccucgacuuccacgacuccaacgucaagaaccucuacgagaaggucaagaaccagcucaagaacaacgccaaggagaucggcaacggcugcuucgaguucuaccacaagugcaacaacgagugcauggaguccgucaagaacggcaccuacgacuaccccaaguacuccgaggaguccaagcucaaccgcgagaagaucgacggcgucaagcucgaguccaugggcgucuaccagauccucgccaucuacuccaccgucgccuccucccucguccuccucgucucccucggcgccaucuccuucuggaugugcuccaacggcucccuccagugccgcaucugcaucuga

SEQ ID NO: 98562 - RNA, 1689 nt, Artificial Sequence
  derived and/or modified CDS sequence (opt2) from hemagglutinin__InfluenzaA__ACN32272
auggccaucaucuaccucauccuccucuucaccgccguccgcggcgaccagaucugcaucggcuaccacgccaacaacuccaccgagaagaucgacaccauccucgagcgcaacgucaccgucacccacgccaaggacauccucgagaagacccacaacggcaagcucugcaagcucaacggcauccccccccucgagcucggcgacugcuccaucgccggcuggcuccucggcaaccccgagugcgaccgccuccuccgcguccccgagugguccuacaucauggagaaggagaacccccgcuacucccucugcuaccccggcuccuucaacgacuacgaggagcucaagcaccuccucuccuccgucaagcacuucgagaaggucaagauccuccccaaggaccgcuggacccagcacaccaccaccggcggcuccauggccugcgccgucuccggcaagcccuccuucuuccgcaacauggucuggcucaccaccaagggccccaacuaccccgucgcccagggcuccuacaacaacaccuccggcgagcagaugcucaucaucuggggcguccaccaccccaacgacgaggccgagcagcgcgcccucuaccagaacgucggcaccuacgucuccgccuccaccuccacccucuacaagcgcuccauccccgagaucgccgcccgccccaaggucaacggccucggcucccgcauggaguucuccuggacccuccucgacaugugggacaccaucaacuucgaguccaccggcaaccucgucgcccccgaguacggcuucaagaucuccaagcgcggcuccuccggcaucaugaagaccgagggcacccucgagaacugcgagaccaagugccagaccccccucggcgccaucaacaccacccuccccuuccacaacguccacccccucaccaucggcgagugccccaaguacgucaaguccgagaagcucguccucgccaccggccuccgcaacgucccccagaucgagucccgcggccucuucggcgccaucgccggcuucaucgagggcggcuggcagggcauggucgacggcugguacggcuaccaccacuccaacgaccagggcuccggcuacgccgccgacaaggaguccacccagaaggccuucgacggcaucaccaacaaggucaacuccgucaucgagaagaugaacacccaguucgaggccgucggcaaggaguucuccaaccucgagaagcgccucgagaaccucaacaagaagauggaggacggcuuccucgacgucuggaccuacaacgccgagcuccucguccucauggagaacgagcgcacccucgacuuccacgacuccaacgucaagaaccucuacgacaagguccgcaugcagcuccgcgacaacgucaaggagcucggcaacggcugcuucgaguucuaccacaagugcgacaacgagugcauggacuccgucaagaacggcaccuacgacuaccccaaguacgaggaggaguccaagcucaaccgcaacgagaucaagggcgucaagcucuccuccaugggcgucuaccagauccucgccaucuacgccaccgucgccggcucccucucccucgccaucaugauggccggcaucuccuucuggaugugcuccaacggcucccuccagugccgcaucugcaucuga

SEQ ID NO: 98563 - RNA, 1701 nt, Artificial Sequence
  derived and/or modified CDS sequence (opt2) from hemagglutinin__InfluenzaA__ACN32283
augaagaccaucaucgcccucuccuacauccucugccucgucuccgcccagaaguuccccggcaacgacaacuccaccgccacccucugccucggccaccacgccguccccaacggcaccaucgucaagaccaucaccaacgaccagaucgaggucaccaacgccaccgagcucguccaguccuccuccaccggcgagaucugcgacuccccccaccagauccucgacggcgagaacugcacccucaucgacgcccuccucggcgacccccagugcgacggcuuccagaacaagaagugggaccucuucgucgagcgcuccaaggccuacuccaacugcuaccccuacgacguccccgacuacgccucccuccgcucccucgucgccuccuccggcacccucgaguucaacaacgaguccuucaacuggaccggcgucacccagaacggcaccuccuccgccugcauccgccgcuccaacaacuccuucuucucccgccucaacuggcucacccaccucaaguucaaguaccccgcccucaacgucaccaugcccaacaacgaggaguucgacaagcucuacaucuggggcguccaccaccccggcaccgacaacgaccagaucuuccucuacgcccaggccuccggccgcaucaccgucuccaccaagcgcucccagcagaccgucauccccaacaucggcucccgcccccgcguccgcaacauccccucccgcaucuccaucuacuggaccaucgucaagcccggcgacauccuccucaucaacuccaccggcaaccucaucgccccccgcggcuacuucaagauccgcuccggcaaguccuccaucaugcgcuccgacgcccccaucggcaagugcaacuccgagugcaucacccccaacggcuccauccccaacgacaagcccuuccagaacgucaaccgcaucaccuacggcgccugcccccgcuacgucaagcagaacacccucaagcucgccaccggcaugcgcaacguccccgagaagcagacccgcggcaucuucggcgccaucgccggcuucaucgagaacggcugggagggcauggucgacggcugguacggcuuccgccaccagaacuccgagggcaucggccaggccgccgaccucaaguccacccaggccgccaucgaccagaucaacggcaagcucaaccgccucaucggcaagaccaacgagaaguuccaccagaucgagaaggaguucuccgaggucgagggccgcauccaggaccucgagaaguacgucgaggacaccaagaucgaccucugguccuacaacgccgagcuccucgucgcccucgagaaccagcacaccaucgaccucaccgacuccgagaugaacaagcucuucgagaagaccaagaagcagcuccgcgagaacgccgaggacaugggcaacggcugcuucaagaucuaccacaagugcgacaacgccugcaucggcuccauccgcaacggcaccuacgaccacgacgucuaccgcgacgaggcccucaacaaccgcuuccagaucaagggcgucgagcucaaguccggcuacaaggacuggauccucuggaucuccuucgccaucuccugcuuccuccucugcgucgcccuccucggcuucaucaugugggccugccagaagggcaacauccgcugcaacaucugcaucuga

SEQ ID NO: 98564 - RNA, 1701 nt, Artificial Sequence
  derived and/or modified CDS sequence (opt2) from hemagglutinin__InfluenzaA__ACN32474
augaagaccaucaucgcccucuccuacauccucugccucgucuccgcccagaagcuccccggcaacgacaacuccaccgccacccucugccucggccaccacgccguccccaacggcaccaucgucaagaccaucaccaacgaccagaucgaggucaccaacgccaccgagcucguccaguccuccuccaccggcgagaucugcgacuccccccaccagguccucgacggcgagaacugcacccucaucgacgcccuccucggcgacccccagugcgacggcuuccagaacaagaagugggaccucuucgucgagcgcuccaaggccuacuccaacugcuaccccuacgacguccccgacuacaccucccuccgcucccucgucgccuccuccggcacccucgaguucaacaacgaguccuucaacuggaccggcgucacccagaacggcaccuccuccgccugcauccgccgcuccaacaacuccuucuucucccgccucaacuggcucacccaccucaaguucaaguaccccgcccucaacaugaccaugcccaacaacgaggaguucgacaagcucuacaucuggggcguccaccaccccggcaccgacaacgaccagaucuuccucuacgcccaggccuccggccgcaucaccgucuccaccaagcgcucccagcagaccgucauccccaacaucggcucccgcccccgcguccgcaacauccccucccgcaucuccaucuacuggaccaucgucaagcccggcgacauccuccucaucaacuccaccggcaaccucaucgccccccgcggcuacuucaagauccgcuccggcaaguccuccaucaugcgcuccgacgcccccaucggcaagugcaacuccgagugcaucacccccaacggcuccauccccaacgacaagcccuuccagaacgucaaccgcaucaccuacggcgccugcccccgcuacgucaagcagaacacccucaagcucgccaccggcaugcgcaacguccccgagaagcagacccgcggcaucuucggcgccaucgccggcuucaucgagaacggcugggagggcauggucgacggcugguacggcuuccgccaccagaacuccgagggcaucggccaggccgccgaccucaaguccacccaggccgccaucgaccagaucaacggcaagcucaaccgccucaucggcaagaccaacgagaaguuccaccagaucgagaaggaguucuccgaggucgagggccgcauccaggaccucgagaaguacgucgaggacaccaagaucgaccucugguccuacaacgccgagcuccucgucgcccucgagaaccagcacaccaucgaccucaccgacuccgagaugaacaagcucuucgagaagaccaagaagcagcuccgcgagaacgccgaggacaugggcaacggcugcuucaagaucuaccacaagugcgacaacgccugcaucggcuccauccgcaacggcaccuacgaccacgaggucuaccgcgacgaggcccucaacaaccgcuuccagaucaagggcgucgagcucaaguccggcuacaaggacuggauccucuggaucuccuucgccaucuccugcuuccuccucugcgucgcccuccucggcuucaucaugugggccugccagaagggcaacauccgcugcaacaucugcaucuga

SEQ ID NO: 98565 - RNA, 1698 nt, Artificial Sequence; identical to SEQ ID NO: 98524
  derived and/or modified CDS sequence (opt2) from hemagglutinin__InfluenzaA__ACN32501

SEQ ID NO: 98566 - RNA, 1701 nt, Artificial Sequence
  derived and/or modified CDS sequence (opt2) from hemagglutinin__InfluenzaA__ACN32534
augaagaccaucaucgcccucuccuacauccucugccucgucuucgcccagaagcuccccggcaacgacaacuccaccgccacccucugccucggccaccacgccguccccaacggcacccucgucaagaccaucaccaacgaccagaucgaggucaccaacgccaccgagcucguccaguccuccuccaccggccgcaucugcgacuccccccaccagauccucgacggcgagaacugcacccucaucgacgcccuccucggcgacccccacugcgacggcuuccagaacaaggagugggaccucuucgucgagcgcuccaaggccuacuccaacugcuaccccuacgacguccccgacuacgucucccuccgcucccucgucgccuccuccggcacccucgaguucaacaacgaguccuucaacuggaccggcgucgcccagaacggcaccuccuccgccugcaagcgccgcuccgacaaguccuucuucucccgccucaacuggcuccaccagcucaaguacaaguaccccgcccucaacgucaccaugcccaacaacgagaaguucgacaagcucuacaucuggggcguccaccaccccggcaccgacuccgaccagaucucccucuacgcccaggccuccggccgcgucaccgucuccaccaagcgcucccagcagaccgucauccccaacaucggcuccggccccuggguccgcggcgucuccucccgcaucuccaucuacuggaccaucgucaagcccggcgacauccuccucaucaacuccaccggcaaccucaucgccccccgcggcuacuucaagauccgcuccggcaaguccuccaucaugcgcuccgacgcccccaucggcaagugcaacuccgagugcaucacccccaacggcuccauccccaacggcaagcccuuccagaacgucaaccgcaucaccuacggcgccugcccccgcuacgucaagcagaacacccucaagcucgccaccggcaugcgcaacguccccgagaagcagacccgcggcaucuucggcgccaucgccggcuucaucgagaacggcugggagggcaugauggacggcugguacggcuuccgccaccagaacuccgagggcaccggccaggccgccgaccucaaguccacccaggccgccaucaaccagaucaacggcaagcucaaccgccucaucgagaagaccaacgagaaguuccaccagaucgagaaggaguucuccgaggucgagggccgcauccaggaccucgagaaguacgucgaggacaccaagaucgaccucugguccuacaacgccgagcuccucgucgcccucgagaaccagcacaccaucgaccucaccgacuccgagaugaacaagcucuucgagcgcaccaagaagcagcuccgcgagaacgccgaggacaugggcaacggcugcuucaagaucuaccacaagugcgacaacgccugcaucggcuccauccgcaacggcaccuacgaccacgacgucuaccgcgacgaggcccucaacaaccgcuuccagaucaagggcgucgagcucaaguccggcuacaaggacuggauccucuggaucuccuucgccaucuccugcuuccuccucugcaucguccuccucggcuucaucaugugggccugccagaagggcaacauccgcugcaacaucugcaucuga

SEQ ID NO: 98567 - RNA, 1701 nt, Artificial Sequence
  derived and/or modified CDS sequence (opt2) from hemagglutinin__InfluenzaA__ACN32545
augaagaccaucaucgcccucuccuacauccucugccucgucuucgcccagaagcuccccggcaacgacaacuccaccgccacccucugccucggccaccacgccguccccaacggcaccaucgucaagaccaucaccaacgaccagaucgaggucaccaacgccaccgagcucguccaguccuccuccaccggcgagaucugcgacuccccccaccagauccucgacggcgagaacugcacccucaucgacgcccuccucggcgacccccacugcgacggcuuccagaacaagaagugggaccucuucgucgagcgcuccaaggccuacuccaacugcuaccccuacgacguccccgacuacgccucccuccgcucccucaucgccuccuccggcacccucgaguucaacaacgaguccuucaacuggaccggcgucacccagaacggcaccuccuccgccugcauccgccgcuccaacaacuccuucuucucccgccucaacuggcucacccaccucaaguucaaguaccccgcccucaacgucaccaugcccaacaacgagaaguucgacaagcucuacaucuggggcguccaccaccccggcaccgacaacgaccagaucuuccucuacgcccaggccuccggccgcaucaccgucuccaccaagcgcucccagcagaccgucauccccaacaucggcucccgcccccgcguccgcaacauccccucccgcaucuccaucuacuggaccaucgucaagcccggcgacauccuccucaucaacuccaccggcaaccucaucgccccccgcggcuacuucaagauccgcuccggcaaguccuccaucaugcgcuccgacgcccccaucggcaagugcaacuccgagugcaucacccccaacggcuccauccccaacgacaagcccuuccagaacgucaaccgcaucaccuacggcgccugcccccgcuacgucaagcagaacacccucaagcucgccaccggcaugcgcaacguccccgagaagcagacccgcggcaucuucggcgccaucgccggcuucaucgagaacggcugggagggcauggucgacggcugguacggcuuccgccaccagaacuccgagggcaucggccaggccgccgaccucaaguccacccaggccgccaucgaccagaucaacggcaagcucaaccgccucaucggcaagaccaacgagaaguuccaccagaucgagaaggaguucuccgaggucgagggccgcauccaggaccucgagaaguacgucgaggacaccaagaucgaccucugguccuacaacgccgagcuccucgucgcccucgagaaccagcacaccaucgaccucaccgacuccgagaugaacaagcucuucgagaagaccaagaagcagcuccgcgagaacgccgaggacaugggcaacggcugcuucaagaucuaccacaagugcgacaacgccugcaucggcuccauccgcaacggcaccuacgaccacgacgucuaccgcgacgaggcccucaacaaccgcuuccagaucaagggcgucgagcucaaguccggcuacaaggacuggauccucuggaucuccuucgccaucuccugcuuccuccucugcgucgcccuccucggcuucaucaugugggccugccagaagggcaacauccgcugcaacaucugcaucuga

SEQ ID NO: 98568 - RNA, 1698 nt, Artificial Sequence
  derived and/or modified CDS sequence (opt2) from hemagglutinin__InfluenzaA__ACN32793
augaaggucaagcuccucguccuccucugcaccuucaccgccaccuacgccgacaccaucugcaucggcuaccacgccaacaacuccaccgacaccgucgacaccguccucgagaagaacgucaccgucacccacuccgucaaccuccucgaggacucccacaacggcaagcucugccuccucaagggcaucgccccccuccagcucggcaacugcuccgucgccggcuggauccucggcaaccccgagugcgagcuccucaucuccaaggaguccugguccuacaucgucgagacccccaaccccgagaacggcaccugcuaccccggcuacuucgccgacuacgaggagcuccgcgagcagcucuccuccgucuccuccuucgagcgcuucgagaucuuccccaaggaguccuccuggcccaaccacaccgucaccggcgucuccgccuccugcucccacaacggcaaguccuccuucuaccgcaaccuccucuggcucaccggcaagaacggccucuaccccaaccucuccgaguccuacgccaacaacaaggagaaggagguccucguccucuggggcguccaccacccccccaacaucggcgaccagcgcgcccucuaccacaccgagaacgccuacgucuccgucgucuccucccacuacucccgccgcuucacccccgagaucgccaagcgccccaagguccgcgaccaggagggccgcaucaacuacuacuggacccuccucgagcccggcgacaccaucaucuucgaggccaacggcaaccucaucgccccccgcuucgccuucgcccucucccgcggcuucggcuccggcaucaucaccuccaacgcccccauggacgagugcgacgccaagugccagaccccccagggcgccaucaacuccucccuccccuuccagaacguccaccccgucaccaucggcgagugccccaaguacguccgcuccaccaagcuccgcauggucaccggccuccgcaacauccccuccauccagucccgcggccucuucggcgccaucgccggcuucaucgagggcggcuggaccggcauggucgacggcugguacggcuaccaccaccagaacgagcagggcuccggcuacgccgccgaccagaaguccacccagaacgccaucaacggcaucaccaacaaggucaacuccgucaucgagaagaugaacacccaguucaccgccgucggcaaggaguucaacaagcucgagcgccgcauggagaaccucaacaagaaggucgacgacggcuuccucgacaucuggaccuacaacgccgagcuccucguccuccucgagaacgagcgcacccucgacuuccacgacuccaacgucaagaaccucuacgagaaggucaagucccagcucaagaacaacgccaaggagaucggcaacggcugcuucgaguucuaccacaagugcaacgacgagugcauggaguccgucaagaacggcaccuacgacuaccccaaguacuccgaggaguccaagcucaaccgcgagaagaucgacggcgucaagcucgaguccaugggcgucuaccagauccucgccaucuacuccaccgucgccuccucccucguccuccucgucucccucggcgccaucuccuucuggaugugcuccaacggcucccuccagugccgcaucugcaucuga

SEQ ID NO: 98569 - RNA, 1698 nt, Artificial Sequence; identical to SEQ ID NO: 97993
  derived and/or modified CDS sequence (opt2) from hemagglutinin__InfluenzaA__ACN32804

SEQ ID NO: 98570 - RNA, 1698 nt, Artificial Sequence; identical to SEQ ID NO: 97981
  derived and/or modified CDS sequence (opt2) from hemagglutinin__InfluenzaA__ACN32815

SEQ ID NO: 98571 - RNA, 1698 nt, Artificial Sequence; identical to SEQ ID NO: 97991
  derived and/or modified CDS sequence (opt2) from hemagglutinin__InfluenzaA__ACN32826

SEQ ID NO: 98572 - RNA, 1701 nt, Artificial Sequence; identical to SEQ ID NO: 98470
  derived and/or modified CDS sequence (opt2) from hemagglutinin__InfluenzaA__ACN32848

SEQ ID NO: 98573 - RNA, 1701 nt, Artificial Sequence
  derived and/or modified CDS sequence (opt2) from hemagglutinin__InfluenzaA__ACN32870
augaagaccaucaucgcccucuccuacauccucugccucgucuucgcccagaaguuccccggcaacgacaacuccaccgccacccucugccucggccaccacgccguccccaacggcaccaucgucaagaccaucaccaacgaccagaucgaggucaccaacgccaccgagcucguccaguccuccuccaccggcgagaucugcgacuccccccaccagauccucgacggcgagaacugcacccucaucgacgcccuccucggcgacccccagugcgacggcuuccagaacaagaacugggaccucuucgucgagcgcuccaaggccuacuccaacugcuaccccuacgacguccccgacuacgccucccuccgcucccucgucgccuccuccggcacccucgaguucaacaacgaguccuucaacuggaccggcgucacccagaacggcaccuccuccgccugcauccgccgcuccaacaacuccuucuucucccgccucaacuggcucacccacuccaaguucaaguaccccgcccucaacgucaccaugcccaacaacgagaacuucgacaagcucuacaucuggggcguccaccaccccggcaccgacaacgaccagaucuuccucuacgcccaggccuccggccgcaucaccgucuccaccaagcgcucccagcagaccgucauccccaacaucggcucccgcccccgcguccgcaacauccccucccgcaucuccaucuacuggaccaucgucaagcccggcgacauccuccucaucaacuccaccggcaaccucaucgccccccgcggcuacuucaagauccgcuccggcaaguccuccaucaugcgcuccgacgcccccaucggcaagugcaacuccgagugcaucacccccaacggcuccauccccaacgacaagcccuuccagaacgucaaccgcaucaccuacggcgccugcccccgcuacgucaagcagaacacccucaagcucgccaccggcaugcgcaacguccccgagaagcagacccgcggcaucuucggcgccaucgccggcuucaucgagaacggcugggagggcauggucgacggcugguacggcuuccgccaccagaacuccgagggcaucggccaggccgccgaccucaaguccacccaggccgccaucgaccagaucaacggcaagcucaaccgccucaucggcaagaccaacgagaaguuccaccagaucgagaaggaguucuccgaggucgagggccgcauccaggaccucgagaaguacgucgaggacaccaagaucgaccucugguccuacaacgccgagcuccucgucgcccucgagaaccagcacaccaucgaccucaccgacuccgagaugaacaagcucuucgagaagaccaagaagcagcuccgcgagaacgccgaggacaugggcaacggcugcuucaagaucuaccacaagugcgacaacgccugcaucggcuccauccgcaacggcaccuacgaccacgacgucuaccgcgacgaggcccucaacaaccgcuuccagaucaagggcgucgagcucaaguccggcuacaaggacuggauccucuggaucuccuucgccaucuccugcuuccuccucugcaucgcccuccucggcuucaucaugugggccugccagaagggcaacauccgcugcaacaucugcaucuga

SEQ ID NO: 98574 - RNA, 1701 nt, Artificial Sequence; identical to SEQ ID NO: 98573
  derived and/or modified CDS sequence (opt2) from hemagglutinin__InfluenzaA__ACN32892

SEQ ID NO: 98575 - RNA, 1701 nt, Artificial Sequence; identical to SEQ ID NO: 98470
  derived and/or modified CDS sequence (opt2) from hemagglutinin__InfluenzaA__ACN32903

SEQ ID NO: 98576 - RNA, 1701 nt, Artificial Sequence
  derived and/or modified CDS sequence (opt2) from hemagglutinin__InfluenzaA__ACN32914
augaagaccaucaucgcccucuccuacauccucugccucgccuucgcccagaagcuccccggcaacgacaacuccaccgccacccucugccucggccaccacgccguccccaacggcaccaucgucaagaccaucaccaacgaccagaucgaggucaccaacgccaccgagcucguccaguccuccuccaccggcgagaucugcgacuccccccaccagauccucgacggcgagaacugcacccucaucgacgcccuccucggcgacccccagugcgacggcuuccagaacaagaagugggaccucuucgucgagcgcuccaaggccuacuccaacugcuaccccuacgacguccccgacuacgccucccuccgcucccucgucgccuccuccggcacccucgaguucaacaacgaguccuucaacuggaccggcgucacccagaacggcaccuccuccgccugcauccgccgcuccaacaacuccuucuucucccgccucaacuggcucacccaccucaaguucaaguaccccgcccucaacgucaccaugcccaacaacgagcaguucgacaagcucuacaucuggggcguccaccaccccggcaccgacaacgaccagaucuuccucuacgcccaggccuccggccgcaucaccgucuccaccaagcgcucccagcagaccgucauccccaacaucggcucccgcccccgcguccgcaacauccccucccgcaucuccaucuacuggaccaucgucaagcccggcgacauccuccucaucaacuccaccggcaaccucaucgccccccgcggcuacuucaagauccgcuccggcaaguccuccaucaugcgcuccgacgcccccaucggcaagugcaacuccgagugcaucacccccaacggcuccauccccaacgacaagcccuuccagaacgucaaccgcaucaccuacggcgccugcccccgcuacgucaagcagaacacccucaagcucgccaccggcaugcgcaacguccccgagaagcagacccgcggcaucuucggcgccaucgccggcuucaucgagaacggcugggagggcauggucgacggcugguacggcuuccgccaccagaacuccgagggccgcggccaggccgccgaccucaaguccacccaggccgccaucgaccagaucaacggcaagcucaaccgccucaucggcaagaccaacgagaaguuccaccagaucgagaaggaguucuccgaggucgagggccgcauccaggaccucgagaaguacgucgaggacaccaagaucgaccucugguccuacaacgccgagcuccucgucgcccucgagaaccagcacaccaucgaccucaccgacuccgagaugaacaagcucuucgagaagaccaagaagcagcuccgcgagaacgccgaggacaugggcaacggcugcuucaagaucuaccacaagugcgacaacgccugcaucggcuccauccgcaacggcaccuacgaccacgacgucuaccgcgacgaggcccucaacaaccgcuuccagaucaagggcgucgagcucaaguccggcuacaaggacuggauccucuggaucuccuucgccaucuccugcuuccuccucugcgucgcccuccucggcuucaucaugugggccugccagaagggcaacauccgcugcaacaucugcaucuga

SEQ ID NO: 98577 - RNA, 1701 nt, Artificial Sequence; identical to SEQ ID NO: 98470
  derived and/or modified CDS sequence (opt2) from hemagglutinin__InfluenzaA__ACN32925

SEQ ID NO: 98578 - RNA, 1701 nt, Artificial Sequence
  derived and/or modified CDS sequence (opt2) from hemagglutinin__InfluenzaA__ACN32936
augaagaccaucaucgcccucuccuacauccucugccucgucuucgcccagaaguuccccggcaacgacaacuccaccgccacccucugccucggccaccacgccguccccaacggcaccaucgucaagaccaucaccaacgaccagaucgaggucaccaacgccaccgagcucguccaguccuccuccaccggcgagaucugcgacuccccccaccagauccucgacggcgagaacugcacccucaucgacgcccuccucggcgacccccagugcgacggcuuccagaacaagaacugggaccucuucgucgagcgcuccaaggccuacuccaacugcuaccccuacgacguccccgacuacgccucccuccgcucccucgucgccuccuccggcacccucgaguucaacaacgaguccuucaacuggaccggcgucacccagaacggcaccuccuccgccugcauccgccgcuccaacaacuccuucuucucccgccucaacuggcucacccacuccaaguucaaguaccccgcccucaacgucaccaugcccaacaacgagaacuucgacaagcucuacaucuggggcguccaccaccccggcaccgacaacgaccagaucuuccucuacgcccaggccuccggccgcaucaccgucuccaccaagcgcucccagcagaccgucauccccaacaucggcucccgcccccgcaucaagaacauccccucccgcaucuccaucuacuggaccaucgucaagcccggcgacauccuccucaucaacuccaccggcaaccucaucgccccccgcggcuacuucaagauccgcuccggcaaguccuccaucaugcgcuccgacgcccccaucggcaagugcaacuccgagugcaucacccccaacggcuccauccccaacgacaagcccuuccagaacgucaaccgcaucaccuacggcgccugcccccgcuacgucaagcagaacacccucaagcucgccaccggcaugcgcaacguccccgagaagcagacccgcggcaucuucggcgccaucgccggcuucaucgagaacggcugggagggcauggucgacggcugguacggcuuccgccaccagaacuccgagggcaucggccaggccgccgaccucaaguccacccaggccgccaucgaccagaucaacggcaagcucaaccgccucaucggcaagaccaacgagaaguuccaccagaucgagaaggaguucuccgaggucgagggccgcauccaggaccucgagaaguacgucgaggacaccaagaucgaccucugguccuacaacgccgagcuccucgucgcccucgagaaccagcacaccaucgaccucaccgacuccgagaugaacaagcucuucgagaagaccaagaagcagcuccgcgagaacgccgaggacaugggcaacggcugcuucaagaucuaccacaagugcgacaacgccugcaucggcuccauccgcaacggcaccuacgaccacgacgucuaccgcgacgaggcccucaacaaccgcuuccagaucaagggcgucgagcucaaguccggcuacaaggacuggauccucuggaucuccuucgccaucuccugcuuccuccucugcaucgcccuccucggcuucaucaugugggccugccagaagggcaacauccgcugcaacaucugcaucuga

SEQ ID NO: 98579 - RNA, 1701 nt, Artificial Sequence; identical to SEQ ID NO: 98470
  derived and/or modified CDS sequence (opt2) from hemagglutinin__InfluenzaA__ACN32947

SEQ ID NO: 98580 - RNA, 1701 nt, Artificial Sequence
  derived and/or modified CDS sequence (opt2) from hemagglutinin__InfluenzaA__ACN32958
augaagaccaucaucgcccucuccuacauccucugccucgucuucgcccagaagcuccccggcaacgacaacuccaccgccacccucugccucggccaccacgccguccccaacggcaccaucgucaagaccaucaccaacgaccagaucgaggucaccaacgccaccgagcucguccaguccuccuccaccggcgagaucugcgacuccccccaccagauccucgacggcgagaacugcacccucaucgacgcccuccucggcgacccccagugcgacggcuuccagaacaagaagugggaccucuucgucgagcgcaacaaggccuacuccaacugcuaccccuacgacguccccgacuacgccucccuccgcucccucgucgccuccuccggcacccucgaguucaacaacgaguccuucaacuggaccggcgucacccagaacggcaccuccuccgccugcauccgccgcuccaacaacuccuucuucucccgccucaacuggcucacccaccucaaguucaaguaccccgcccucaacgucaccaugcccaacaacgagcaguucgacaagcucuacaucuggggcguccaccaccccggcaccgacaacgaccagaucuuccucuacgcccaggccuccggccgcaucaccgucuccaccaagcgcucccagcagaccgucauccccaacaucggcucccgcccccgcguccgcaacauccccucccgcaucuccaucuacuggaccaucgucaagcccggcgacauccuccucaucaacuccaccggcaaccucaucgccccccgcggcuacuucaagauccgcuccggcaaguccuccaucaugcgcuccgacgcccccaucggcaagugcaacuccgagugcaucacccccaacggcuccauccccaacgacaagcccuuccagaacgucaaccgcaucaccuacggcgccugcccccgcuacgucaagcagaacacccucaagcucgccaccggcaugcgcaacguccccgagaagcagacccgcggcaucuucggcgccaucgccggcuucaucgagaacggcugggagggcauggucgacggcugguacggcuuccgccaccagaacuccgagggccgcggccaggccgccgaccucaaguccacccaggccgccaucgaccagaucaacggcaagcucaaccgccucaucggcaagaccaacgagaaguuccaccagaucgagaaggaguucuccgaggucgagggccgcauccaggaccucgagaaguacgucgaggacaccaagaucgaccucugguccuacaacgccgagcuccucgucgcccucgagaaccagcacaccaucgaccucaccgacuccgagaugaacaagcucuucgagaagaccaagaagcagcuccgcgagaacgccgaggacaugggcaacggcugcuucaagaucuaccacaagugcgacaacgccugcaucggcuccauccgcaacggcaccuacgaccacgacgucuaccgcgacgaggcccucaacaaccgcuuccagaucaagggcgucgagcucaaguccggcuacaaggacuggauccucuggaucuccuucgccaucuccugcuuccuccucugcgucgcccuccucggcuucaucaugugggccugccagaagggcaacauccgcugcaacaucugcaucuga

SEQ ID NO: 98581 - RNA, 1701 nt, Artificial Sequence
  derived and/or modified CDS sequence (opt2) from hemagglutinin__InfluenzaA__ACN32969
augaagaccaucaucgcccucuccuacauccucugccucgucuccgcccagaagcuccccggcaacgacaacuccaccgccacccucugccucggccaccacgccguccccaacggcaccaucgucaagaccaucaccaacgaccagaucgaggucaccaacgccaccgagcucguccaguccuccuccaccggcgagaucugcgacuccccccaccagguccucgacggcgagaacugcacccucaucgacgcccuccucggcgacccccagugcgacggcuuccagaacaagaagugggaccucuucgucgagcgcuccaaggccuacuccaacugcuaccccuacgacguccccgacuacgccucccuccgcucccucgucgccuccuccggcacccucgaguucaacaacgaguccuucaacuggaccggcgucacccagaacggcaccuccuccgccugcauccgccgcuccaacaacuccuucuucucccgccucaacuggcucacccacuccaaguucaaguaccccgcccucaacgucaccaugcccaacaacgaggaguucgacaagcucuacaucuggggcguccaccaccccggcaccgacaacgaccagaucuuccucuacgcccaggccuccggccgcaucaccgucuccaccaagcgcucccagcagaccgucauccccaacaucggcucccgcccccgcguccgcaacauccccucccgcaucuccaucuacuggaccaucgucaagcccggcgacauccuccucaucaacuccaccggcaaccucaucgccccccgcggcuacuucaagcuccgcuccggcaaguccuccaucaugcgcuccgacgcccccaucggcaagugcaacuccgagugcaucacccccaacggcuccauccccaacgacaagcccuuccagaacgucaaccgcaucaccuacggcgccugcccccgcuacgucaagcagaacacccucaagcucgccaccggcaugcgcaacguccccgagaagcagacccgcggcaucuucggcgccaucgccggcuucaucgagaacggcugggagggcauggucgacggcugguacggcuuccgccaccagaacuccgagggcaucggccaggccgccgaccucaaguccacccaggccgccaucgaccagaucaacggcaagcucaaccgccucaucggcaagaccaacgagaaguuccaccagaucgagaaggaguucuccgaggucgagggccgcauccaggaccucgagaaguacgucgaggacaccaagaucgaccucugguccuacaacgccgagcuccucgucgcccucgagaaccagcacaccaucgaccucaccgacuccgagaugaacaagcucuucgagaagaccaagaagcagcuccgcgagaacgccgaggacaugggcaacggcugcuucaagaucuaccacaagugcgacaacgccugcaucggcuccauccgcaacggcaccuacgaccacgaggucuaccgcgacgaggcccucaacaaccgcuuccagaucaagggcgucgagcucaaguccggcuacaaggacuggauccucuggaucuccuucgccaucuccugcuuccuccucugcgucgcccuccucggcuucaucaugugggccugccagaagggcaacauccgcugcaacaucugcaucuga

SEQ ID NO: 98582 - RNA, 1701 nt, Artificial Sequence
  derived and/or modified CDS sequence (opt2) from hemagglutinin__InfluenzaA__ACN32980
augaagaccaucaucgcccucuccuacauccucugccucgucuucgcccagaagcuccccggcaacgacaacuccaccgccacccucugccucggccaccacgccguccccaacggcaccaucgucaagaccaucaccaacgaccagaucgaggucaccaacgccaccgagcucguccaguccuccuccaccggcgagaucugcgacuccccccaccagauccucgacggcgagaacugcacccucaucgacgcccuccucggcgacccccagugcgacggcuuccagaacaagaagugggaccucuucgucgagcgcuccaaggcccacuccaacugcuaccccuacgacguccccgacuacgccucccuccgcucccucgucgccuccuccggcacccucgaguucaacaacgaguccuucaacuggaccggcgucacccagaacggcaccuccuccgccugcauccgccgcuccaagaacuccuucuucucccgccucaacuggcucacccaccucaaguucaaguaccccgcccucaacgucaccaugcccaacgacgagaaguucgacaagcucuacaucuggggcguccaccaccccggcaccgacaacgaccagaucuuccucuacgcccaggccuccggccgcaucaccgucuccaccaagcgcucccagcagaccgucauccccaacaucggcucccgcccccgcguccgcaacauccccucccgcaucuccaucuacuggaccaucgucaagcccggcgacauccuccucaucaacuccaccggcaaccucaucgccccccgcggcuacuucaagauccgcuccggcaaguccuccaucaugcgcuccgacgcccccaucggcaagugcaacuccgagugcaucacccccaacggcuccauccccaacgacaagcccuuccagaacgucaaccgcaucaccuacggcgccugcccccgcuacgucaagcagaacacccucaagcucgccaccggcaugcgcaacguccccgagaagcagacccgcggcaucuucggcgccaucgccggcuucaucgagaacggcugggagggcauggucgacggcugguacggcuuccgccaccagaacuccgagggcaucggccaggccgccgaccucaaguccacccaggccgccaucgaccagaucaacggcaagcucaaccgccucaucggcaagaccaacgagaaguuccaccagaucgagaaggaguucuccgaggucgagggccgcauccaggaccucgagaaguacgucgaggacaccaagaucgaccucugguccuacaacgccgagcuccucgucgcccucgagaaccagcacaccaucgaccucaccgacuccgagaugaacaagcucuucgagaagaccaagaagcagcuccgcgagaacgccgaggacaugggcaacggcugcuucaagaucuaccacaagugcgacaacgccugcgucggcuccauccgcaacggcaccuacgaccacgacgucuaccgcgacgaggcccucaacaaccgcuuccagaucaagggcgucgagcucaaguccggcuacaaggacuggauccucuggaucuccuucgccaucuccugcuuccuccucugcgucgcccuccucggcuucaucaugugggccugccagaagggcaacauccgcugcaacaucugcaucuga

SEQ ID NO: 98583 - RNA, 1701 nt, Artificial Sequence; identical to SEQ ID NO: 98470
  derived and/or modified CDS sequence (opt2) from hemagglutinin__InfluenzaA__ACN32991

SEQ ID NO: 98584 - RNA, 1701 nt, Artificial Sequence; identical to SEQ ID NO: 98470
  derived and/or modified CDS sequence (opt2) from hemagglutinin__InfluenzaA__ACN33002

SEQ ID NO: 98585 - RNA, 1701 nt, Artificial Sequence; identical to SEQ ID NO: 98470
  derived and/or modified CDS sequence (opt2) from hemagglutinin__InfluenzaA__ACN33013

SEQ ID NO: 98586 - RNA, 1701 nt, Artificial Sequence
  derived and/or modified CDS sequence (opt2) from hemagglutinin__InfluenzaA__ACN33035
augaagaccaucaucgcccucuccuacauccucugccucgucuucgcccagaagcuccccggcaacgacaacuccaccgccacccucugccucggccaccacgccguccccaacggcaccaucgucaagaccaucaccaacgaccagaucgaggucaccaacgccaccgagcucguccaguccuccuccaccggcgagaucugcgacuccccccaccagauccucgacggcgagaacugcacccucaucgacgcccuccucggcgacccccagugcgacggcuuccagaacaagaagugggaccucuucgucgagcgcuccaaggccuacuccaacugcuaccccuacgacguccccgacuacgccucccuccgcucccucgucgccuccuccggcacccucgaguucaacaacgaguccuucaacuggaccggcgucacccagaacggcaccuccuccgccugcauccgccgcuccaacaacuccuucuucucccgccucaacuggcucacccaccucaaguucaaguaccccgcccucaacgucaccaugcccaacaacgagcaguucgacaagcucuacgucuggggcguccaccaccccggcaccgacaacgaccagaucuuccucuacgcccaggccuccggccgcaucaccgucuccaccaagcgcucccagcagaccgucauccccaacaucggcucccgcccccgcguccgcaacauccccucccgcaucuccaucuacuggaccaucgucaagcccggcgacauccuccucaucaacuccaccggcaaccucaucgccccccgcggcuacuucaagauccgcuccggcaaguccuccaucaugcgcuccgacgcccccaucggcaagugcaacuccgagugcaucacccccaacggcuccauccccaacgacaagcccuuccagaacgucaaccgcaucaccuacggcgccugcccccgcuacgucaagcagaacacccucaagcucgccaccggcaugcgcaacguccccgagaagcagacccgcggcaucuucggcgccaucgccggcuucaucgagaacggcugggagggcauggucgacggcugguacggcuuccgccaccagaacuccgagggccgcggccaggccgccgaccucaaguccacccaggccgccaucgaccagaucaacggcaagcucaaccgccucaucggcaagaccaacgagaaguuccaccagaucgagaaggaguucuccgaggucgagggccgcauccaggaccucgagaaguacgucgaggacaccaagaucgaccucugguccuacaacgccgagcuccucgucgcccucgagaaccagcacaccaucgaccucaccgacuccgagaugaacaagcucuucgagaagaccaagaagcagcuccgcgagaacgccgaggacaugggcaacggcugcuucaagaucuaccacaagugcgacaacgccugcaucggcuccauccgcaacggcaccuacgaccacgacgucuaccgcgacgaggcccucaacaaccgcuuccagaucaagggcgucgagcucaaguccggcuacaaggacuggauccucuggaucuccuucgccaucuccugcuuccuccucugcgucgcccuccucggcuucaucaugugggccugccagaagggcaacauccgcugcaacaucugcaucuga

SEQ ID NO: 98587 - RNA, 1701 nt, Artificial Sequence; identical to SEQ ID NO: 98470
  derived and/or modified CDS sequence (opt2) from hemagglutinin__InfluenzaA__ACN33046

SEQ ID NO: 98588 - RNA, 1701 nt, Artificial Sequence; identical to SEQ ID NO: 98470
  derived and/or modified CDS sequence (opt2) from hemagglutinin__InfluenzaA__ACN33057

SEQ ID NO: 98589 - RNA, 1701 nt, Artificial Sequence; identical to SEQ ID NO: 98470
  derived and/or modified CDS sequence (opt2) from hemagglutinin__InfluenzaA__ACN33068

SEQ ID NO: 98590 - RNA, 1701 nt, Artificial Sequence; identical to SEQ ID NO: 98573
  derived and/or modified CDS sequence (opt2) from hemagglutinin__InfluenzaA__ACN33079

SEQ ID NO: 98591 - RNA, 1698 nt, Artificial Sequence
  derived and/or modified CDS sequence (opt2) from hemagglutinin__InfluenzaA__ACN33090
augaaggucaagcuccucauccuccucugcaccuucaccgccaccuacgccgacaccaucugcaucggcuaccacgccaacaacuccaccgacaccgucgacaccguccucgagaagaacgucaccgucacccacuccgucaaccuccucgaggacucccacaacggcaagcucugccuccucaagggcaucgccccccuccagcucggcaacugcuccgucgccggcuggauccucggcaaccccgagugcgagcuccucaucuccaaggaguccugguccuacaucgucgagacccccaaccccgagaacggcaccugcuaccccggcuacuucgccgacuacgaggagcuccgcgagcagcucuccuccgucuccuccuucgagcgcuucgagaucuuccccaaggaguccuccuggcccaaccacaccgucaccggcgucuccgccuccugcucccacaacggcaaguccuccuucuaccgcaaccuccucuggcucaccggcaagaacggccucuaccccaaccucuccaaguccuacgccaacaacaaggagaaggagguccucguccucuggggcguccaccaccccuccaacaucggcgaccagcgcgcccucuaccacaccgagaacgccuacgucuccgucgucuccucccacuacucccgccgcuucacccccgagaucgccaagcgccccaagguccgcgaccaggagggccgcaucaacuacuacuggacccuccucgagcccggcgacaccaucaucuucgaggccaacggcaaccucaucgccccccgcuucgccuucgcccucucccgcggcuucggcuccggcaucaucaccuccaacgcccccauggacgagugcgacgccaagugccagaccccccagggcgccaucaacuccucccuccccuuccagaacguccaccccgucaccaucggcgagugccccaaguacguccgcuccaccaagcuccgcauggucaccggccuccgcaacauccccuccauccagucccgcggccucuucggcgccaucgccggcuucaucgagggcggcuggaccggcauggucgacggcugguacggcuaccaccaccagaacgagcagggcuccggcuacgccgccgaccagaaguccacccagaacgccaucaacggcaucaccaacaaggucaacuccgucaucgagaagaugaacacccaguucaccgccgucggcaaggaguucaacaagcucgagcgccgcauggagaaccucaacaagaaggucgacgacggcuuccucgacaucuggaccuacaacgccgagcuccucguccuccucgagaacgagcgcacccucgacuuccacgacuccaacgucaagaaccucuacgagaaggucaagucccagcucaagaacaacgccaaggagaucggcaacggcugcuucgaguucuaccacaagugcaacgacgagugcauggaguccgucaagaacggcaccuacgacuaccccaaguacuccgaggaguccaagcucaaccgcgagaagaucgacggcgucaagcucgaguccaugggcgucuaccagauccucgccaucuacuccaccgucgccuccucccucguccuccucgucucccucggcgccaucuccuucuggaugugcuccaacggcucccuccagugccgcaucugcaucuga

SEQ ID NO: 98592 - RNA, 1698 nt, Artificial Sequence; identical to SEQ ID NO: 97950
  derived and/or modified CDS sequence (opt2) from hemagglutinin__InfluenzaA__ACN33101

SEQ ID NO: 98593 - RNA, 1701 nt, Artificial Sequence; identical to SEQ ID NO: 98573
  derived and/or modified CDS sequence (opt2) from hemagglutinin__InfluenzaA__ACN33112

SEQ ID NO: 98594 - RNA, 1698 nt, Artificial Sequence; identical to SEQ ID NO: 98524
  derived and/or modified CDS sequence (opt2) from hemagglutinin__InfluenzaA__ACN33123

SEQ ID NO: 98595 - RNA, 1698 nt, Artificial Sequence; identical to SEQ ID NO: 98524
  derived and/or modified CDS sequence (opt2) from hemagglutinin__InfluenzaA__ACN33145

SEQ ID NO: 98596 - RNA, 1701 nt, Artificial Sequence; identical to SEQ ID NO: 98470
  derived and/or modified CDS sequence (opt2) from hemagglutinin__InfluenzaA__ACN33156

SEQ ID NO: 98597 - RNA, 1701 nt, Artificial Sequence
  derived and/or modified CDS sequence (opt2) from hemagglutinin__InfluenzaA__ACN33178
augaagaccaucaucgcccucuccuacauccucugccucgucuucgcccagaaguuccccggcaacgacaacuccaccgccacccucugccucggccaccacgccguccccaacggcaccaucgucaagaccaucaccaacgaccagaucgaggucaccaacgccaccgagcucguccaguccuccuccaccggcgagaucugcgacuccccccaccagauccucgacggcgagaacugcacccucaucgacgcccuccucggcgacccccagugcgacggcuuccagaacaagaacugggaccucuucgucgagcgcuccaaggccuacuccaacugcuaccccuacgacguccccgacuacgccucccuccgcucccucgucgccuccuccggcacccucgaguucaacaacgaguccuucaacuggaccggcgucacccagaacggcaccuccuccgccugcauccgccgcuccaacaacuccuucuucucccgccucaacuggcucacccacuccaaguucaaguaccccgcccucaacgucaccaugcccaacaacgagaacuucgacaagcucuacaucuggggcguccaccaccccggcaccgacaacgaccagaucuuccucuacgcccaggccuccggccgcaucaccgucuccaccaagcgcucccagcagaccgucauccccaacaucggcucccgcccccgcguccgcaacauccccucccgcaucuccaucuacuggaccaucgucaagcccggcgacauccuccucaucaacuccaccggcaaccucaucgccccccgcggcuacuucaagauccgcuccggcaaguccuccaucaugcgcuccgacgcccccaucggcaagugcaacuccgagugcaucacccccaacggcuccauccccaacgacaagcccuuccagaacgucaaccgcaucaccuacggcgccugcccccgcuacgucaagcagaacacccucaagcucgccaccggcaugcgcaacguccccgagaagcagacccgcggcaucuucggcgccaucgccggcuucaucgagaacggcugggagggcauggucgacggcugguacggcuuccgccaccagaacuccgagggcaucggccaggccgccgaccucaaguccacccaggccgccaucgaccagaucaacggcaagcucaaccgccucaucggcaagaccaacgagaaguuccaccagaucgagaaggaguucuccgaggucgagggccgcauccaggaccucgagaaguacgucgaggacaccaagaucgaccucugguccuacaacgccgagcuccucgucgcccucgagaaccagcacaccaucgaccucaccgacuccgagaugaacaagcucuucgagaagaccaagaagcagcuccgcgagaacgccgaggacaugggcaacggcugcuucaagaucuaccacaagugcgacaacgccugcaucggcuccauccgcaacggcaccuacgaccacgacgucuaccgcgacgaggcccucaacaaccgcuuccacaucaagggcgucgagcucaaguccggcuacaaggacuggauccucuggaucuccuucgccaucuccugcuuccuccucugcaucgcccuccucggcuucaucaugugggccugccagaagggcaacauccgcugcaacaucugcaucuga

SEQ ID NO: 98598 - RNA, 1701 nt, Artificial Sequence; identical to SEQ ID NO: 98470
  derived and/or modified CDS sequence (opt2) from hemagglutinin__InfluenzaA__ACN33189

SEQ ID NO: 98599 - RNA, 1701 nt, Artificial Sequence
  derived and/or modified CDS sequence (opt2) from hemagglutinin__InfluenzaA__ACN33200
augaagaccaucaucgcccucuccuacauccucugccucgucuucgcccagaaguuccccggcaacgacaacuccaccgccacccucugccucggccaccacgccguccccaacggcaccaucgucaagaccaucaccaacgaccagaucgaggucaccaacgccaccgagcucguccaguccuccuccaccggcgagaucugcgacuccccccaccagauccucgacggcgagaacugcacccucaucgacgcccuccucggcgacccccagugcgacggcuuccagaacaagaacugggaccucuucgucgagcgcuccaaggccuacuccaacugcuaccccuacgacguccccgacuacgccucccuccgcucccucgucgccuccuccggcacccucgaguucaacaacgaguccuucaacuggaccggcgucacccagaacggcaccuccuccgccugcauccgccgcuccaacaacuccuucuucucccgccucaacuggcucacccacuccaaguucaaguaccccgcccucaacgucaccaugcccaacaacgagaacuucgacaagcucuacaucuggggcguccaccaccccggcaccgacaacgaccagaucuuccucuacgcccaggccuccggccgcaucaccgucuccaccaagcgcucccagcagaccgucauccccaacaucggcucccgcccccgcguccgcaacauccccucccgcaucuccaucuacuggaccaucgucgagcccggcgacauccuccucaucaacuccaccggcaaccucaucgccccccgcggcuacuucaagauccgcuccggcaaguccuccaucaugcgcuccgacgcccccaucggcaagugcaacuccgagugcaucacccccaacggcuccauccccaacgacaagcccuuccagaacgucaaccgcaucaccuacggcgccugcccccgcuacgucaagcagaacacccucaagcucgccaccggcaugcgcaacguccccgagaagcagacccgcggcaucuucggcgccaucgccggcuucaucgagaacggcugggagggcauggucgacggcugguacggcuuccgccaccagaacuccgagggcaucggccaggccgccgaccucaaguccacccaggccgccaucgaccagaucaacggcaagcucaaccgccucaucggcaagaccaacgagaaguuccaccagaucgagaaggaguucuccgaggucgagggccgcauccaggaccucgagaaguacgucgaggacaccaagaucgaccucugguccuacaacgccgagcuccucgucgcccucgagaaccagcacaccaucgaccucaccgacuccgagaugaacaagcucuucgagaagaccaagaagcagcuccgcgagaacgccgaggacaugggcaacggcugcuucaagaucuaccacaagugcgacaacgccugcaucggcuccauccgcaacggcaccuacgaccacgacgucuaccgcgacgaggcccucaacaaccgcuuccagaucaagggcgucgagcucaaguccggcuacaaggacuggauccucuggaucuccuucgccaucuccugcuuccuccucugcaucgcccuccucggcuucaucaugugggccugccagaagggcaacauccgcugcaacaucugcaucuga

SEQ ID NO: 98600 - RNA, 1701 nt, Artificial Sequence
  derived and/or modified CDS sequence (opt2) from hemagglutinin__InfluenzaA__ACN33211
augaagaccaucaucgcccucuccuacauccucugccucgucuucgcccagaagcuccccggcaacgacaacuccaccgccacccucugccucggccaccacgccguccccaacggcaccaucgucaagaccaucaccaacgaccagaucgaggucaccaacgccaccgagcucguccaguccuccuccaccggcgagaucugcgacuccccccaccagauccucgacggcgagaacugcacccucaucgacgcccuccucggcgacccccagugcgacggcuuccagaacaagaagugggaccucuucgucgagcgcuccaaggccuacuccaacugcuaccccuacgacguccccgacuacgccucccuccgcucccucgucgccuccuccggcacccucgaguucaacaacgaguccuucaacuggaccggcgucacccagaacggcaccuccuccgccugcauccgccgcuccaacaacuccuucuucucccgccucaacuggcucacccaccucaaguucaaguaccccgcccucaacgucaccaugcccaacaacgagcaguucgacaagcucuacaucuggggcguccaccaccccggcaccgacaacgaccagaucuuccucuacgcccaggccuccggccgcaucaccgucuccaccaagcgcucccagcagaccgucauccccaacaucggcucccgcccccgcguccgcaacauccccucccgcaucuccaucuacuggaccaucgucaagcccggcgacauccuccucaucaacuccaccggcaaccucaucgccccccgcggcuacuucaagauccgcuccggcaaguccuccaucaugcgcuccgacgcccccaucggcaagugcaacuccgagugcaucacccccaacggcuccauccccaacgacaagcccuuccagaacgucaaccgcaucaccuacggcgccugcccccgcuacgucaagcagaacacccucaagcucgccaccggcaugcgcaacguccccgagaagcagacccgcggcaucuucggcgccaucgccggcuucaucgagaacggcugggagggcauggucgacggcugguacggcuuccgccaccagaacuccgagggccgcggccaggccgccgaccucaaguccacccaggccgccaucgaccagaucaacggcaagcucaaccgccucaucggcaagaccaacgagaaguuccaccagaucgagaaggaguucuccgaggucgagggccgcauccaggaccucgagaaguacgucgaggacaccaagaucgaccucugguccuacaacgccgagcuccucgucgcccucgagaaccagcacaccaucgaccucaccgacuccgagaugaacaagcucuucgagaagaccaagaagcagcuccgcgagaacgccgaggacaugggcaacggcugcuucaagaucuaccacaagugcgacaacgccugcaucggcuccauccgcaacggcaccuacgaccacgacgucuaccgcgacgaggcccucuccaaccgcuuccagaucaagggcgucgagcucaaguccggcuacaaggacuggauccucuggaucuccuucgccaucuccugcuuccuccucugcgucgcccuccucggcuucaucaugugggccugccagaagggcaacauccgcugcaacaucugcaucuga

SEQ ID NO: 98601 - RNA, 1698 nt, Artificial Sequence; identical to SEQ ID NO: 97992
  derived and/or modified CDS sequence (opt2) from hemagglutinin__InfluenzaA__ACN42981

SEQ ID NO: 98602 - RNA, 1698 nt, Artificial Sequence; identical to SEQ ID NO: 98226
  derived and/or modified CDS sequence (opt2) from hemagglutinin__InfluenzaA__ACN42992

SEQ ID NO: 98603 - RNA, 1701 nt, Artificial Sequence; identical to SEQ ID NO: 98470
  derived and/or modified CDS sequence (opt2) from hemagglutinin__InfluenzaA__ACN43003

SEQ ID NO: 98604 - RNA, 1701 nt, Artificial Sequence
  derived and/or modified CDS sequence (opt2) from hemagglutinin__InfluenzaA__ACN43014
augaagaccaucaucgcccucuccuacauccucugccucgucuucgcccagaaguuccccggcaacgacaacuccaccgccacccucugccucggccaccacgccguccccaacggcaccaucgucaagaccaucaccaacgaccagaucgaggucaccaacgccaccgagcucguccaguccuccuccaccggcgagaucugcgacuccccccaccagauccucgacggcgagaacugcacccucaucgacgcccuccucggcgacccccagugcgacggcuuccagaacaagaacugggaccucuucgucgagcgcuccaaggccuacuccaacugcuaccccuacgacguccccgacuacgccucccuccgcucccucgucgccuccuccggcacccucgaguucaacaacgaguccuucaacuggaucggcgucacccagaacggcaccuccuccgccugcauccgccgcuccaacaacuccuucuucucccgccucaacuggcucacccacuccaaguucaaguaccccgcccucaacgucaccaugcccaacaacgagaacuucgacaagcucuacaucuggggcguccaccaccccggcaccgacaacgaccagaucuuccucuacgcccaggccuccggccgcaucaccgucuccaccaagcgcucccagcagaccgucauccccaacaucggcucccgcccccgcguccgcaacauccccucccgcaucuccaucuacuggaccaucgucaagcccggcgacauccuccucaucaacuccaccggcaaccucaucgccccccgcggcuacuucaagauccgcuccggcaaguccuccaucaugcgcuccgacgcccccaucggcaacugcaacuccgagugcaucacccccaacggcuccauccccaacgacaagcccuuccagaacgucaaccgcaucaccuacggcuccugcccccgcuacgucaagcagaacacccucaagcucgccaccggcaugcgcaacguccccgagaagcagacccgcggcaucuucggcgccaucgccggcuucaucgagaacggcugggagggcauggucgacggcugguacggcuuccgccaccagaacuccgagggcaucggccaggccgccgaccucaaguccacccaggccgccaucgaccagaucaacggcaagcucaaccgccucaucggcaagaccaacgagaaguuccaccagaucgagaaggaguucuccgaggucgagggccgcauccaggaccucgagaaguacgucgaggacaccaagaucgaccucugguccuacaacgccgagcuccucgucgcccucgagaaccagcacaccaucgaccucaccgacuccgagaugaacaagcucuucgagaagaccaagaagcagcuccgcgagaacgccgaggacaugggcaacggcugcuucaagaucuaccacaagugcgacaacgccugcaucggcuccauccgcaacggcaccuacgaccacgacgucuaccgcgacgaggcccucaacaaccgcuuccagaucaagggcgucgagcucaaguccggcuacaaggacuggauccucuggaucuccuucgccaucuccugcuuccuccucugcaucgcccuccucggcuucaucaugugggccugccagaagggcaacauccgcugcaacaucugcaucuga

SEQ ID NO: 98605 - RNA, 1701 nt, Artificial Sequence; identical to SEQ ID NO: 98470
  derived and/or modified CDS sequence (opt2) from hemagglutinin__InfluenzaA__ACN43025

SEQ ID NO: 98606 - RNA, 1701 nt, Artificial Sequence; identical to SEQ ID NO: 98470
  derived and/or modified CDS sequence (opt2) from hemagglutinin__InfluenzaA__ACN43036

SEQ ID NO: 98607 - RNA, 1701 nt, Artificial Sequence; identical to SEQ ID NO: 98470
  derived and/or modified CDS sequence (opt2) from hemagglutinin__InfluenzaA__ACN43047

SEQ ID NO: 98608 - RNA, 1701 nt, Artificial Sequence
  derived and/or modified CDS sequence (opt2) from hemagglutinin__InfluenzaA__ACN43058
augaagaccaucaucgcccucuccuacauccucugccucgucuucgcccagaagcuccccggcaacgacaacuccaccgccacccucugccucggccaccacgccguccccaacggcaccaucgucaagaccaucaccaacgaccagaucgaggucaccaacgccaccgagcucguccaguccuccuccaccggcgagaucugcggcuccccccaccagauccucgacggcgagaacugcacccucaucgacgcccuccucggcgacccccagugcgacggcuuccagaacaagaagugggaccucuucgucgagcgcuccaaggccuacuccaacugcuaccccuacgacguccccgacuacgccucccuccgcucccucgucgccuccuccggcacccucgaguucaacaacgaguccuucaacuggaccggcgucacccagaacggcaccuccuccgccugcauccgccgcuccaacaacuccuucuucucccgccucaacuggcucacccaccucaaguucaaguaccccgcccucaacgucaccaugcccaacaacgagcaguucgacaagcucuacaucuggggcguccaccaccccggcaccgacaacgaccagaucuuccucuacgcccaggccuccggccgcaucaccgucuccaccaagcgcucccagcagaccgucauccccaacaucggcucccgcccccgcguccgcaacauccccucccgcaucuccaucuacuggaccaucgucaagcccggcgacauccuccucaucaacuccaccggcaaccucaucgccccccgcggcuacuucaagauccgcuccggcaaguccuccaucaugcgcuccgacgcccccaucggcaagugcaacuccgagugcaucacccccaacggcuccauccccaacgacaagcccuuccagaacgucaaccgcaucaccuacggcgccugcccccgcuacgucaagcagaacacccucaagcucgccaccggcaugcgcaacguccccgagaagcagacccgcggcaucuucggcgccaucgccggcuucaucgagaacggcugggagggcauggucgacggcugguacggcuuccgccaccagaacuccgagggccgcggccaggccgccgaccucaaguccacccaggccgccaucgaccagaucaacggcaagcucaaccgccucaucggcaagaccaacgagaaguuccaccagaucgagaaggaguucuccgaggucgagggccgcauccaggaccucgagaaguacgucgaggacaccaagaucgaccucugguccuacaacgccgagcuccucgucgcccucgagaaccagcacaccaucgaccucaccgacuccgagaugaacaagcucuucgagaagaccaagaagcagcuccgcgagaacgccgaggacaugggcaacggcugcuucaagaucuaccacaagugcgacaacgccugcaucggcuccauccgcaacggcaccuacgaccacgacgucuaccgcgacgaggcccucaacaaccgcuuccagaucaagggcgucgagcucaaguccggcuacaaggacuggauccucuggaucuccuucgccaucuccugcuuccuccucugcgucgcccuccucggcuucaucaugugggccugccagaagggcaacauccgcugcaacaucugcaucuga

SEQ ID NO: 98609 - RNA, 1701 nt, Artificial Sequence; identical to SEQ ID NO: 98470
  derived and/or modified CDS sequence (opt2) from hemagglutinin__InfluenzaA__ACN43069

SEQ ID NO: 98610 - RNA, 1701 nt, Artificial Sequence; identical to SEQ ID NO: 98573
  derived and/or modified CDS sequence (opt2) from hemagglutinin__InfluenzaA__ACN43080

SEQ ID NO: 98611 - RNA, 1701 nt, Artificial Sequence
  derived and/or modified CDS sequence (opt2) from hemagglutinin__InfluenzaA__ACN72617
auggaggccaagcucuucguccucuucugcgccuucaccgcccucaaggccgacaccaucugcgucggcuaccacgccaacaacuccaccgacaccgucgacaccauccucgagaagaacgucaccgucacccacuccgucaaccuccucgagaacucccacaacggcaagcucugcucccucaacggcaaggccccccuccagcucggcaacugcaacgucgccggcuggauccucggcaaccccgagugcgaccuccuccucaccgccaacuccugguccuacaucaucgagaccuccgacuccaagaacggcgccugcuaccccggcgaguucgccgacuacgaggagcuccgcgagcagcucuccaccgucuccuccuucgagcgcuucgagaucuuccccaaggccaccuccuggcccaaccacgagaccaccaagggcaccaccgucgccugcucccacuccggcgccaacuccuucuaccgcaaccuccucuggaucgucaagaagggcaacuccuaccccaagcucuccaaguccuacaccaacaacaagggcaaggagguccucgucaucuggggcguccaccacccccccaccgacuccgaccagcagacccucuaccagaacaagcacaccuacgucuccgucggcuccuccaaguacuaccagcgcuucacccccgagaucgucacccgccccaagguccgcgagcaggccggccgcaugaacuacuacuggacccuccucgaccagggcgacaccaucaccuucgaggccaccggcaaccucaucgcccccuggcacgccuucgcccucaacaagggcuccaacuccggcaucaugauguccgacgcccacguccacaacugcaccaccaagugccagaccccccacggcgcccucaagggcaaccuccccuuccagaacguccaccccaucaccaucggcgagugccccaaguacgucaaguccacccagcuccgcauggccaccggccuccgcaacauccccuccauccagucccgcggccucuucggcgccaucgccggcuucaucgagggcggcuggaccggcaugaucgacggcugguacggcuaccaccaccagaacgagcagggcuccggcuacgccgccgaccgcaaguccacccagaucgccaucgacggcaucuccaacaaggucaacuccgucaucgagaagaugaacauccaguucaccuccgucggcaaggaguucaacaaccucgagaagcgcaucgagaaccucaacaagaaggucgacgacggcuuccucgacgucuggaccuacaacgccgagcuccucauccuccucgagaacgagcgcacccucgacuuccacgacuucaacgucaagaaccucuacgagaaggucaagucccagcuccgcaacaacgccaaggagaucggcaacggcugcuucgaguucuaccacaagugcgacaacgagugcauggaguccgucaagaacggcaccuacaacuacccccgcuacuccgaggaguccaagcucaaccgcgaggagaucgacggcgucaagcucgaguccgucggcguccaccagauccucgccaucuacuccaccgucgccuccucccucguccuccucgucucccucggcgccaucuccuucuggaugugcuccaacggcucccuccagugccgcaucugcaucuga

SEQ ID NO: 98612 - RNA, 1701 nt, Artificial Sequence
  derived and/or modified CDS sequence (opt2) from hemagglutinin__InfluenzaA__ACN72632
augaagaccgucaucgcccucuccuacgucuucugccucgucuucggccaggaccuccccggcaagggcaacaacaccgccacccucugccucggccaccacgccguccccaacggcacccucgucaagaccaucaccgacgaccagaucgaggucaccaacgccaccgagcucguccagaacuucuccaucggcaagaucugcaagaacccccaccgcauccucgacggcgccaacugcacccucaucgacucccuccucggcgacccccacugcgacggcuuccagaacgagaagugggaccucuucaucgagcgcuccaaggccuucuccaacugcuaccccuacgacguccccgaguacaccucccuccgcucccucaucgccuccuccggcacccucgaguucaccaacgaggacuucaacuggaccggcgucacccagaacggcggcuccuccgccugcaagcgcggccccaacaacuccuucuucucccgccucaacuggcucuacaaguccggcaacaccuaccccaugcucaacgucaccaugcccaacuccgacgacuucgacaagcucuacaucuggggcguccaccaccccuccaccgaccgcgagcagaccaaccucuacauccaggccuccggcaagaucaucgucuccaccaagcgcucccagcagaccaucauccccaacaucggcucccgccccuggguccgcggccucuccucccgcaucuccaucuacuggaccaucgucaagcccggcgacauccucaucaucaacuccaacggcaaccucaucgccccccgcggcuacuucaagauccagaccggcaaguccuccgucaugcgcuccgacgcccccaucggcaccugcaacuacgagugcaucacccccaacggcuccauccccaacgacaagcccuuccagaacgucaaccgcaucaccuacggcgccugcccccacuacaucaagcagaacacccucaagcucgccaccggcaugcgcaacauccccgagcgccagacccgcggcaucuucggcgccaucgccggcuucaucgagaacggcugggagggcauggucaacggcugguacggcuuccgccaccagaacuccgagggcaucggccaggccgccgaccucaaguccacccaggccgccaucaaccagaucaacggcaagcucaaccgcgucaucgagaagaccaacgagaaguuccaccagaucgagaaggaguucuccgaggucgagggccgcauccaggaccucgagcgcuacgucgaggacaccaagaucgaccucugguccuacaacgccgagcuccucgucgcccucgagaaccagcacaccaucgaccucaccgacuccgagaugaacaagcucuucgagaagacccgcaagcagcuccgcgagaacgccgaggacaugggcaacggcugcuucaagaucuaccacaagugcgacaacuccugcauggaguccauccgcaacggcaccuacgaccacaacgaguaccgcgacgaggccgucaacaaccgcuuccagaucaaguccgucgagcucaaguccggcuacaaggacuggauccucuggaucuccuucgccaucuccugcuuccuccucugcgccgucuggcucggcuucaucaucugggccugccagaagggcaacauccgcugcaacaucugcaucuga

SEQ ID NO: 98613 - RNA, 1701 nt, Artificial Sequence; identical to SEQ ID NO: 98470
  derived and/or modified CDS sequence (opt2) from hemagglutinin__InfluenzaA__ACN76478

SEQ ID NO: 98614 - RNA, 1701 nt, Artificial Sequence
  derived and/or modified CDS sequence (opt2) from hemagglutinin__InfluenzaA__ACN76489
augaagaccaucaucgcccucggcuacauccucugccucgucuccgcccagaagcuccccggcaacgacaacuccaccgccacccucugccucggccaccacgccguccccaacggcaccaucgucaagaccaucaccaacgaccagaucgaggucaccaacgccaccgagcucguccaguccuccuccaccggcgagaucugcgacuccccccaccagguccucgacggcgagaacugcacccucaucgacgcccuccucggcgacccccagugcgacggcuuccagaacaagaagugggaccucuucgucgagcgcuccaaggccuacuccaacugcuaccccuacgacguccccgacuacgccucccuccgcucccucgucgccuccuccggcacccucgaguucaacaacgaguccuucaacuggaccggcgucacccagaacggcaccuccuccgccugcauccgccgcuccaacaacuccuucuucucccgccucaacuggcucacccaccucaaguucaaguaccccgcccucaacgucaccaugcccaacaacgaggaguucgacaagcucuacaucuggggcguccaccaccccggcaccgacaacgaccagaucuuccucuacgcccaggccuccggccgcaucaccgucuccaccaagcgcucccagcagaccgucauccccaacaucggcucccgcccccgcguccgcaacauccccucccgcaucuccaucuacuggaccaucgucaagcccggcgacauccuccucaucaacuccaccggcaaccucaucgccccccgcggcuacuucaagauccgcuccggcaaguccuccaucaugcgcuccgacgcccccaucggcaagugcaacuccgagugcaucacccccaacggcuccauccccaacgacaagcccuuccagaacgucaaccgcaucaccuacggcgccugcccccgcuacgucaagcagaacacccucaagcucgccaccggcaugcgcaacguccccgagaagcagacccgcggcaucuucggcgccaucgccggcuucaucgagaacggcugggagggcauggucgacggcugguacggcuuccgccaccagaacuccgagggcaucggccaggccgccgaccucaaguccacccaggccgccaucgaccagaucaacggcaagcucaaccgccucaucggcaagaccaacgagaaguuccaccagaucgagaaggaguucuccgaggucgagggccgcauccaggaccucgagaaguacgucgaggacaccaagaucgaccucugguccuacaacgccgagcuccucgucgcccucgagaaccagcacaccaucgaccucaccgacuccgagaugaacaagcucuucgagaagaccaagaagcagcuccgcgagaacgccgaggacaugggcaacggcugcuucaagaucuaccacaagugcgacaacgccugcaucggcuccauccgcaacggcaccuacgaccacgaggucuaccgcgacgaggcccucaacaaccgcuuccagaucaagggcgucgagcucaaguccggcuacaaggacuggauccucuggaucuccuucgccaucuccugcuuccuccucugcgucgcccuccucggcuucaucaugugggccugccagaagggcaacauccgcugcaacaucugcaucuga

SEQ ID NO: 98615 - RNA, 1701 nt, Artificial Sequence; identical to SEQ ID NO: 98470
  derived and/or modified CDS sequence (opt2) from hemagglutinin__InfluenzaA__ACN76500

SEQ ID NO: 98616 - RNA, 1701 nt, Artificial Sequence; identical to SEQ ID NO: 98470
  derived and/or modified CDS sequence (opt2) from hemagglutinin__InfluenzaA__ACN76511

SEQ ID NO: 98617 - RNA, 1701 nt, Artificial Sequence; identical to SEQ ID NO: 98470
  derived and/or modified CDS sequence (opt2) from hemagglutinin__InfluenzaA__ACN76522

SEQ ID NO: 98618 - RNA, 1701 nt, Artificial Sequence; identical to SEQ ID NO: 98470
  derived and/or modified CDS sequence (opt2) from hemagglutinin__InfluenzaA__ACO36331

SEQ ID NO: 98619 - RNA, 1701 nt, Artificial Sequence
  derived and/or modified CDS sequence (opt2) from hemagglutinin__InfluenzaA__ACO36342
augaagaccaucaucgcccucuccuacauccucugccucgucuucgcccagaaguuccccggcaacgacaacuccaccgccacccucugccucggccaccacgccguccccaacggcaccaucgucaagaccaucaccaacgaccagaucgaggucaccaacgccaccgagcucguccaguccuccuccaccggcgagaucugcgacuccccccaccagauccucgacggcgagaacugcacccucaucgacgcccuccucggcgacccccagugcgacggcuuccagaacaagaacugggaccucuucgucgagcgcuccaaggccuacuccaacugcuaccccuacgacguccccgacuacgccucccuccgcucccucgucgccuccuccggcacccucgaguucaacaacgaguccuucaacuggaccggcgucacccagaacggcaccuccuccgccugcauccgccgcuccaacaacuccuucuucucccgccucaacuggcucacccacuccaaguucaaguaccccgcccucaacgucaccaugcccaacaacgagaacuucgacaagcucuacaucuggggcguccaccaccccggcaccgacaacgaccagaucuuccucuacgcccaggccuccggccgcaucaccgucuccaccaagcgcucccagcagaccgucauccccaacaucggcucccgcccccgcguccgcaacauccccucccgcaucuccaucuacuggaccaucgucaagcccggcgacauccuccucaucaacuccaccggcaaccucaucgccccccgcggcuacuucaagauccgcuccggcaaguccuccaucaugcgcuccgacgcccccaucggcaagugcaacuccgagugcaucacccccaacggcuccauccccaacgacaagcccuuccagaacgucaaccgcaucaccuacggcgccugcccccgcuacgucaagcagaacacccucaagcucgccaccggcaugcgcaacguccccgagaagcagacccgcggcaucuucggcgccaucgccggcuucaucgagaacggcugggagggcauggucgacggcugguacggcuuccgccaccagaacuccgagggcaucggccaggccgccgaccucaaguccacccaggccgccaucgaccagaucaacggcaagcucaaccgccucaucggcaagaccaacgagaaguuccaccagaucgagaaggaguucuccgagaucgagggccgcauccaggaccucgagaaguacgucgaggacaccaagaucgaccucugguccuacaacgccgagcuccucgucgcccucgagaaccagcacaccaucgaccucaccgacuccgagaugaacaagcucuucgagaagaccaagaagcagcuccgcgagaacgccgaggacaugggcaacggcugcuucaagaucuaccacaagugcgacaacgccugcaucggcuccauccgcaacggcaccuacgaccacgacgucuaccgcgacgaggcccucaacaaccgcuuccagaucaagggcgucgagcucaaguccggcuacaaggacuggauccucuggaucuccuucgccaucuccugcuuccuccucugcaucgcccuccucggcuucaucaugugggccugccagaagggcaacauccgcugcaacaucugcaucuga

SEQ ID NO: 98620 - RNA, 1701 nt, Artificial Sequence
  derived and/or modified CDS sequence (opt2) from hemagglutinin__InfluenzaA__ACO36364
augaagaccaucaucgcccucuccuacauccucugccucgucuucgcccagaagcuccccggcaacgacaacuccaccgccacccucugccucggccaccacgccguccccaacggcaccaucgucaagaccaucaccaacgaccagaucgaggucaccaacgccaccgagcucguccaguccuccuccaccggcgagaucugcgacuccccccaccagauccucgacggcgagaacugcacccucaucgacgcccuccucggcgacccccagugcgacggcuuccagaacaagaagugggaccucuucgucgagcgcuccaaggccuacuccaacugcuaccccuacgacguccccgacuacgccucccuccgcucccucgucgccuccuccggcacccucgaguucaacaacgaguccuucaacuggaccggcgucacccagaacggcaccuccuccgccugcauccgccgcuccaacaacuccuucuucucccgccucaacuggcucacccaccucaaguucaaguaccccgcccucaacgucaccaugcccaacaacgagaaguucgacaagcucuacaucuggggcguccaccaccccggcaccgacaacgaccagaucuuccucuacgcccaggccuccggccgcaucaccgucuccaccaagcgcucccagcagaccgucauccccaacaucggcucccgcccccgcguccgcaacauccccucccgcaucuccaucuacuggaccaucgucaagcccggcgacauccuccucaucaacuccaccggcaaccucaucgccccccgcggcuacuucaagauccgcuccggcaaguccuccaucaugcgcuccgacgcccccaucggcaagugcaacuccgagugcaucacccccaacggcuccauccccaacgacaagcccuuccagaacgucaaccgcaucaccuacggcgccugcccccgcuacgucaagcagaacacccucaagcucgccaccggcaugcgcaacguccccgagaagcagacccgcggcaucuucggcgccaucgccggcuucaucgagaacggcugggagggcauggucgacggcugguacggcuuccgccaccagaacuccgagggcaccggccaggccgccgaccucaaguccacccaggccgccaucgaccagaucaacggcaagcucaaccgccucaucggcaagaccaacgagaaguuccaccagaucgagaaggaguucuccgaggucgagggccgcauccaggaccucgagaaguacgucgaggacaccaagaucgaccucugguccuacaacgccgagcuccucgucgcccucgagaaccagcacaccaucgaccucaccgacuccgagaugaacaagcucuucgagaagaccaagaagcagcuccgcgagaacgccgaggacaugggcaacggcugcuucaagaucuaccacaagugcgacaacgccugcaucggcuccauccgcaacggcaccuacgaccacgacgucuaccgcgacgaggcccucaacaaccgcuuccagaucaagggcgucgagcucaaguccggcuacaaggacuggauccucuggaucuccuucgccaucuccugcuuccuccucugcgucgcccuccucggcuucaucaugugggccugccagaagggcaacauccgcugcaacaucugcaucuga

SEQ ID NO: 98621 - RNA, 1701 nt, Artificial Sequence; identical to SEQ ID NO: 98337
  derived and/or modified CDS sequence (opt2) from hemagglutinin__InfluenzaA__ACO36375

SEQ ID NO: 98622 - RNA, 1698 nt, Artificial Sequence; identical to SEQ ID NO: 98524
  derived and/or modified CDS sequence (opt2) from hemagglutinin__InfluenzaA__ACO36397

SEQ ID NO: 98623 - RNA, 1701 nt, Artificial Sequence; identical to SEQ ID NO: 98337
  derived and/or modified CDS sequence (opt2) from hemagglutinin__InfluenzaA__ACO36408

SEQ ID NO: 98624 - RNA, 1701 nt, Artificial Sequence; identical to SEQ ID NO: 97964
  derived and/or modified CDS sequence (opt2) from hemagglutinin__InfluenzaA__ACO36419

SEQ ID NO: 98625 - RNA, 1701 nt, Artificial Sequence; identical to SEQ ID NO: 97964
  derived and/or modified CDS sequence (opt2) from hemagglutinin__InfluenzaA__ACO36430

SEQ ID NO: 98626 - RNA, 1701 nt, Artificial Sequence
  derived and/or modified CDS sequence (opt2) from hemagglutinin__InfluenzaA__ACO36441
augaagaccaucaucgcccucuccuacauccucugccucgucuucgcccagaagcuccccggcaacgacaacuccaccgccacccucugccucggccaccacgccguccccaacggcaccaucgucaagaccaucaccaacgaccagaucgaggucaccaacgccaccgagcucguccaguccuccuccaccggcggcaucugcgacuccccccaccagauccucgacggcgagaacugcacccucaucgacgcccuccucggcgacccccagugcgacggcuuccagaacaagaagugggaccucuucgucgagcgcuccaaggccuacuccaacugcuaccccuacgacguccccgacuacgccucccuccgcucccucgucgccuccuccggcacccucgaguucaacaacgaguccuucgacuggaccggcgucacccagaacggcaccuccuccgccugcaagcgccgcuccaacaaguccuucuucucccgccucaacuggcucacccaccucaaguacaaguaccccgcccucaacgucaccaugcccaacaacgagaaguucgacaagcucuacaucuggggcguccaccaccccggcaccgacuccgaccagaucucccucuacgcccaggccuccggccgcaucaccgucuccaccaagcgcucccagcagaccgucauccccaacaucggcucccgcccccgcguccgcgacgucuccucccgcaucuccaucuacuggaccaucgucaagcccggcgacauccuccucaucaacuccaccggcaaccucaucgccccccgcggcuacuucaagauccgcuccggcaaguccuccaucaugcgcuccgacgcccccaucggcaagugcaacuccgagugcaucacccccaacggcuccauccccaacgacaagcccuuccagaacgucaaccgcaucaccuacggcgccugcccccgcuacgucaagcagaacacccucaagcucgccaccggcaugcgcaacguccccgagaagcagacccgcggcaucuucggcgccaucgccggcuucaucgagaacggcugggagggcauggucgacggcugguacggcuuccgccaccagaacuccgagggcaccggccaggccgccgaccucaaguccacccaggccgccaucaaccagaucaacggcaagcucaaccgccucaucggcaagaccaacgagaaguuccaccagaucgagaaggaguucuccgaggucgagggccgcauccaggaccucgagaaguacgucgaggacaccaagaucgaccucugguccuacaacgccgagcuccucgucgcccucgagaaccagcacaccaucgaccucaccgacuccgagaugaacaagcucuucgagcgcaccaagaagcagcuccgcgagaacgccgaggacaugggcaacggcugcuucaagaucuaccacaagugcgacaacgccugcaucggcuccauccgcaacggcaccuacgaccacgacgucuaccgcgacgaggcccucaacaaccgcuuccagaucaagggcgucgagcucaaguccggcuacaaggacuggauccucuggaucuccuucgccaucuccugcuuccuccucugcgucgcccuccucggcuucaucaugugggccugccagaagggcaacauccgcugcgacaucugcaucuga

SEQ ID NO: 98627 - RNA, 1701 nt, Artificial Sequence
  derived and/or modified CDS sequence (opt2) from hemagglutinin__InfluenzaA__ACO36452
augaagaccaucaucgcccucuccuacauccucugccucgucuucgcccagaagcuccccggcaacgacaacuccaccgccacccucugccucggccaccacgccguccccaacggcaccaucgucaagaccaucaccaacgaccagaucgaggucaccaacgccaccgagcucguccaguccuccuccaccggcggcaucugcgacuccccccaccagauccucgacggcgagaacugcacccucaucgacgcccuccucggcgacccccagugcgacggcuuccagaacaagaagugggaccucuucgucgagcgcuccaaggccuacuccaacugcuaccccuacgacguccccgacuacgccucccuccgcucccucgucgccuccuccggcacccucgaguucaacaacgaguccuucgacuggaccggcgucacccagaacggcaccuccuccuccugcaagcgccgcuccaacaacuccuucuucucccgccucaacuggcucacccaccucaaguacaaguaccccgcccucaacgucaccaugcccaacaacgagaaguucgacaagcucuacaucuggggcguccaccaccccggcaccgacuccgaccagaucucccucuacgcccaggccuccggccgcaucaccaucuccaccaagcgcucccagcagaccgucauccccaacaucggcucccgcccccgcguccgcgacgucuccucccgcaucuccaucuacuggaccaucgucaagcccggcgacauccuccucaucaacuccaccggcaaccucaucgccccccgcggcuacuucaagauccgcuccggcaaguccuccaucaugcgcuccgacgcccccaucggcaagugcaacuccgagugcaucacccccaacggcuccauccccaacgacaagcccuuccagaacgucaaccgcaucaccuacggcgccugcccccgcuacgucaagcagaacacccucaagcucgccaccggcaugcgcaacguccccgagaagcagacccgcggcaucuucggcgccaucgccggcuucaucgagaacggcugggagggcauggucgacggcugguacggcuuccgccaccagaacuccgagggcaccggccaggccgccgaccucaaguccacccaggccgccaucaaccagaucaacggcaagcucaaccgccucaucggcaagaccaacgagaaguuccaccagaucgagaaggaguucuccgaggucgagggccgcauccaggaccucgagaaguacgucgaggacaccaagaucgaccucugguccuacaacgccgagcuccucgucgcccucgagaaccagcacaccaucgaccucaccgacuccgagaugaacaagcucuucgagcgcaccaagaagcagcuccgcgagaacgccgaggacaugggcaacggcugcuucaagaucuaccacaagugcgacaacgccugcaucggcuccauccgcaacggcaccuacgaccacgacgucuaccgcgacgaggcccucaacaaccgcuuccagaucaagggcgucgagcucaaguccggcuacaaggacuggauccucuggaucuccuucgccaucuccugcuuccuccucugcgucgcccuccucggcuucaucaugugggccugccagaagggcaacauccgcugcaacaucugcaucuga

SEQ ID NO: 98628 - RNA, 1701 nt, Artificial Sequence
  derived and/or modified CDS sequence (opt2) from hemagglutinin__InfluenzaA__ACO36463
augaagaccaucaucgcccucuccuacauccucugccucgucuucgcccagaagcuccccggcaacgacaacuccaccgccacccucugccucggccaccacgccguccccaacggcaccaucgucaagaccaucaccaacgaccagaucgaggucaccaacgccaccgagcucguccaguccuccuccaccggcggcaucugcgacuccccccaccagauccucgacggcgagaacugcacccucaucgacgcccuccucggcgacccccagugcgacggcuuccagaacaagaagugggaccucuucaucgagcgcuccaaggccuacuccaacugcuaccccuacgacguccccgacuacgccucccuccgcucccucgucgccuccuccggcacccucgaguucaacaacgaguccuucaacuggaccggcgucacccagaacggcaccuccuccgccugccagcgccgcuccaacaaguccuucuucucccgccucaacuggcucacccaccucaaguucaaguaccccgcccucaacgucaccaugcccaacaacgagaaguucgacaagcucuacaucuggggcguccaccaccccggcaccgacaacgaccagaucucccucuacgcccagaccuccggccgcaucaccgucuccaccaagcgcucccagcagaccgucauccccaacaucggcucccgcccccgcguccgcgacguccccucccgcaucuccaucuacuggaccaucgucaagcccggcgacauccuccucaucaacuccaccggcaaccucaucgccccccgcggcuacuucaagauccgcuccggcaaguccuccaucaugcgcuccgacgcccccaucggcaagugcaacuccgagugcaucacccccaacggcuccauccccaacgacaagcccuuccagaacgucaaccgcaucaccuacggcgccugcccccgcuacgucaagcagaacacccucaagcucgccaccggcaugcgcaacguccccgagcgccagacccgcggcaucuucggcgccaucgccggcuucaucgagaacggcugggagggcauggucgacggcugguacggcuuccgccaccagaacuccgagggcaccggccaggccgccgaccucaaguccacccaggccgccaucaaccagaucaacggcaagcucaaccgccucaucggcaagaccaacgagaaguuccaccagaucgagaaggaguucuccgaggucgagggccgcauccaggaccucgagaaguacgucgaggacaccaagaucgaccucugguccuacaacgccgagcuccucgucgcccucgagaaccagcacaccaucgaccucaccgacuccgagaugaacaagcucuucgagcgcaccaagaagcagcuccgcgagaacgccgaggacaugggcaacggcugcuucaagaucuaccacaagugcgacaacgccugcaucggcuccauccgcaacggcaccuacgaccacgacgucuaccgcgacgaggcccucaacaaccgcuuccagaucaagggcgucgagcucaaguccggcuacaaggacuggauccucuggaucuccuucgccaucuccugcuucguccucugcgucgcccuccucggcuucaucaugugggccugccagaagggcaacauccgcugcaacaucugcaucuga

SEQ ID NO: 98629 - RNA, 1701 nt, Artificial Sequence
  derived and/or modified CDS sequence (opt2) from hemagglutinin__InfluenzaA__ACO36474
augaagaccaucaucgcccucuccuacauccucugccucgucuucgcccagaagcuccccggcaacgacaacuccaccgccacccucugccucggccaccacgccguccccaacggcaccaucgucaagaccaucaccaacgaccagaucgaggucaccaacgccaccgagcucguccaguccuccuccaccggcggcaucugcgacuccccccaccagauccucgacggcgagaacugcacccucaucgacgcccuccucggcgacccccagugcgacggcuuccagaacaagaagugggaccucuucgucgagcgcuccaaggccuacuccaacugcuaccccuacgacguccccgacuacgccucccuccgcucccucgucgccuccuccggcacccucgaguucaacaacgaguccuucgacuggaccggcgucacccagaacggcaccuccuccuccugcaagcgccgcuccaacaacuccuucuucucccgccucaacuggcucacccaccuccgcuacaaguaccccgcccucaacgucaccaugcccaacaacgagaaguucgacaagcucuacaucuggggcguccaccaccccggcaccgacuccgaccagaucucccucuacgcccaggccuccggccgcaucaccgucuccaccaagcgcucccagcagaccgucauccccaacaucggcucccgcccccgcguccgcgacgucuccucccgcaucuccaucuacuggaccaucgucaagcccggcgacauccuccucaucaacuccaccggcaaccucaucgccccccgcggcuacuucaagauccgcuccggcaaguccuccaucaugcgcuccgacgcccccaucggcaagugcaacuccgagugcaucacccccaacggcuccauccccaacgacaagcccuuccagaacgucaaccgcaucaccuacggcgacugcccccgcuacgucaagcagaacacccucaagcucgccaccggcaugcgcaacguccccgagaagcagacccgcggcaucuucggcgccaucgccggcuucaucgagaacggcugggagggcauggucgacggcugguacggcuuccgccaccagaacuccgagggcaccggccaggccgccgaccucaaguccacccaggccgccaucaaccagaucaacggcaagcucaaccgccucaucggcaagaccaacgagaaguuccaccagaucgagaaggaguucuccgaggucgagggccgcauccaggaccucgagaaguacgucgaggacaccaagaucgaccucugguccuacaacgccgagcuccucgucgcccucgagaaccagcacaccaucgaccucaccgacuccgagaugaacaagcucuucgagcgcaccaagaagcagcuccgcgagaacgccgaggacaugggcaacggcugcuucaagaucuaccacaagugcgacaacgccugcaucggcuccauccgcaacggcaccuacgaccacgacgucuaccgcgacgaggcccucaacaaccgcuuccagaucaagggcgucgagcucaaguccggcuacaaggacuggauccucuggaucuccuucgccaucuccugcuuccuccucugcgucgcccuccucggcuucaucaugugggccugccagaagggcaacauccgcugcaacaucugcaucuga

SEQ ID NO: 98630 - RNA, 1701 nt, Artificial Sequence
  derived and/or modified CDS sequence (opt2) from hemagglutinin__InfluenzaA__ACO36496
augaagaccaucaucgcccucuccuacauccucugccucgucuucgcccagaagcuccccggcaacgacaacuccaccgccacccucugccucggccaccacgccguccccaacggcaccaucgucaagaccaucaccaacgaccagaucgaggucaccaacgccaccgagcucguccaguccuccuccaccggcggcaucugcgacuccccccaccagauccucgacggcgagaacugcacccucaucgacgcccuccucggcgacccccagugcgacggcuuccagaacaagaagugggaccucuucgucgagcgcuccaaggccuacuccaacugcuaccccuacgacguccccgacuacgccucccuccgcucccucgucgccuccuccggcacccucgaguucaacaacgaguccuucaacuggaccggcgucacccagaacggcaccuccuccgccugcaagcgccgcuccaacaacggcuucuucucccgccucaacuggcucacccaccucaaguucaaguaccccgcccucaacgucaccaugcccaacaacgagaaguucgacaagcucuacaucuggggcguccaccaccccggcaccgacaacgaccagaucucccucuacgcccaggccuccggccgcaucaccgucuccaccaagcgcucccagcagaccgucauccccaacaucggcucccgcccccgcguccgcgacaucuccucccgcaucuccaucuacuggaccaucgucaagcccggcgacauccuccucaucaacuccaccggcaaccucaucgccccccgcggcuacuucaagauccgcuccggcaaguccuccaucaugcgcuccgacgcccccaucggcaagugcaacuccgagugcaucacccccaacggcuccauccccaacgacaagcccuuccagaacgucaaccgcaucaccuacggcgccugcccccgcuacgucaagcagaacacccucaagcucgccaccggcaugcgcaacguccccgagacccagacccgcggcaucuucggcgccaucgccggcuucaucgagaacggcugggagggcauggucgacggcugguacggcuuccgccaccagaacuccgagggcaccggccaggccgccgaccucaaguccacccaggccgccaucaaccagaucaacggcaagcucaaccgccucaucggcaagaccaacgagaaguuccaccagaucgagaaggaguucuccgaggucgagggccgcauccaggaccucgagaaguacgucgaggacaccaagaucgaccucugguccuacaacgccgagcuccucgucgcccucgagaaccagcacaccaucgaccucaccgacuccgagaugaacaagcucuucgagcgcaccaagaagcagcuccgcgagaacgccgaggacaugggcaacggcugcuucaagaucuaccacaagugcgacaacgccugcaucggcuccauccgcaacggcaccuacgaccacgacgucuaccgcgacgaggcccucaacaaccgcuuccagaucaagggcgucgagcucaaguccggcuacaaggacuggauccucuggaucuccuucgccaucuccugcuuccuccucugcgucgcccuccucggcuucaucaugugggccugccagaagggcaacauccgcugcaacaucugcaucuga

SEQ ID NO: 98631 - RNA, 1701 nt, Artificial Sequence
  derived and/or modified CDS sequence (opt2) from hemagglutinin__InfluenzaA__ACO36518
augaagaccaucaucgcccucuccuacauccucugccucgucuucgcccagaagcuccccggcaacgacaacuccaccgccacccucugccucggccaccacgccguccccaacggcaccaucgucaagaccaucaccaacgaccagaucgaggucaccaacgccaccgagcucguccaguccuccuccaccggcggcaucugcgacuccccccaccagauccucgacggcgagaacugcacccucaucgacgcccuccucggcgacccccagugcgacggcuuccagaacaagaagugggaccucuucgucgagcgcuccaaggccuacuccaacugcuaccccuacgacguccccgacuacgccucccuccgcucccucgucgccuccuccggcacccucgaguucaacaacgaguccuucaacuggaccggcgucacccagaacggcaccuccuccgccugcaagcgccgcuccaacaaguccuucuucucccgccucaacuggcucacccaccucaaguucaaguaccccgcccucaacgucaccaugcccaacaacgagaaguucgacaagcucuacaucuggggcguccaccaccccggcaccgacaacgaccagaucucccucuacgcccaggccuccggccgcaucaccgucuccaccaagcgcucccagcagaccgucauccccaacaucggcucccgcccccgcguccgcgacguccccucccgcaucuccaucuacuggaccaucgucaagcccggcgacauccuccucaucaacuccaccggcaaccucaucgccccccgcggcuacuucaagauccgcuccggcaaguccuccaucaugcgcuccgacgcccccaucggcaagugcaacuccgagugcaucacccccaacggcuccauccccaacgacaagcccuuccagaacgucaaccgcaucaccuacggcaccugcccccgcuacgucaagcagaacacccucaagcucgccaccggcaugcgcaacguccccgagaagcagacccgcggcaucuucggcgccaucgccggcuucaucgagaacggcugggagggcauggucgacggcugguacggcuuccgccaccagaacuccgagggcaccggccaggccgccgaccucaaguccacccaggccgccaucaaccagaucaacggcaagcucaaccgccucaucggcaagaccaacgagaaguuccaccagaucgagaaggaguucuccgaggucgagggccgcauccaggaccucgagaaguacgucgaggacaccaagaucgaccucugguccuacaacgccgagcuccucgucgcccucgagaaccagcacaccaucgaccucaccgacuccgagaugaacaagcucuucgagcgcaccaagaagcagcuccgcgagaacgccgaggacaugggcaacggcugcuucaagaucuaccacaagugcgacaacgccugcaucggcuccauccgcaacggcaccuacgaccacgacgucuaccgcgacgaggcccucaacaaccgcuuccagaucaagggcgucgagcucaagcucggcuacaaggacuggauccucuggaucuccuucgccaucuccugcuuccuccucugcgucgcccuccucggcuucaucaugugggccugccagaagggcaacauccgcugcaacaucugcaucuga

SEQ ID NO: 98632 - RNA, 1701 nt, Artificial Sequence
  derived and/or modified CDS sequence (opt2) from hemagglutinin__InfluenzaA__ACO36551
augaagaccaucaucgcccucucccacauccucugccucgucuucgcccagaagccccccggcaacgacaacuccaccgccacccucugccucggccaccacgccguccccaacggcaccaucgucaagaccaucaccaacgaccagaucgaggucaccaacgccaccgagcucguccaguccuccuccaccggcggcaucugcgacuccccccaccagauccucgacggcgagaacugcacccucaucgacgcccuccucggcgacccccagugcgacggcuuccagaacaagaagugggaccucuucgucgagcgcuccaaggccuacuccaacugcuaccccuacgacguccccgacuacgccucccuccgcucccucgucgccuccuccggcacccucgaguucaacaacgaguccuucaacuggaccggcgucacccagaacggcaccuccuccgccugcaagcgccgcuccaacaacuccuucuucucccgccucaacuggcucacccaccucaaguucaaguaccccgcccucaacgucaccaugcccaacaacgagaaguucgacaagcucuacaucuggggcguccaccaccccggcaccgacaacgaccagaucucccucuacgcccaggccuccggccgcaucaccgucuccaccaagcgcucccagcagaccgucauccccaacaucggcucccgcccccgcguccgcgacaucuccucccgcaucuccaucuacuggaccaucgucaagcccggcgacauccuccucaucaacuccaccggcaaccucaucgccccccgcggcuacuucaagauccgcuccggcaaguccuccaucaugcgcuccgacgcccccaucggcaagugcaacuccgagugcaucacccccaacggcuccauccccaacgacaagcccuuccagaacgucaaccgcaucaccuacggcgccugcccccgcuacgucaagcagaacacccucaagcucgccaccggcaugcgcaacguccccgagacccagacccgcggcaucuucggcgccaucgccggcuucaucgagaacggcugggagggcauggucgacggcugguacggcuuccgccaccagaacuccgagggcaccggccaggccgccgaccucaaguccacccaggccgccaucaaccagaucaacggcaagcucaaccgccucaucggcaagaccaacgagaaguuccaccagaucgagaaggaguucuccgaggucgagggccgcauccaggaccucgagaaguacgucgaggacaccaagaucgaccucugguccuacaacgccgagcuccucgucgcccucgagaaccagcacaccaucgaccucaccgacuccgagaugaacaagcucuucgagcgcaccaagaagcagcuccgcgagaacgccgaggacaugggcaacggcugcuucaagaucuaccacaagugcgacaacgccugcaucggcuccauccgcaacgagaccuacgaccacgacgucuaccgcgacgaggcccucaacaaccgcuuccagaucaagggcgucgagcucaaguccggcuacaaggacuggauccucuggaucuccuucgccaucuccugcuuccuccucugcgucgcccuccucggcuucaucaugugggccugccagaagggcaacauccgcugcaacaucugcaucuga

SEQ ID NO: 98633 - RNA, 1701 nt, Artificial Sequence
  derived and/or modified CDS sequence (opt2) from hemagglutinin__InfluenzaA__ACO36562
augaagaccaucaucgcccucuccuacauccucugccucgucuucgcccagaagcuccccggcaacgacaacuccaccgccacccucugccucggccaccacgccguccccaacggcaccaucgucaagaccaucaccaacgaccagaucgaggucaccaacgccaccgagcucguccaguccuccuccaccggcggcaucugcgacuccccccaccagauccucgacggcgagaacugcacccucaucgacgcccuccucggcgacccccagugcgacggcuuccagaacaagaagugggaccucuucgucgagcgcuccaaggccuacuccaacugcuaccccuacgacguccccgacuacgccucccuccgcucccucgucgccuccuccggcacccucgaguucaacaacgaguccuucaacuggaccggcgucacccagaacggcaccuccuccgccugcaagcgccgcuccaacaacuccuucuucucccgccucaacuggcucacccaccucaaguucaaguaccccgcccucaacgucaccaugcccaacaacgagaaguucgacaagcucuacaucuggggcguccaccaccccggcaccgacaacgaccagaucucccucuacgcccaggccuccggccgcaucaccgucuccaccaagcgcucccagcagaccgucauccccaacaucggcucccgcccccgcguccgcgacauccccucccgcaucuccaucuacuggaccaucgucaagcccggcgacauccuccucaucaacuccaccggcaaccucaucgccccccgcggcuacuucaagauccgcuccggcaaguccuccaucaugcgcuccgacgcccccaucggcaagugcaacuccgagugcaucacccccaacggcuccauccccaacgacaagcccuuccagaacgucaaccgcaucaccuacggcgccugcccccgcuacgucaagcagaacacccucaagcucgccaccggcaugcgcaacguccccgagacccagacccgcggcaucuucggcgccaucgccggcuucaucgagaacggcugggagggcauggucgacggcugguacggcuuccgccaccagaacuccgagggcaccggccaggccgccgaccucaaguccacccaggccgccaucaaccagaucaacggcaagcucaaccgccucaucggcaagaccaacgagaaguuccaccagaucgagaaggaguucuccgaggucgagggccgcauccaggaccucgagaaguacgucgaggacaccaagaucgaccucugguccuacaacgccgagcuccucgucgcccucgagaaccagcacaccaucgaccucaccgacuccgagaugaacaagcucuucgagcgcaccaagaagcagcuccgcgagaacgccgaggacaugggcaacggcugcuucaagaucuaccacaagugcgacaacgccugcaucggcuccauccgcaacgagaccuacgaccacgacgucuaccgcgacgaggcccucaacaaccgcuuccagaucaagggcgucgagcucaaguccggcuacaaggacuggauccucuggaucuccuucgccaucuccugcuuccuccucugcgucgcccuccucggcuucaucaugugggccugccagaagggcaacauccgcugcaacaucugcaucuga

SEQ ID NO: 98634 - RNA, 1701 nt, Artificial Sequence
  derived and/or modified CDS sequence (opt2) from hemagglutinin__InfluenzaA__ACO36573
augaagaccaucaucgcccucuccuacauccucugccucgucuucgcccagaagcuccccggcaacgacaacuccaccgccacccucugccucggccaccacgccguccccaacggcaccaucgucaagaccaucaccaacgaccagaucgaggucaccaacgccaccgagcucguccaguccuccuccaccggcggcaucugcgacuccccccaccagauccucgacggcgagaacugcacccucaucgacgcccuccucggcgacccccagugcgacggcuuccagaacaagaagugggaccucuucgucgagcgcuccaaggccuacuccaacugcuaccccuacgacguccccgacuacgccucccuccgcucccucgucgccuccuccggcacccucgaguucaacaacgaguccuucaacuggaccggcgucacccagaacggcaccuccuccgccugcaagcgccgcuccaacaacuccuucuucucccgccucaacuggcucacccaccucaaguucaaguaccccgcccucaacgucaccaugcccaacaacgagaaguucgacaagcucuacaucuggggcguccaccaccccggcaccgacaacgaccagaucucccucuacgcccaggccuccggccgcaucaccgucuccaccaagcgcucccagcagaccgucauccccaacaucggcucccgcccccgcguccgcgacaucuccucccgcaucuccaucuacuggaccaucgucaagcccggcgacauccuccucaucaacuccaccggcaaccucaucgccccccgcggcuacuucaagauccgcuccggcaaguccuccaucaugcgcuccgacgcccccaucggcaagugcaacuccgagugcaucacccccaacggcuccauccccaacgacaagcccuuccagaacgucaaccgcaucaccuacggcgccugcccccgcuacgucaagcagaacacccucaagcucgccaccggcaugcgcaacguccccgagacccagacccgcggcaucuucggcgccaucgccggcuucaucgagaacggcugggagggcauggucgacggcugguacggcuuccgccaccagaacuccgagggcaccggccaggccgccgaccucaaguccacccaggccgccaucaaccagaucaacggcaagcucaaccgccucaucggcaagaccaacgagaaguuccaccagaucgagaaggaguucuccgaggucgagggccgcauccaggaccucgagaaguacgucgaggacaccaagaucgaccucugguccuacaacgccgagcuccucgucgcccucgagaaccagcacaccaucgaccucaccgacuccgagaugaacaagcucuucgagcgcaccaagaagcagcuccgcgagaacgccgaggacaugggcaacggcugcuucaagaucuaccacaagugcgacaacgccugcaucggcuccauccgcaacgagaccuacgaccacgacgucuaccgcgacgaggcccucaacaaccgcuuccagaucaagggcgucgagcucaaguccggcuacaaggacuggauccucuggaucuccuucgccaucuccugcuuccuccucugcgucgcccuccucggcuucaucaugugggccugccagaagggcaacauccgcugcaacaucugcaucuga

SEQ ID NO: 98635 - RNA, 1701 nt, Artificial Sequence
  derived and/or modified CDS sequence (opt2) from hemagglutinin__InfluenzaA__ACO36584
augaagaccaucaucgcccucuccuacauccucugccucgucuucucccagaagcuccccggcaacgacaacuccaccgccacccucugccucggccaccacgccguccccaacggcaccaucgucaagaccaucaccaacgaccagaucgaggucaccaacgccaccgagcucguccaguccuccuccaccggcggcaucugcgacuccccccaccagauccucgacggcgagaacugcacccucaucgacgcccuccucggcgacccccagugcgacggcuuccagaacaagaagugggaccucuucgucgagcgcuccaaggccuacuccaacugcuaccccuacgacguccccgacuacgccucccuccgcucccucgucgccuccuccggcacccucgaguucaacaacgaguccuucaacuggaccggcgucacccagaacggcaccuccuccgccugcaagcgccgcuccaacaacuccuucuucucccgccucaacuggcucacccaccucaaguucaaguaccccgcccucaacgucaccaugcccaacaacgagaaguucgacaagcucuacaucuggggcguccaccaccccggcaccgacaacgaccagaucucccucuacgcccaggccuccggccgcaucaccgucuccaccaagaagucccagcagaccgucauccccaacaucggcucccgcccccgcguccgcgacaucuccucccgcaucuccaucuacuggaccaucgucaagcccggcgacauccuccucaucaacuccaccggcaaccucaucgccccccgcggcuacuucaagauccgcuccggcaaguccuccaucaugcgcuccgacgcccccaucggcaagugcaacuccgagugcaucacccccaacggcuccauccccaacgacaagcccuuccagaacgucaaccgcaucaccuacggcgccugcccccgcuacgucaagcagaacacccucaagcucgccaccggcaugcgcaacguccccgagacccagacccgcggcaucuucggcgccaucgccggcuucaucgagaacggcugggagggcauggucgacggcugguacggcuuccgccaccagaacuccgagggcaccggccaggccgccgaccucaaguccacccaggccgccaucaaccagaucaacggcaagcucaaccgccucaucggcaagaccaacgagaaguuccaccagaucgagaaggaguucuccgaggucgagggccgcauccaggaccucgagaaguacgucgaggacaccaagaucgaccucugguccuacaacgccgagcuccucgucgcccucgagaaccagcacaccaucgaccucaccgacuccgagaugaacaagcucuucgagcgcaccaagaagcagcuccgcgagaacgccgaggacaugggcaacggcugcuucaagaucuaccacaagugcgacaacgccugcaucggcuccauccgcaacgagaccuacgaccacgacgucuaccgcgacgaggcccucaacaaccgcuuccagaucaagggcgucgagcucaaguccggcuacaaggacuggauccucuggaucuccuucgccaucuccugcuuccuccucugcgucgcccuccucggcuucaucaugugggccugccagaagggcaacauccgcugcaacaucugcaucuga

SEQ ID NO: 98636 - RNA, 1701 nt, Artificial Sequence; identical to SEQ ID NO: 96666
  derived and/or modified CDS sequence (opt2) from hemagglutinin__InfluenzaA__ACO36595

SEQ ID NO: 98637 - RNA, 1701 nt, Artificial Sequence
  derived and/or modified CDS sequence (opt2) from hemagglutinin__InfluenzaA__ACO36606
augaagaccaucaucgcccucuccuacauccucugccucgucuucgcccagaagcuccccggcaacgacaacuccaccgccacccucugccucggccaccacgccguccccaacggcaccaucgucaagaccaucaccaacgaccagaucgaggucaccaacgccaccgagcucguccaguccuccuccaccggcggcaucugcgacuccccccaccagauccucgacggcgagaacugcacccucaucgacgcccuccucggcgacccccagugcgacggcuuccagaacaagaagugggaccucuucgucgagcgcuccaaggccuacuccaacugcuaccccuacgacguccccgacuacgccucccuccgcucccucgucgccuccuccggcacccucgaguucaagaacgaguccuucaacuggaccggcgucacccagaacggcaccuccuccgccugcaagcgccgcuccaacaacuccuucuucucccgccucaacuggcucacccaccucaaguucaaguaccccgcccucaacgucaccaugcccaacaacgagaaguucgacaagcucuacaucuggggcguccaccaccccggcaccgacaacgaccagaucuuccucuacgcccaggccuccggccgcaucaccgucuccacccagcgcucccagcagaccgucauccccaacaucggcucccgcccccgcguccgcaacauccccucccgcaucuccaucuacuggaccaucgucaagcccggcgacauccuccucaucaacuccaccggcaaccucaucgccccccgcggcuacuucaagauccgcuccggcaaguccuccaucaugcgcuccgacgcccccaucggcaagugcaacuccgagugcaucacccccaacggcuccauccccaacgacaagcccuuccagaacgucaaccgcaucaccuacggcgccugcccccgcuacgucaagcagaacacccucaagcucgccaccggcaugcgcaacguccccgagaagcagacccgcggcaucuucggcgccaucgccggcuucaucgagaacggcugggagggcauggucgacggcugguacggcuuccgccaccagaacuccgagggcaucggccaggccgccgaccucaaguccacccaggccgccaucaaccagaucaacggcaagcucaaccgccucaucggcaagaccaacgagaaguuccaccagaucgagaaggaguucuccgaggucgagggccgcauccaggaccucgagaaguacgucgaggacaccaagaucgaccucugguccuacaacgccgagcuccucgucgcccucgagaaccagcacaccaucgaccucaccgacuccgagaugaacaagcucuucgagcgcaccaagaagcagcuccgcgagaacgccgaggacaugggcaacggcugcuucaagaucuaccacaagugcgacaacgccugcaucggcuccauccgcaacggcaccuacgaccacgacgucuaccgcgacgaggcccucaacaaccgcuuccagaucaagggcgucgagcucaaguccggcuacaaggacuggauccucuggaucuccuucgccaucuccugcuuccuccucugcgucgcccuccucggcuucaucaugugggccugccagaagggcaacauccgcugcaacaucugcaucuga

SEQ ID NO: 98638 - RNA, 1701 nt, Artificial Sequence; identical to SEQ ID NO: 96666
  derived and/or modified CDS sequence (opt2) from hemagglutinin__InfluenzaA__ACO36617

SEQ ID NO: 98639 - RNA, 1701 nt, Artificial Sequence; identical to SEQ ID NO: 96666
  derived and/or modified CDS sequence (opt2) from hemagglutinin__InfluenzaA__ACO36628

SEQ ID NO: 98640 - RNA, 1701 nt, Artificial Sequence
  derived and/or modified CDS sequence (opt2) from hemagglutinin__InfluenzaA__ACO36639
augaagaccaucaucgcccucuccuacauccucugccucgucuucgcccagaagcuccccggcaacgacaacuccaccgccacccucugccucggccaccacgccguccccaacggcaccaucgucaagaccaucaccaacgaccagaucgaggucaccaacgccaccgagcucguccaguccuccuccaccggcggcaucugcgacuccccccaccagauccucgacggcgagaacugcacccucaucgacgcccuccucggcgacccccagugcgacggcuuccagaacaagaagugggaccucuucgucgagcgcuccaaggccuacuccaacugcuaccccuacgacguccccgacuacgccucccuccgcucccucgucgccuccuccggcacccucgaguucaacaacgaguccuucaacuggaccggcgucacccagaacggcaccuccuccgccugcaagcgccgcuccaacaacuccuucuucucccgccucaacuggcucacccaccucaaguucaaguaccccgcccucaacgucaccaugcccaacaacgagaaguucgacaagcucuacaucuggggcguccaccaccccggcaccgacaacgaccagaucuuccucuacgcccaggccuccggccgcaucaccgucuccaccaagcgcucccagcagaccgucauccccaacaucggcucccgcccccgcguccgcaacauccccucccgcaucuccaucuacuggaccaucgucaagcccggcgacauccuccucaucaacuccaccggcaaccucaucgccccccgcggcuacuucaagauccgcuccggcaaguccuccaucaugcgcuccgacgcccccaucggcaagugcaacuccgagugcaucacccccaacggcuccauccccaacgacaagcccuuccagaacgucaaccgcaucaccuacggcgccugcccccgcuacgucaagcagaacacccucaagcucgccaccggcaugcgcaacguccccgagaagcagacccgcggcaucuucggcgccaucgccggcuucaucgagaacggcugggagggcauggucgacggcugguacggcuuccgccaccagaacuccgagggcaucggccaggccgccgaccucaaguccacccaggccgccaucaaccagaucaacggcaagcucaaccgccucaucggcaagaccaacgagaaguuccaccagaucgagaaggaguucuccgaggucgagggccgcauccaggaccucgagaaguacgucgaggacaccaagaucgaccucugguccuacaacgccgagcuccucgucgcccucgagaaccagcacaccaucgaccucaccgacuccgagaugaacaagcucuucgagcgcaccaagaagcagcuccgcgagaacgccgaggacaugggcaacggcugcuucaagaucuaccacaagugcgacaacgccugcaucggcuccauccgcaacggcaccuacgaccacgacgucuaccgcgacgaggcccucaacaaccgcuuccagaucaagggcgucgagcucaaguccggcuacaaggacuggauccucuggaucuccuucgccaucuccugcuuccuccucugcuucgcccuccucggcuucaucaugugggccugccagaagggcaacauccgcugcaacaucugcaucuga

SEQ ID NO: 98641 - RNA, 1701 nt, Artificial Sequence
  derived and/or modified CDS sequence (opt2) from hemagglutinin__InfluenzaA__ACO36661
augaagaccaucaucgcccucuccuacauccucugccucgucuucgcccagaagcuccccggcaacgacaacuccaccgccacccucugccucggccaccacgccguccccaacggcaccaucgucaagaccaucaccaacgaccagaucgaggucaccaacgccaccgagcucguccaguccuccuccaccggcggcaucugcgacuccccccaccagauccucgacggcgagaacugcacccucaucgacgcccuccucggcgacccccagugcgacggcuuccagaacaagaagugggaccucuucgucgagcgcuccaaggccuacuccaacugcuaccccuacgacguccccgacuacgccucccuccgcucccucgucgccuccuccggcacccucgaguucaacaacgaguccuucaacuggaccggcgucacccagaacggcaccuccuccgccugcaagcgccgcuccaacaacuccuucuucucccgccucaacuggcucacccaccucaaguucaaguaccccgcccucaacgucaccaugcccaacaacgagaaguucgacaagcucuacaucuggggcguccaccaccccggcaccgacaacgaccagaucuuccucuacgcccaggccuccggccgcaucaccgucuccaccaagcgcucccagcagaccgucauccccaacaucggcucccgcccccgcguccgcaacauccccucccgcaucuccaucuacuggaccaucgucaagcccggcgacauccuccucaucaacuccaccggcaaccucaucgccccccgcggcuacuucaagauccgcuccggcaaguccuccaucaugcgcuccgacgcccccaucggcaagugcaacuccgagugcaucacccccaacggcuccauccccaacgacaagcccuuccagaacgucaaccgcaucaccuacggcgccugcccccgcuacgucaagcagaacacccucaagcucgccaccggcaugcgcaacguccccgagaagcagacccgcggcaucuucggcgccaucgccggcuucaucgagaacggcugggagggcauggucgacggcugguacggcuuccgccaccagaacuccgagggcaucggccaggccgccgaccucaaguccacccaggccgccaucaaccagaucaacggcaagcucaaccgccucaucggcaagaccaacgagaaguuccaccagaucgagaaggaguucuccgaggucgagggccgcauccaggaccucgagaaguacgucgaggacaucaagaucgaccucugguccuacaacgccgagcuccucgucgcccucgagaaccagcacaccaucgaccucaccgacuccgagaugaacaagcucuucgagcgcaccaagaagcagcuccgcgagaacgccgaggacaugggcaacggcugcuucaagaucuaccacaagugcgacaacgccugcaucggcuccauccgcaacggcaccuacgaccacgacgucuaccgcgacgaggcccucaacaaccgcuuccagaucaagggcgucgagcucaaguccggcuacaaggacuggauccucuggaucuccuucgccaucuccugcuuccuccucugcgucgcccuccucggcuucaucaugugggccugccagaagggcaacauccgcugcaacaucugcaucuga

SEQ ID NO: 98642 - RNA, 1701 nt, Artificial Sequence; identical to SEQ ID NO: 96666
  derived and/or modified CDS sequence (opt2) from hemagglutinin__InfluenzaA__ACO36683

SEQ ID NO: 98643 - RNA, 1701 nt, Artificial Sequence; identical to SEQ ID NO: 98633
  derived and/or modified CDS sequence (opt2) from hemagglutinin__InfluenzaA__ACO37122

SEQ ID NO: 98644 - RNA, 1701 nt, Artificial Sequence
  derived and/or modified CDS sequence (opt2) from hemagglutinin__InfluenzaA__ACO94514
augaagaccaucaucgcccucuccuacauccucugccucgucuucgcccagaagcuccccggcaacgacaacuccaccgccacccucugccucggccaccacgccguccccaacggcaccaucgucaagaccaucaccaacgaccagaucgaggucaccaacgccaccgagcucguccaguccuccuccaccggcgagaucugcgacuccccccaccagauccucgacggcgagaacugcacccucaucgacgcccuccucggcgacccccagugcgacggcuuccagaacaagaagugggaccucuucgucgagcgcuccaaggccuacuccaacugcuaccccuacgacguccccgacuacgccucccuccgcucccucgucgccuccuccggcacccucgaguucaacaacgaguccuucaacuggaccggcgucacccagaacggcaccuccuccgccugcauccgcaaguccaacaacuccuucuucucccgccucaacuggcucacccaccucaaguucaaguaccccgcccucaacgucaccaugcccaacaacgagcaguucgacaagcucuacaucuggggcguccaccaccccggcaccgacaacgaccagaucuuccucuacgcccaggccuccggccgcaucaccgucuccaccaagcgcucccagcagaccgucauccccaacaucggcucccgcccccgcguccgcaacauccccucccgcaucuccaucuacuggaccaucgucaagcccggcgacauccuccucaucaacuccaccggcaaccucaucgccccccgcggcuacuucaagauccgcuccggcaaguccuccaucaugcgcuccgacgcccccaucggcaagugcaacuccgagugcaucacccccaacggcuccauccccaacgacaagcccuuccagaacgucaaccgcaucaccuacggcgccugcccccgcuacgucaagcagaacacccucaagcucgccaccggcaugcgcaacguccccgagaagcagacccgcggcaucuucggcgccaucgccggcuucaucgagaacggcugggagggcauggucgacggcugguacggcuuccgccaccagaacuccgagggccgcggccaggccgccgaccucaaguccacccaggccgccaucgaccagaucaacggcaagcucaaccgccucaucggcaagaccaacgagaaguuccaccagaucgagaaggaguucuccgaggucgagggccgcauccaggaccucgagaaguacgucgaggacaccaagaucgaccucugguccuacaacgccgagcuccucgucgcccucgagaaccagcacaccaucgaccucaccgacuccgagaugaacaagcucuucgagaagaccaagaagcagcuccgcgagaacgccgaggacaugggcaacggcugcuucaagaucuaccacaagugcgacaacgccugcaucggcuccauccgcaacggcaccuacgaccacgacgucuaccgcgacgaggcccucaacaaccgcuuccagaucaagggcgucgagcucaaguccggcuacaaggacuggauccucuggaucuccuucgccaucuccugcuuccuccucugcgucgcccuccucggcuucaucaugugggccugccagaagggcaacauccgcugcaacaucugcaucuga

SEQ ID NO: 98645 - RNA, 1701 nt, Artificial Sequence
  derived and/or modified CDS sequence (opt2) from hemagglutinin__InfluenzaA__ACO94515
augaagaccaucaucgcccucuccuacauccucugccucgucuucgcccagaagcuccccggcaacgacaacuccaccgccacccucugccucggccaccacgccguccccaacggcaccaucgucaagaccaucaccaacgaccagaucgaggucaccaacgccaccgagcucguccaguccuccuccaccggcgagaucugcgacuccccccaccagauccucgacggcgagaacugcacccucaucgacgcccuccucggcgacccccagugcgacggcuuccagaacaagaagugggaccucuucgucgagcgcuccaaggccuacuccaacugcuaccccuacgacguccccgacuacgccucccuccgcucccucgucgccuccuccggcacccucgaguucaacaacgaguccuucaacuggaccggcgucacccagaacggcaccuccuccgccugcauccgcaaguccaacaacuccuucuucucccgccucaacuggcucacccaccucaaguucaaguaccccgcccucaacgucaccaugcccaacaacgagcaguucgacaagcucuacaucuggggcguccaccaccccggcaccgacaacgaccagaucuuccucuacgcccaggccuccggccgcaucaccgucuccaccaagcgcucccagcagaccgucauccccaacaucggcucccgcccccgcguccgcaacauccccucccgcaucuccaucuacuggaccaucgucaagcccggcgacauccuccucaucaacuccaccggcaaccucaucgccccccgcggcuacuucaagauccgcuccggcaaguccuccaucaugcgcuccgacgcccccaucggcaagugcaacuccgagugcaucacccccaacggcuccauccccaacgacaagcccuuccagaacgucaaccgcaucaccuacggcgccugcccccgcuacgucaagcagaacacccucaagcucgccaccggcaugcgcaacguccccgagaagcagacccgcggcaucuucggcgccaucgccggcuucaucgagaacggcugggagggcaugauggacggcugguacggcuuccgccaccagaacuccgagggccgcggccaggccgccgaccucaaguccacccaggccgccaucgaccagaucaacggcaagcucaaccgccucaucggcaagaccaacgagaaguuccaccagaucgagaaggaguucuccgaggucgagggccgcauccaggaccucgagaaguacgucgaggacaccaagaucgaccucugguccuacaacgccgagcuccucgucgcccucgagaaccagcacaccaucgaccucaccgacuccgagaugaacaagcucuucgagaagaccaagaagcagcuccgcgagaacgccgaggacaugggcaacggcugcuucaagaucuaccacaagugcgacaacgccugcaucggcuccauccgcaacggcaccuacgaccacgacgucuaccgcgacgaggcccucaacaaccgcuuccagaucaagggcgucgagcucaaguccggcuacaaggacuggauccucuggaucuccuucgccaucuccugcuuccuccucugcgucgcccuccucggcuucaucaugugggccugccagaagggcaacauccgcugcaacaucugcaucuga

SEQ ID NO: 98646 - RNA, 1701 nt, Artificial Sequence; identical to SEQ ID NO: 98470
  derived and/or modified CDS sequence (opt2) from hemagglutinin__InfluenzaA__ACO94516

SEQ ID NO: 98647 - RNA, 1701 nt, Artificial Sequence; identical to SEQ ID NO: 98470
  derived and/or modified CDS sequence (opt2) from hemagglutinin__InfluenzaA__ACO94672

SEQ ID NO: 98648 - RNA, 1701 nt, Artificial Sequence
  derived and/or modified CDS sequence (opt2) from hemagglutinin__InfluenzaA__ACO94683
augaagaccaucaucgcccucuccuacauccucugccucgucuccgcccagaagcuccccggcaacgacaacuccaccgccacccucugccucggccaccacgccguccccaacggcaccaucgucaagaccaucaccaacgaccagaucgaggucaccaacgccaccgagcucguccaguccuccuccaccggcgagaucugcgacuccccccaccagguccucgacggcgagaacugcacccucaucgacgcccuccucggcgacccccagugcgacggcuuccagaacaagaagugggaccucuucgucgagcgcuccaaggccuacuccaacugcuaccccuacgacguccccgacuacgccucccuccgcucccucgucgccuccuccggcacccucgaguucaacaacgaguccuucaacuggaccggcgucacccagaacggcaccuccuccgccugcauccgccgcuccaacaacuccuucuucucccgccucaacuggcucacccacuccaaguucaaguaccccgcccucaacgucaccaugcccaacaacgaggaguucgacaagcucuacaucuggggcguccaccaccccggcaccgacaacgaccagaucuuccucuacgcccaggccuccggccgcaucaccgucuccaccaagcgcucccagcagaccgucauccccaacaucggcucccgcccccgcguccgcaacauccccucccgcaucuccaucuacuggaccaucgucaagcccggcgacauccuccucaucaacuccaccggcaaccucaucgccccccgcggcuacuucaagauccgcuccggcaaguccuccaucaugcgcuccgacgcccccaucggcaagugcaacuccgagugcaucacccccaacggcuccauccccaacgacaagcccuuccagaacgucaaccgcaucaccuacggcgccugcccccgcuacgucaagcagaacacccucaagcucgccaccggcaugcgcaacguccccgagaagcagacccgcggcaucuucggcgccaucgccggcuucaucgagaacggcugggagggcauggucgacggcugguacggcuuccgccaccagaacuccgagggcaucggccaggccgccgaccucaaguccacccaggccgccaucgaccagaucaacggcaagcucaaccgccucaucggcaagaccaacgagaaguuccaccagaucgagaaggaguucaccgaggucgagggccgcauccaggaccucgagaaguacgucgaggacaccaagaucgaccucugguccuacaacgccgagcuccucgucgcccucgagaaccagcacaccaucgaccucaccgacuccgagaugaacaagcucuucgagaagaccaagaagcagcuccgcgagaacgccgaggacaugggcaacggcugcuucaagaucuaccacaagugcgacaacgccugcaucggcuccauccgcaacggcaccuacgaccacgaggucuaccgcgacgaggcccucaacaaccgcuuccagaucaagggcgucgagcucaaguccggcuacaaggacuggauccucuggaucuccuucgccaucuccugcuuccuccucugcgucgcccuccucggcuucaucaugugggccugccagaagggcaacauccgcugcaacaucugcaucuga

SEQ ID NO: 98649 - RNA, 1701 nt, Artificial Sequence; identical to SEQ ID NO: 98470
  derived and/or modified CDS sequence (opt2) from hemagglutinin__InfluenzaA__ACO94694

SEQ ID NO: 98650 - RNA, 1698 nt, Artificial Sequence; identical to SEQ ID NO: 98524
  derived and/or modified CDS sequence (opt2) from hemagglutinin__InfluenzaA__ACO94705

SEQ ID NO: 98651 - RNA, 1701 nt, Artificial Sequence
  derived and/or modified CDS sequence (opt2) from hemagglutinin__InfluenzaA__ACO94727
augaagaccaucaucgcccucuccuacauccucugccucgucuucgcccagaagcuccccggcaacgacaacuccaccgccacccucugccucggccaccacgccguccccaacggcaccaucgucaagaccaucaccaacgaccagaucgaggucaccaacgccaccgagcucguccaguccuccuccaccggcgagaucugcgacuccccccaccagauccucgacggcgagaacugcacccucaucgacgcccuccucggcgacccccagugcgacggcuuccagaacaagaagugggaccucuucgucgagcgcuccaaggccuacuccaacugcuaccccuacgacguccccgacuacgccucccuccgcucccucgucgccuccuccggcacccucgaguucaacaacgaguccuucaacuggaccggcgucacccagaacggcaccuccuccgccugcauccgccgcuccaacaacuccuucuucucccgccucaacuggcucacccaccucaaguucaaguaccccgcccucaacgucaccaugcccaacaacgagcaguucgacaagcucuacaucuggggcguccaccaccccggcaccgacaacgaccagaucuuccucuacgcccaggccuccggccgcaucaccgucuccaccaagcgcucccagcagaccgucauccccaacaucggcucccgcccccgcguccgcaacauccccucccgcaucuccaucuacuggaccaucgucaagcccggcgacauccuccucaucaacuccaccggcaaccucaucgccccccgcggcuacuucaagauccgcuccggcaaguccuccaucaugaaguccgacgcccccaucggcaagugcaacuccgagugcaucacccccaacggcuccauccccaacgacaagcccuuccagaacgucaaccgcaucaccuacggcgccugcccccgcuacgucaagcagaacacccucaagcucgccaccggcaugcgcaacguccccgagaagcagacccgcggcaucuucggcgccaucgccggcuucaucgagaacggcugggagggcauggucgacggcugguacggcuuccgccaccagaacuccgagggccgcggccaggccgccgaccucaaguccacccaggccgccaucgaccagaucaacggcaagcucaaccgccucaucggcaagaccaacgagaaguuccaccagaucgagaaggaguucuccgaggucgagggccgcauccaggaccucgagaaguacgucgaggacaccaagaucgaccucugguccuacaacgccgagcuccucgucgcccucgagaaccagcacaccaucgaccucaccgacuccgagaugaacaagcucuucgagaagaccaagaagcagcuccgcgagaacgccgaggacaugggcaacggcugcuucaagaucuaccacaagugcgacaacgccugcaucggcuccauccgcaacggcaccuacgaccacgacgucuaccgcgacgaggcccucaacaaccgcuuccagaucaagggcgucgagcucaaguccggcuacaaggacuggauccucuggaucuccuucgccaucuccugccuccuccucugcgucgcccuccucggcuucaucaugugggccugccagaagggcaacauccgcugcaacaucugcaucuga

SEQ ID NO: 98652 - RNA, 1701 nt, Artificial Sequence
  derived and/or modified CDS sequence (opt2) from hemagglutinin__InfluenzaA__ACO94738
augaagaccaucaucgcccucuccuacauccagugccucgucuucgcccagaaguuccccggcaacgacaacuccaccgccacccucugccucggccaccacgccguccccaacggcaccgucgucaagaccaucaccaacgaccagaucgaggucaccaacgccaccgagcucguccaguccuccuccaccggcgagaucugcgacuccccccaccagauccucgacggcgagaacugcacccucaucgacgcccuccucggcgacccccagugcgacggcuuccagaacaagaacugggaccucuucgucgagcgcuccaaggccuacuccaacugcuaccccuacgacguccccgacuacgccucccuccgcucccucgucgccuccuccggcacccucgaguucaacaacgaguccuucaacuggaccggcgucacccagaacggcaccuccuccgccugcauccgccgcuccaacaacuccuucuucucccgccucaacuggcucacccacuccaaguucaaguaccccgcccucaacgucaccaugcccaacaacgagaacuucgacaagcucuacaucuggggcguccaccaccccggcaccgacaacgaccagaucuuccucuacgcccgcgccuccggccgcaucaccgucuccaccaagcgcucccagcagaccgucauccccaacaucggcucccgcccccgcguccgcaacauccccucccgcaucuccaucuacuggaccaucgucaagcccggcgacauccuccucaucaacuccaccggcaaccucaucgccccccgcggcuacuucaagauccgcuccggcaaguccuccaucaugcgcuccgacgcccccaucggcaagugcaacuccgagugcaucacccccaacggcuccauccccaacgacaagcccuuccagaacgucaaccgcaucaccuacggcgccugcccccgcuacgucaagcagaacacccucaagcucgccaccggcaugcgcaacguccccgagaagcagacccgcggcaucuucggcgccaucgccggcuucaucgagaacggcugggagggcauggucgacggcugguacggcuuccgccaccagaacuccgagggcaucggccaggccgccgaccucaaguccacccaggccgccaucgaccagaucaacggcaagcucaaccgccucaucggcaagaccaacgagaaguuccaccagaucgagaaggaguucuccgaggucgagggccgcauccaggaccucgagaaguacgucgaggacaccaagaucgaccucugguccuacaacgccgagcuccucgucgcccucgagaaccagcacaccaucgaccucaccgacuccgagaugaacaagcucuucgagaagaccaagaagcagcuccgcgagaacgccgaggacaugggcaacggcugcuucaagaucuaccacaagugcgacaacgccugcaucggcuccauccgcaacggcaccuacgaccacgacgucuaccgcgacgaggcccucaacaaccgcuuccagaucaagggcgucgagcucaaguccggcuacaaggacuggauccucuggaucuccuucgccaucuccugcuuccuccucugcaucgcccuccucggcuucaucaugugggccugccagaagggcaacauccgcugcaacaucugcaucuga

SEQ ID NO: 98653 - RNA, 1701 nt, Artificial Sequence; identical to SEQ ID NO: 98573
  derived and/or modified CDS sequence (opt2) from hemagglutinin__InfluenzaA__ACO94760

SEQ ID NO: 98654 - RNA, 1701 nt, Artificial Sequence
  derived and/or modified CDS sequence (opt2) from hemagglutinin__InfluenzaA__ACO94771
augaagaccaucaucgcccucuccuacauccucugccucgucuucgcccagaagcuccccggcaacgacaacuccaccgccacccucugccucggccaccacgccguccccaacggcaccaucgucaagaccaucaccaacgaccagaucgaggucaccaacgccaccgagcucguccaguccuccuccaccggcgagaucugcgacuccccccaccagauccucgacggcgagaacugcacccucaucgacgcccuccucggcgacccccagugcgacggcuuccagaacaagaagugggaccucuucgucgagcgcuccaaggccuacuccaacugcuaccccuacgacguccccgacuacgccucccuccgcucccucgucgccuccuccggcacccucgaguucaacaacgaguccuucaacuggaccggcgucacccagaacggcaccuccuccgccugcauccgccgcuccaacaacuccuucuucucccgccucaacuggcucacccaccucaaguucaaguaccccgcccucaacgucaccaugcccaacaacgagcaguucgacaagcucuacaucuggggcguccaccaccccggcaccgacaacgaccagaucuuccucuacgcccaggccuccggccgcaucaccgucuccaccaagcgcucccagcagaccgucauccccaacaucggcucccgcccccgcguccgcaacauccccucccgcaucuccaucuacuggaccaucgucaagcccggcgacauccuccucaucaacuccaccggcaaccucaucgccccccgcggcuacuucaagauccgcuccggcaaguccuccaucaugcgcuccgacgcccccaucggcaagugcaacuccgagugcaucacccccaacggcuccauccccaacgacaagcccuuccagaacgucaaccgcaucaccuacggcgccugcccccgcuacgucaagcagaacacccucaagcucgccaccggcaugcgcaacguccccgagaagcagacccgcggcaucuucggcgccaucgccggcuucaucgagaacggcugggagggcauggucgacggcugguacggcuuccgccaccagaacuccgagggccgcggccaggccgccgaccucaaguccacccaggccgccaucgaccagaucaacggcaagcucaaccgccucaucggcaagaccaacgagaaguuccaccagaucgagaaggaguucuccgaggucgagggccgcauccaggaccucgagaaguacgucgaggacaccaagaucgaccucugguccuacaacgccgagcuccucgucgcccucgagaaccagcacaccaucgaccucaccgacuccgagaugaacaagcucuucgagaagaccaagaagcagcuccgcgagaacgccgaggacaugggcaacggcugcuucaagaucuaccacaagugcgacaacgccugcaucggcuccauccgcaacggcaccuacgaccacgacgucuaccgcgacgaggcccucaacaaccgcuuccagaucaagggcgucgagcucaaguccggcuacaaggacuggauccucuggaucuccuucgccaucuccugccuccuccucugcgucgcccuccucggcuucaucaugugggccugccagaagggcaacauccgcugcaacaucugcaucuga

SEQ ID NO: 98655 - RNA, 1701 nt, Artificial Sequence; identical to SEQ ID NO: 98470
  derived and/or modified CDS sequence (opt2) from hemagglutinin__InfluenzaA__ACO94782

SEQ ID NO: 98656 - RNA, 1701 nt, Artificial Sequence; identical to SEQ ID NO: 98470
  derived and/or modified CDS sequence (opt2) from hemagglutinin__InfluenzaA__ACO94793

SEQ ID NO: 98657 - RNA, 1698 nt, Artificial Sequence
  derived and/or modified CDS sequence (opt2) from hemagglutinin__InfluenzaA__ACO94804
augaaggucaagcuccucguccuccucugcaccuucaccgccaccuacgccgacaccaucugcaucggcuaccacgccaacaacuccaccgacaccgucgacaccguccucgagaagaacgucaccgucacccacuccgucaaccuccucgaggacucccacaacggcaagcucugccuccucaagggcaucgccccccuccagcucggcaacugcuccgucgccggcuggauccucggcaaccccgagugcgagcuccucaucucccgcgaguccugguccuacaucgucgagaagcccaaccccgagaacggcaccugcuaccccggccacuucgccgacuacgaggagcuccgcgagcagcucuccuccgucuccuccuucgagcgcuucgagaucuuccccaaggaguccuccuggcccaaccacaccaccaccggcgucuccgccuccugcucccacaacggcgaguccuccuucuacaagaaccuccucuggcucaccggcaagaacggccucuaccccaaccucuccaaguccuacgccaacaacaaggagaaggagguccucguccucuggggcguccaccacccccccaacaucggcaaccagcgcgcccucuaccacaccgagaacgccuacgucuccgucgucuccucccacuacucccgcaaguucacccccgagaucgccaagcgccccaagguccgcgaccaggagggccgcaucaacuacuacuggacccuccucgagcccggcgacaccaucaucuucgaggccaacggcaaccucaucgccccccgcuacgccuucgcccucucccgcggcuucggcuccggcaucaucaacuccaacgcccccauggacggcugcgacgccaagugccagaccccccagggcgccaucaacuccucccuccccuuccagaacguccaccccgucaccaucggcgagugccccaaguacguccgcuccgccaagcuccgcauggucaccggccuccgcaacauccccuccauccagucccgcggccucuucggcgccaucgccggcuucaucgagggcggcuggaccggcauggucgacggcugguacggcuaccaccaccagaacgagcagggcuccggcuacgccgccgaccagaaguccacccagaacgccaucaacggcaucaccaacaaggucaacuccgucaucgagaagaugaacacccaguucaccgccgucggcaaggaguucaacaagcucgagcgccgcauggagaaccucaacaagaaggucgacgacggcuucaucgacaucuggaccuacaacgccgagcuccucguccuccucgagaacgagcgcacccucgacuuccacgacuccuacgucaagaaccucuacgagaaggucaagucccagcucaagaacaacgccaaggagaucggcaacggcugcuucgaguucuaccacaagugcaacgacgagugcauggaguccgucaagaacggcaccuacgacuaccccaaguacuccgaggaguccaagcucaaccgcgagaagaucgacggcgucaagcucgaguccaugggcgucuaccagauccucgccaucuacuccaccgucgccuccucccucguccuccucgucucccucggcgccaucuccuucuggaugugcuccaacggcucccuccagugccgcaucugcaucuga

SEQ ID NO: 98658 - RNA, 1701 nt, Artificial Sequence; identical to SEQ ID NO: 98337
  derived and/or modified CDS sequence (opt2) from hemagglutinin__InfluenzaA__ACO94815

SEQ ID NO: 98659 - RNA, 1701 nt, Artificial Sequence; identical to SEQ ID NO: 98344
  derived and/or modified CDS sequence (opt2) from hemagglutinin__InfluenzaA__ACO94848

SEQ ID NO: 98660 - RNA, 1698 nt, Artificial Sequence; identical to SEQ ID NO: 98524
  derived and/or modified CDS sequence (opt2) from hemagglutinin__InfluenzaA__ACO94859

SEQ ID NO: 98661 - RNA, 1698 nt, Artificial Sequence
  derived and/or modified CDS sequence (opt2) from hemagglutinin__InfluenzaA__ACO94870
augaaggucaagcuccucguccuccucugcaccuucaccgccaccuacgccgacaccaucugcaucggcuaccacgccaacaacuccaccgacaccgucgacaccguccucgagaagaacgucaccgucacccacuccgucaaccuccucgagaacucccacaacggcaagcucugccuccucaagggcaucgccccccuccagcucggcaacugcuccgucgccggcuggauccucggcaaccccgagugcgagcuccucaucuccaaggaguccugguccuacaucgucgagaagcccaaccccgagaacggcaccugcuaccccggccacuucgccgacuacgaggagcuccgcgagcagcucuccuccgucuccuccuucgagcgcuucgagaucuuccccaaggaguccuccuggcccaaccacaccgucaccggcgucuccgccuccugcucccacaacggcgaguccuccuucuaccgcaaccuccucuggcucaccggcaagaacggccucuaccccaaccucuccaaguccuacgccaacaacaagggcaaggagguccucguccucuggggcguccaccacccccccaacaucggcgaccagaacacccucuaccacaccgagaacgccuacgucuccgucgucuccucccacuacucccgcaaguucacccccgagaucgccaagcgccccaagguccgcgaccaggagggccgcaucaacuacuacuggacccuccucgagcccggcgacaccaucaucuucgaggccaacggcaaccucaucgccccccgcuacgccuucgcccucaaccgcggcuucggcuccggcaucaucaacuccaacgcccccauggacaagugcgacgccaagugccagaccccccagggcgccaucaacuccucccuccccuuccagaacguccaccccgucaccaucggcgagugccccaaguacguccgcuccgccaagcuccgcauggucaccggccuccgcaacauccccuccauccagucccgcggccucuucggcgccaucgccggcuucaucgagggcggcuggaccggcauggucgacggcugguacggcuaccaccaccagaacgagcagggcuccggcuacgccgccgaccagaaguccacccagaacgccaucaacggcaucaccaacaaggucaacuccgucaucgagaagaugaacacccaguucaccgccgucggcaaggaguucaacaagcucgagcgccgcauggagaaccucaacaagaaggucgacgacggcuucaucgacaucuggaccuacaacgccgagcuccucguccuccucgagaacgagcgcacccucgacuuccacgacuccaacgucaagaaccucuacgagaaggucaagucccagcucaagaacaacgccaaggagaucggcaacggcugcuucgaguucuaccacaagugcaacgacgagugcauggaguccgucaagaacggcaccuacgacuaccccaaguacuccgaggaguccaagcucaaccgcgagaagaucgacggcgucaagcucgaguccaugggcgucuaccagauccucgccaucuacuccaccgucgccuccucccucguccuccucgucucccucggcgccaucuccuucuggaugugcuccaacggcucccuccagugccgcaucugcaucuga

SEQ ID NO: 98662 - RNA, 1701 nt, Artificial Sequence
  derived and/or modified CDS sequence (opt2) from hemagglutinin__InfluenzaA__ACO94881
augaagaccaucaucgcccucuccuacauccucugccucgucuucgcccagaagcuccccggcaacgacaacuccaccgccacccucugccucggccaccacgccguccccaacggcaccaucgucaagaccaucaccaacgaccagaucgaggucaccaacgccaccgagcucguccaguccuccuccaccggcggcaucugcgacuccccccaccagauccucgacggcgagaacugcacccucaucgacgcccuccucggcgacccccagugcgacggcuuccagaacaagaagugggaccucuucgucgagcgcuccaaggccuacuccaacugcuaccccuacgacguccccgacuacgccucccuccgcucccucgucgccuccuccggcacccucgaguucaacaacgaguccuucgacuggaccggcgucacccagaacggcaccuccuccuccugcaagcgccgcuccaacaacuccuucuucucccgccucaacuggcucacccaccucaaguacaaguaccccgcccucaacgucaccaugcccaacaacgagaaguucgacaagcucuacaucuggggcguccaccaccccggcaccgacuccgaccagaucucccucuacgcccaggccuccggccgcaucaccgucuccaccaagcgcucccagcagaccgucauccccaacaucggcucccgcccccgcguccgcgacgucuccucccgcaucuccaucuacuggaccaucgucaagcccggcgacauccuccucaucaacuccaccggcaaccucaucgccccccgcggcuacuucaagauccgcuccggcaaguccuccaucaugcgcuccgacgcccccaucggcaagugcaacuccgagugcaucacccccaacggcuccauccccaacgacaagcccuuccagaacgucaaccgcaucaccuacggcgccugcccccgcuacgucaagcagaacacccucaagcucgccaccggcaugcgcaacguccccgagaagcagacccgcggcaucuucggcgccaucgccggcuucaucgagaacggcugggagggcauggucgacggcugguacggcuuccgccaccagaacuccgagggcaccggccaggccgccgaccucaaguccacccaggccgccaucaaccagaucaacggcaagcucaaccgccucaucggcaagaccaacgagaaguuccaccagaucgagaaggaguucuccgaggucgagggccgcauccaggaccucgagaaguacgucgaggacaccaagaucgaccucugguccuacaacgccgagcuccucgucgcccucgagaaccagcacaccaucgaccucaccgacuccgagaugaacaagcucuucgagcgcaccaagaagcagcuccgcgagaacgccgaggacaugggcaacggcugcuucaagaucuaccaccgcugcgacaacgccugcaucggcuccauccgcaacggcaccuacgaccacgacgucuaccgcgacgaggcccucaacaaccgcuuccagaucaagggcgucgagcucaaguccggcuacaaggacuggauccucuggaucuccuucgccaucuccugcuuccuccucugcgucgcccuccucggcuucaucaugugggccugccagaagggcaacauccgcugcaacaucugcaucuga

SEQ ID NO: 98663 - RNA, 1701 nt, Artificial Sequence
  derived and/or modified CDS sequence (opt2) from hemagglutinin__InfluenzaA__ACO94892
augaagaccaucaucgcccucuccuacauccucugccucgucuucgcccagaagcuccccggcaacgacaacuccaccgccacccucugccucggccaccacgccguccccaacggcaccaucgucaagaccaucaccaacgaccagaucgaggucaccaacgccaccgagcucguccaguccuccuccaccggcggcaucugcgacuccccccaccagauccucgacggcgagaacugcacccucaucgacgcccuccucggcgacccccagugcgacggcuuccagaacaagaagugggaccucuucgucgagcgcuccaaggccuacuccaacugcuaccccuacgacguccccgacuacgccucccuccgcucccucgucgccuccuccggcacccucgaguucaacaacgaguccuucaacuggaccggcgucacccagaacggcaccuccuccgccugccagcgccgcuccaacaaguccuucuucucccgccucaacuggcucacccaccucaaguucaaguaccccgcccucaacgucaccaugcccaacaacgagaaguucgacaagcucuacaucuggggcguccaccaccccggcaccgacaacgaccagaucucccucuacgcccagaccuccggccgcaucaccaucuccaccaagcgcucccagcagaccgucauccccaacaucggcucccgcccccgcguccgcgacguccccucccgcaucuccaucuacuggaccaucgucaagcccggcgacauccuccucaucaacuccaccggcaaccucaucgccccccgcggcuacuucaagauccgcuccggcaaguccuccaucaugcgcuccgacgcccccaucgucaagugcaacuccgagugcaucacccccaacggcuccauccccaacgacaagcccuuccagaacgucaaccgcaucaccuacggcgccugcccccgcuacgucaagcagaacacccucaagcucgccaccggcaugcgcaacguccccgagcgccagacccgcggcaucuucggcgccaucgccggcuucaucgagaacggcugggagggcauggucgacggcugguacggcuuccgccaccagaacuccgagggcaccggccaggccgccgaccucaaguccacccaggccgccaucaaccagaucaacggcaagcucaaccgccucaucggcaagaccaacgagaaguuccaccagaucgagaaggaguucuccgaggucgagggccgcauccaggaccucgagaaguacgucgaggacaccaagaucgaccucugguccuacaacgccgagcuccucgucgcccucgagaaccagcacaccaucgaccucaccgacuccgagaugaacaagcucuucgagcgcaccaagaagcagcuccgcgagaacgccgaggacaugggcaacggcugcuucaagaucuaccacaagugcgacaacgccugcaucggcuccauccgcaacggcaccuacgaccacgacgucuaccgcgacgaggcccucaacaaccgcuuccagaucaagggcgucgagcucaaguccggcuacaaggacuggauccucuggaucuccuucgccaucuccugcuuccuccucugcgucgcccuccucggcuucaucaugugggccugccagaagggcaacauccgcugcaacaucugcaucuga

SEQ ID NO: 98664 - RNA, 1701 nt, Artificial Sequence
  derived and/or modified CDS sequence (opt2) from hemagglutinin__InfluenzaA__ACO94903
augaagaccaucaucgcccucuccuacauccucugccucgucuucgcccagaagcuccccggcaacgacaacuccaccgccacccucugccucggccaccacgccguccccaacggcaccaucgucaagaccaucaccaacgaccagaucgaggucaccaacgccaccgagcucguccaguccuccuccaccggcggcaucugcgacuccccccaccagauccucgacggcgagaacugcacccucaucgacgcccuccucggcgacccccagugcgacggcuuccagaacaagaagugggaccucuucgucgagcgcuccgaggccuacuccaacugcuaccccuacgacguccccgacuacgccucccuccgcucccucgucgccuccuccggcacccucgaguucaacaacgaguccuucaacuggaccggcgucacccagaacggcaccuccuccgccugcaagcgccgcuccaacaaguccuucuucucccgccucaacuggcucacccaccucaaguucaaguaccccgcccucaacgucaccaugcccaacaacgagaaguucgacaagcucuacaucuggggcguccaccaccccggcaccgacaacgaccagaucucccucuacgcccaggccuccggccgcaucaccgucuccaccaagcgcucccagcagaccgucauccccaacaucggcucccgcccccgcguccgcgacguccccucccgcaucuccaucuacuggaccaucgucaagcccggcgacauccuccucaucaacuccaccggcaaccucaucgccccccgcggcuacuucaagauccgcuccggcaaguccuccaucaugcgcuccgacgcccccaucggcaagugcaacuccgagugcaucacccccaacggcuccauccccaacgacaagcccuuccagaacgucaaccgcaucaccuacggcgccugcccccgcuacgucaagcagaacacccucaagcucgccaccggcaugcgcaacguccccgagaagcagacccgcggcaucuucggcgccaucgccggcuucaucgagaacggcugggagggcauggucgacggcugguacggcuuccgccaccagaacuccgagggcaccggccaggccgccgaccucaaguccacccaggccgccaucaaccagaucaacggcaagcucaaccgccucaucggcaagaccaacgagaaguuccaccagaucgagaaggaguucuccgaggucgagggccgcauccaggaccucgagaaguacgucgaggacaccaagaucgaccucugguccuacaacgccgagcuccucgucgcccucgagaaccagcacaccaucgaccucaccgacuccgagaugaacaagcucuucgagcgcaccaagaagcagcuccgcgagaacgccgaggacaugggcaacggcugcuucaagaucuaccacaagugcgacaacgccugcaucggcuccauccgcaacggcaccuacgaccacgacgucuaccgcgacgaggcccucaacaaccgcuuccagaucaagggcgucgagcucaaguccggcuacaaggacuggauccucuggaucuccuucgccaucuccugcuuccuccucugcgucgcccuccucggcuucaucaugugggccugccagaagggcaacauccgcugcaacaucugcaucuga

SEQ ID NO: 98665 - RNA, 1701 nt, Artificial Sequence
  derived and/or modified CDS sequence (opt2) from hemagglutinin__InfluenzaA__ACO94925
augaagaccaucaucgcccucuccuacauccucugccucgucuucgcccagaagcuccccggcaacgacaacuccaccgccacccucugccucggccaccacgccguccccaacggcaccgucgucaagaccaucaccaacgaccagaucgaggucaccaacgccaccgagcucguccaguccuccuccaccggcggcaucugcgacuccccccaccagauccucgacggcgagaacugcacccucaucgacgcccuccucggcgacccccagugcgacggcuuccagaacaagaagugggaccucuucgucgagcgcuccaaggccuacuccaacugcuaccccuacgacguccccgacuacgccucccuccgcucccucgucgccuccuccggcacccucgaguucaacaacgaguccuucaacuggaccggcgucacccagaacggcaccuccuccgccugcaagcgccgcuccaacaaguccuucuucucccgccucaacuggcucacccaccucaaguucaaguaccccgcccucaacgucaccaugcccaacaacgagaaguucgacaagcucuacaucuggggcguccaccaccccggcaccgacaacgaccagaucucccucuacgcccaggccuccggccgcaucaccgucuccaccaagcgcucccagcagaccgucauccccaacaucggcucccgcccccgcguccgcgacguccccucccgcaucuccaucuacuggaccaucgucaagcccggcgacauccuccucaucaacuccaccggcaaccucaucgccccccgcggcuacuucaagauccgcuccggcaaguccuccaucaugcgcuccgacgcccccaucggcaagugcaacuccgagugcaucacccccaacggcuccauccccaacgacaagcccuuccagaacgucaaccgcaucaccuacggcgccugcccccgcuacgucaagcagaacacccucaagcucgccaccggcaugcgcaacguccccgagaagcagacccgcggcaucuucggcgccaucgccggcuucaucgagaacggcugggagggcauggucgacggcugguacggcuuccgccaccagaacuccgagggcaccggccaggccgccgaccucaaguccacccaggccgccaucaaccagaucaacggcaagcucaaccgccucaucggcaagaccaacgagaaguuccaccagaucgagaaggaguucuccgaggucgagggccgcauccaggaccucgagaaguacgucgaggacaccaagaucgaccucugguccuacaacgccgagcuccucgucgcccucgagaaccagcacaccaucgaccucaccgacuccgagaugaacaagcucuucgagcgcaccaagaagcagcuccgcgagaacgccgaggacaugggcaacggcugcuucaagaucuaccacaagugcgacaacgccugcaucggcuccauccgcaacggcaccuacgaccacgacgucuaccgcgacgaggcccucaacaaccgcuuccagaucaagggcgucgagcucaaguccggcuacaaggacuggauccucuggaucuccuucgccaucuccugcuuccuccucugcgucgcccuccucggcuucaucaugugggccugccagaagggcaacauccgcugcaacaucugcaucuga

SEQ ID NO: 98666 - RNA, 1701 nt, Artificial Sequence
  derived and/or modified CDS sequence (opt2) from hemagglutinin__InfluenzaA__ACO94936
augaagaccaucaucgcccucuccuacauccucugccucgucuucgcccagaagcuccccggcaacgacaacuccaccgccacccucugccucggccaccacgccguccccaacggcaccaucgucaagaccaucaccaacgaccagaucgaggucaccaacgccaccgagcucguccaguccuccuccaccggcggcaucugcgacuccccccaccagauccucgacggcgaggacugcacccucaucgacgcccuccucggcgacccccagugcgacggcuuccagaacaagaagugggaccucuucgucgagcgcuccaaggccuacuccaacugcuaccccuacgacguccccgacuacgccucccuccgcucccucgucgccuccuccggcacccucgaguucaacaacgaguccuucgacuggaccggcgucacccagaacggcaccuccuccuccugcaagcgccgcuccaacaacuccuucuucucccgccucaacuggcucacccaccucaaguacaaguaccccgcccucaacgucaccaugcccaacaacgagaaguucgacaagcucuacaucuggggcguccaccaccccggcaccgacuccgaccagaucucccucuacgcccaggccuccggccgcaucaccgucuccaccaagcgcucccagcagaccgucauccccaacaucggcucccgcccccgcguccgcgacgucuccucccgcaucuccaucuacuggaccaucgucaagcccggcgacauccuccucaucaacuccaccggcaaccucaucgccccccgcggcuacuucaagauccgcuccggcaaguccuccaucaugcgcuccgacgcccccaucggcaagugcaacuccgagugcaucacccccaacggcuccauccccaacgacaagcccuuccagaacgucaaccgcaucaccuacggcgccugcccccgcuacgucaagcagaacacccucaagcucgccaccggcaugcgcaacguccccgagaagcagacccgcggcaucuucggcgccaucgccggcuucaucgagaacggcugggagggcauggucgacggcugguacggcuuccgccaccagaacuccgagggcaccggccaggccgccgaccucaaguccacccaggccgccaucaaccagaucaacggcaagcucaaccgccucaucggcaagaccaacgagaaguuccaccagaucgagaaggaguucuccgaggucgagggccgcauccaggaccucgagaaguacgucgaggacaccaagaucgaccucugguccuacaacgccgagcuccucgucgcccucgagaaccagcacaccaucgaccucaccgacuccgagaugaacaagcucuucgagcgcaccaagaagcagcuccgcgagaacgccgaggacaugggcaacggcugcuucaagaucuaccacaagugcgacaacgccugcaucggcuccauccgcaacggcaccuacgaccacgacgucuaccgcgacgaggcccucaacaaccgcuuccagaucaagggcgucgagcucaaguccggcuacaaggacuggauccucuggaucuccuucgccaucuccugcuuccuccucugcgucgcccuccucggcuucaucaugugggccugccagaagggcaacauccgcugcaacaucugcaucuga

SEQ ID NO: 98667 - RNA, 1701 nt, Artificial Sequence
  derived and/or modified CDS sequence (opt2) from hemagglutinin__InfluenzaA__ACO94947
augaagaccaucaucgcccucuccuacauccucugccucgucuucgcccagaagcuccccggcaacgacaacuccaccgccacccucugccucggccaccacgccguccccaacggcaccaucgucaagaccaucaccaacgaccagaucgaggucaccaacgccaccgagcucguccaguccuccuccaccggcggcaucugcgacuccccccaccagauccucgacggcgagaacugcacccucaucgacgcccuccucggcgacccccagugcgacggcuuccagaacaagaagugggaccucuucgucgagcgcuccaaggccuacuccaacugcuaccccuacgacguccccgacuacgccucccuccgcucccucgucgccuccuccggcacccucgaguucaacaacgaguccuucaacuggaccggcgucacccagaacggcaccuccuccgccugcaagcgccgcuccaacaaguccuucuucucccgccucaacuggcucacccaccucaaguucaaguaccccgcccucaacgucaccaugcccaacaacgagaaguucgacaagcucuacaucuggggcguccaccaccccggcaccgacaacgaccagaucucccucuacgcccaggccuccggccgcaucaccgucuccaccaagcgcucccagcagaccgucauccccaacaucggcucccgcccccgcguccgcgacguccccucccgcaucuccaucuacuggaccaucgucaagcccggcgacauccuccucaucaacuccaccggcaaccucaucgccccccgcggcuacuuccgcauccgcuccggcaaguccuccaucaugcgcuccgacgcccccaucggcaagugcaacuccgagugcaucacccccaacggcuccauccccaacgacaagcccuuccagaacgucaaccgcaucaccuacggcgccugcccccgcuacgucaagcagaacacccucaagcucgccaccggcaugcgcaacguccccgagaagcagacccgcggcaucuucggcgccaucgccggcuucaucgagaacggcugggagggcauggucgacggcugguacggcuuccgccaccagaacuccgagggcaccggccaggccgccgaccucaaguccacccaggccgccaucaaccagaucaacggcaagcucaaccgccucaucggcaagaccaacgagaaguuccaccagaucgagaaggaguucuccgaggucgagggccgcauccaggaccucgagaaguacgucgaggacaccaagaucgaccucugguccuacaacgccgagcuccucgucgcccucgagaaccagcacaccaucgaccucaccgacuccgagaugaacaagcucuucgagcgcaccaagaagcagcuccgcgagaacgccgaggacaugggcaacggcugcuucaagaucuaccacaagugcgacaacgccugcaucggcuccauccgcaacggcaccuacgaccacgacgucuaccgcgacgaggcccucaacaaccgcuuccagaucaagggcgucgagcucaaguccggcuacaaggacuggauccucuggaucuccuucgccaucuccugcuuccuccucugcgucgcccuccucggcuucaucaugugggccugccagaagggcaacauccgcugcaacaucugcaucuga

SEQ ID NO: 98668 - RNA, 1701 nt, Artificial Sequence
  derived and/or modified CDS sequence (opt2) from hemagglutinin__InfluenzaA__ACO95153
augaagaccaucaucgcccucuccuacauccucugccucgucuucgcccagaagcuccccggcaacgacaacuccaccgccacccucugccucggccaccacgccguccccaacggcaccaucgucaagaccaucaccaacgaccagaucgaggucaccaacgccaccgagcucguccaguccuccuccaccggcggcaucugcgacuccccccaccagauccucgacggcgagaacugcacccucaucgacgcccuccucggcgacccccagugcgacggcuuccagaacaagaagugggaccucuucgucgagcgcuccaaggccuacuccaacugcuaccccuacgacguccccgacuacgccucccuccgcucccucgucgccuccuccggcacccucgaguucaacaacgaguccuucaacuggaccggcgucacccagaacggcaccuccuccgccugcaagcgccgcuccaacaacuccuucuucucccgccucaacuggcucacccaccucaaguucaaguaccccgcccucaacgucaccaugcccaacaacgagaacuucgacaagcucuacaucuggggcguccaccaccccggcaccgacaacgaccagaucucccucuacgcccaggccuccggccgcaucaccgucuccaccaagcgcucccagcagaccgucauccccaacaucggcucccgcccccgcguccgcgacaucuccucccgcaucuccaucuacuggaccaucgucaagcccggcgacauccuccucaucaacuccaccggcaaccucaucgccccccgcggcuacuucaagauccgcuccggcaaguccuccaucaugcgcuccgacgcccccaucggcaagugcaacuccgagugcaucacccccaacggcuccauccccaacgacaagcccuuccagaacgucaaccgcaucaccuacggcgccugcccccgcuacgucaagcagaacacccucaagcucgccaccggcaugcgcaacguccccgagacccagacccgcggcaucuucggcgccaucgccggcuucaucgagaacggcugggagggcauggucgacggcugguacggcuuccgccaccagaacuccgagggcaccggccaggccgccgaccucaaguccacccaggccgccaucaaccagaucaacggcaagcucaaccgccucaucggcaagaccaacgagaaguuccaccagaucgagaaggaguucuccgaggucgagggccgcauccaggaccucgagaaguacgucgaggacaccaagaucgaccucugguccuacaacgccgagcuccucgucgcccucgagaaccagcacaccaucgaccucaccgacuccgagaugaacaagcucuucgagcgcaccaagaagcagcuccgcgagaacgccgaggacaugggcaacggcugcuucaagaucuaccacaagugcgacaacgccugcaucggcuccauccgcaacggcaccuacgaccacgacgucuaccgcgacgaggcccucaacaaccgcuuccagaucaagggcgucgagcucaaguccggcuacaaggacuggauccucuggaucuccuucgccaucuccugcuuccuccucugcgucgcccuccucggcuucaucaugugggccugccagaagggcaacauccgcugcaacaucugcaucuga

SEQ ID NO: 98669 - RNA, 1701 nt, Artificial Sequence; identical to SEQ ID NO: 98634
  derived and/or modified CDS sequence (opt2) from hemagglutinin__InfluenzaA__ACO95171

SEQ ID NO: 98670 - RNA, 1701 nt, Artificial Sequence
  derived and/or modified CDS sequence (opt2) from hemagglutinin__InfluenzaA__ACO95193
augaagaccaucaucgcccucuccuacauccucugccucgucuucgcccagaagcuccccggcaacgacaaguccaccgccacccucugccucggccaccacgccguccccaacggcaccaucgucaagaccaucaccaacgaccagaucgaggucaccaacgccaccgagcucguccaguccuccuccaccggcggcaucugcgacuccccccaccagauccucgacggcgagaacugcacccucaucgacgcccuccucggcgacccccagugcgacggcuuccagaacaagaagugggaccucuucgucgagcgcuccaaggccuacuccaacugcuaccccuacgacguccccgacuacgccucccuccgcucccucgucgccuccuccggcacccucgaguucaacaacgagaacuucaacuggaccggcgucacccagaacggcaccuccuccgccugcaagcgccgcuccaacaacuccuucuucucccgccucaacuggcucacccaccucaaguucaaguaccccgcccucaacgucaccaugcccaacaacgagaaguucgacaagcucuacaucuggggcguccaccaccccggcaccgacaacgaccagaucucccucuacgcccaggccuccggccgcaucaccgucuccaccaagcgcucccagcagaccgucauccccaacaucggcucccgcccccgcguccgcgacaucuccucccgcaucuccaucuacuggaccaucgucaagcccggcgacauccuccucaucaacuccaccggcaaccucaucgccccccgcggcuacuucaagauccgcuccggcaaguccuccaucaugcgcuccgacgcccccaucggcaagugcuccuccgagugcaucacccccaacggcuccauccccaacgacaagcccuuccagaacgucaaccgcaucaccuacggcgccugcccccgcuacgucaagcagaacacccucaagcucgccaccggcaugcgcaacguccccgagacccagacccgcggcaucuucggcgccaucgccggcuucaucgagaacggcugggagggcauggucgacggcugguacggcuuccgccaccagaacuccgagggcaccggccaggccgccgaccucaaguccacccaggccgccaucaaccagaucaacggcaagcucaaccgccucaucggcaagaccaacgagaaguuccaccagaucgagaaggaguucuccgaggucgagggccgcauccaggaccucgagaaguacgucgaggacaccaagaucgaccucugguccuacaacgccgagcuccucgucgcccucgagaaccagcacaccaucgaccucaccgacuccgagaugaacaagcucuucgagcgcaccaagaagcagcuccgcgagaacgccgaggacaugggcaacggcugcuucaagaucuaccacaagugcgacaacgccugcaucggcuccauccgcaacggcaccuacgaccacgacgucuaccgcgacgaggcccucaacaaccgcuuccagaucaagggcgucgagcucaaguccggcuacaaggacuggauccucuggaucuccuucgccaucuccugcuuccuccucugcgucgcccuccucggcuucaucaugugggccugccagaagggcaacauccgcugcaacaucugcaucuga

SEQ ID NO: 98671 - RNA, 1701 nt, Artificial Sequence; identical to SEQ ID NO: 98633
  derived and/or modified CDS sequence (opt2) from hemagglutinin__InfluenzaA__ACO95204

SEQ ID NO: 98672 - RNA, 1701 nt, Artificial Sequence
  derived and/or modified CDS sequence (opt2) from hemagglutinin__InfluenzaA__ACO95215
augaagaccaucaucgcccucuccuacauccucugccucgucuucgcccagaagcuccccggcaacgacaacuccaccgccacccucugccucggccaccacgccguccccaacggcaccaucgucaagaccaucaccaacgaccagaucgaggucaccaacgccaccgagcucguccaguccuccuccaccggcggcaucugcgacuccccccaccagauccucgacggcgagaacugcacccucaucgacgcccuccucggcgacccccagugcgacggcuuccagaacaagaagugggaccucuucgucgagcgcuccaaggccuacuccaacugcuaccccuacgacguccccgacuacgccucccuccgcucccucaucgccuccuccggcacccucgaguucaacaacgaguccuucaacuggaccggcgucacccagaacggcaccuccuccgccugcaagcgccgcuccaacaacuccuucuucucccgccucaacuggcucacccaccucaaguucaaguaccccgcccucaacgucaccaugcccaacaacgagaaguucgacaagcucuacaucuggggcguccaccaccccggcaccgacaacgaccagaucucccucuacgcccaggccuccggccgcaucaccgucuccaccaagcgcucccagcagaccgucauccccaacaucggcucccgcccccgcguccgcgacaucuccucccgcaucuccaucuacuggaccaucgucaagcccggcgacauccuccucaucaacuccaccggcaaccucaucgccccccgcggcuacuucaagauccgcuccggcaaguccuccaucaugcgcuccgacgcccccaucggcaagugcaacuccgagugcaucacccccaacggcuccauccccaacgacaagcccuuccagaacgucaaccgcaucaccuacggcgccugcccccgcuacgucaagcagaacacccucaagcucgccaccggcaugcgcaacguccccgagacccagacccgcggcaucuucggcgccaucgccggcuucaucgagaacggcugggagggcauggucgacggcugguacggcuuccgccaccagaacuccgagggcaccggccaggccgccgaccucaaguccacccaggccgccaucaaccagaucaacggcaagcucaaccgccucaucggcaagaccaacgagaaguuccaccagaucgagaaggaguucuccgaggucgagggccgcauccaggaccucgagaaguacgucgaggacaccaagaucgaccucugguccuacaacgccgagcuccucgucgcccucgagaaccagcacaccaucgaccucaccgacuccgagaugaacaagcucuucgagcgcaccaagaagcagcuccgcgagaacgccgaggacaugggcaacggcugcuucaagaucuaccacaagugcgacaacgccugcaucggcuccauccgcaacgagaccuacgaccacgacgucuaccgcgacgaggcccucaacaaccgcuuccagaucaaguccgucgagcucaaguccggcuacaaggacuggauccucuggaucuccuucgccaucuccugcuuccuccucugcgucgcccuccucggcuucaucaugugggccugccagaagggcaacauccgcugcaacaucugcaucuga

SEQ ID NO: 98673 - RNA, 1701 nt, Artificial Sequence; identical to SEQ ID NO: 96317
  derived and/or modified CDS sequence (opt2) from hemagglutinin__InfluenzaA__ACO95226

SEQ ID NO: 98674 - RNA, 1701 nt, Artificial Sequence; identical to SEQ ID NO: 96666
  derived and/or modified CDS sequence (opt2) from hemagglutinin__InfluenzaA__ACO95248

SEQ ID NO: 98675 - RNA, 1701 nt, Artificial Sequence
  derived and/or modified CDS sequence (opt2) from hemagglutinin__InfluenzaA__ACO95270
augaagaccaucaucgcccucuccuacauccucugccucgucuucacccagaagcuccccggcaacgacaacuccaccgccacccucugccucggccaccacgccguccccaacggcaccaucgucaagaccaucaccaacgaccagaucgaggucaccaacgccaccgagcucguccaguccuccuccaccggcgagaucugcgacuccccccaccagauccucgacggcgagaacugcacccucaucgacgcccuccucggcgacccccagugcgacggcuuccagaacaagaagugggaccucuucgucgagcgcuccaaggccuacuccaacugcuaccccuacgacguccccgacuacgccucccuccgcucccucgucgccuccuccggcacccucgaguucaacaacgaguccuucaacuggaccggcgucacccagaacggcaccuccuccgccugcauccgccgcuccaacaacuccuucuucucccgccucaacuggcucacccaccucaaguucaaguaccccgcccucaacgucaccaugcccaacaacgagaaguucgacaagcucuacaucuggggcguccaccaccccgucaccgacaacaaccagaucuuccucuacgcccaggccuccggccgcaucaccgucuccaccaagcgcucccagcagaccgucauccccaacaucggcucccgcccccgcguccgcaacauccccucccgcaucuccaucuacuggaccaucgucaagcccggcgacauccuccucaucaacuccaccggcaaccucaucgccccccgcggcuacuucaagauccgcuccggcaaguccuccaucaugcgcuccgacgcccccaucggcaagugcaacuccgagugcaucacccccaacggcuccauccccaacgacaagcccuuccagaacgucaaccgcaucaccuacggcgccugcccccgcuacgucaagcagaacacccucaagcucgccaccggcaugcgcaacguccccgagaagcagacccgcggcaucuucggcgccaucgccggcuucaucgagaacggcugggagggcauggucgacggcugguacggcuuccgccaccagaacuccgagggcaucggccaggccgccgaccucaaguccacccaggccgccaucgaccagaucaacggcaagcucaaccgccucaucggcaagaccaacgagaaguuccaccagaucgagaaggaguucuccgaggucgagggccgcauccaggaccucgagaaguacgucgaggacaccaagaucgaccucugguccuacaacgccgagcuccucgucgcccucgagaaccagcacaccaucgaccucaccgacuccgagaugaacaagcucuucgagaagaccaagaagcagcuccgcgagaacgccgaggacaugggcaacggcugcuucaagaucuaccacaagugcgacaacgccugcaucggcuccauccgcaacggcaccuacgaccacgacgucuaccgcgacgaggcccucaacaaccgcuuccagaucaagggcgucgagcucaaguccggcuacaaggacuggauccucuggaucuccuucgccaucuccugcuuccuccucugcgucgcccuccucggcuucaucaugugggccugccagaagggcaacauccgcugcaacaucugcaucuga

SEQ ID NO: 98676 - RNA, 1701 nt, Artificial Sequence; identical to SEQ ID NO: 98470
  derived and/or modified CDS sequence (opt2) from hemagglutinin__InfluenzaA__ACO95281

SEQ ID NO: 98677 - RNA, 1701 nt, Artificial Sequence
  derived and/or modified CDS sequence (opt2) from hemagglutinin__InfluenzaA__ACO95292
augaagaccaucaucgcccucuccuacauccucugccucgucuucgcccagaagcuccccggcaacgacaacuccaccgccacccucugccucggccaccacgccguccccaacggcaccaucgucaagaccaucaccaacgaccagaucgaggucaccaacgccaccgagcucguccaguccuccuccaccggcgagaucugcgacuccccccaccagauccucgacggcgagaacugcacccucaucgacgcccuccucggcgacccccagugcgacggcuuccagaacaagaagugggaccucuucgucgagcgcuccaaggccuacuccaacugcuaccccuacgacguccccgacuacgccucccuccgcucccucgucgccuccuccggcacccucgaguucaacaacgaguccuucaacuggaccggcgucacccagaacggcaccuccuccgccugcauccgccgcuccaacaacuccuucuucucccgccucaacuggcucacccaccucaaguucaaguaccccgcccucaacgucaccaugcccaacaacgagcaguucgacaagcucuacaucuggggcguccaccaccccggcaccgacaacgaccagaucuuccucuacgcccaggccuccggccgcaucaccgucuccaccaagcgcucccagcagaccgucauccccaacaucggcucccgcccccgcguccgcaacauccccucccgcaucuccaucuacuggaccaucgucaagcccggcgacauccuccucaucaacuccaccggcaaccucaucgccccccgcggcuacuucaagauccaguccggcaaguccuccaucaugcgcuccgacgcccccaucggcaagugcaacuccgagugcaucacccccaacggcuccauccccaacgacaagcccuuccagaacgucaaccgcaucaccuacggcgccugcccccgcuacgucaagcagaacacccucaagcucgccaccggcaugcgcaacguccccgagaagcagacccgcggcaucuucggcgccaucgccggcuucaucgagaacggcugggagggcauggucgacggcugguacggcuuccgccaccagaacuccgagggccgcggccaggccgccgaccucaaguccacccaggccgccaucgaccagaucaacggcaagcucaaccgccucaucggcaagaccaacgagaaguuccaccagaucgagaaggaguucuccgaggucgagggccgcauccaggaccucgagaaguacgucgaggacaccaagaucgaccucugguccuacaacgccgagcuccucgucgcccucgagaaccagcacaccaucgaccucaccgacuccgagaugaacaagcucuucgagaagaccaagaagcagcuccgcgagaacgccgaggacaugggcaacggcugcuucaagaucuaccacaagugcgacaacgccugcaucggcuccauccgcaacggcaccuacgaccacgacgucuaccgcgacgaggcccucaacaaccgcuuccagaucaagggcgucgagcucaaguccggcuacaaggacuggauccucuggaucuccuucgccaucuccugcuuccuccucugcgucgcccuccucggcuucaucaugugggccugccagaagggcaacauccgcugcaacaucugcaucuga

SEQ ID NO: 98678 - RNA, 1701 nt, Artificial Sequence; identical to SEQ ID NO: 98573
  derived and/or modified CDS sequence (opt2) from hemagglutinin__InfluenzaA__ACO95303

SEQ ID NO: 98679 - RNA, 1698 nt, Artificial Sequence
  derived and/or modified CDS sequence (opt2) from hemagglutinin__InfluenzaA__ACO95382
augaaggucaagcuccucguccuccucugcaccuucaccgccaccuacgccgacaccaucugcaucggcuaccacgccaacaacuccaccgacaccgucgacaccguccucgagaagaacgucaccgucacccacuccgucaaccuccucgagaacucccacaacggcaagcucugccuccucaagggcaucgccccccuccagcucggcaacugcuccgucgccggcuggauccucggcaaccccgagugcgagcuccucaucuccaaggaguccugguccuacaucgucgagaagcccaaccccgagaacggcaccugcuaccccggccacuucgccgacuacgaggagcuccgcgagcagcucuccuccgucuccuccuucgagcgcuucgagaucuuccccaaggagggcuccuggcccaaccacaccgucaccggcgucuccgccuccugcucccacaacggcgaguccuccuucuaccgcaaccuccucuggcucaccggcaagaacggccucuaccccaaccucuccaaguccuacgccaacaacaaggagaaggagguccucguccucuggggcguccaccacccccccaacaucggcgaccagaaggcccucuaccacaccgagaacgccuacgucuccgucgucuccucccacuacucccgcaaguucacccccgagaucgccaagcgccccaagguccgcgaccaggagggccgcaucaacuacuacuggacccuccucgagcccggcgacaccaucaucuucgaggccaacggcaaccucaucgccccccgcuacgccuucgcccucucccgcggcuucggcuccggcaucaucaacuccaacgcccccauggacaagugcgacgccaagugccagaccccccagggcgccaucaacuccucccuccccuuccagaacguccaccccgucaccaucggcgagugccccaaguacguccgcuccgccaagcuccgcauggucaccggccuccgcaacauccccuccauccagucccgcggccucuucggcgccaucgccggcuucaucgagggcggcuggaccggcauggucgacggcugguacggcuaccaccaccagaacgagcagggcuccggcuacgccgccgaccagaaguccacccagaacgccaucaacggcaucaccaacaaggucaacuccgucaucgagaagaugaacacccaguucaccgccgucggcaaggaguucaacaagcucgagcgccgcauggagaaccucaacaagaaggucgacgacggcuucaucgacaucuggaccuacaacgccgagcuccucguccuccucgagaacgagcgcacccucgacuuccacgacuccaacgucaagaaccucuacgagaaggucaagucccagcucaagaacaacgccaaggagaucggcaacggcugcuucgaguucuaccacaagugcaacgacgagugcauggaguccgucaagaacggcaccuacgacuaccccaaguacuccgaggaguccaagcucaaccgcgagaagaucgacggcgucaagcucgaguccaugggcgucuaccagauccucgccaucuacuccaccgucgccuccucccucguccuccucgucucccucggcgccaucuccuucuggaugugcuccaacggcucccuccagugccgcaucugcaucuga

SEQ ID NO: 98680 - RNA, 1698 nt, Artificial Sequence
  derived and/or modified CDS sequence (opt2) from hemagglutinin__InfluenzaA__ACO95415
augaaggucaagcuccucguccuccucugcaccuucaccgccaccuacgccgacaccaucugcaucggcuaccacgccaacaacuccaccgacaccaucgacaccguccucgagaagaacgucaccgucacccacuccgucaaccuccucgagaacucccacaacggcaagcucugccuccucaagggcaucgccccccuccagcucggcaacugcuccgucgccggcuggauccucggcaaccccgagugcgagcuccucaucuccaaggaguccugguccuacaucgucgagaagcccaaccccgagaacggcaccugcuaccccggccacuucgccgacuacgaggagcuccgcgagcagcucuccuccgucuccuccuucgagcgcuucgagaucuuccccaaggaguccuccuggcccaaccacaccgucaccggcgucuccgccuccugcucccacaacggcgaguccuccuucuaccgcaaccuccucuggcucaccggcaagaacggccucuaccccaaccucuccaaguccuacgccaacaacaagggcaaggagguccucguccucuggggcguccaccacccccccaacaucggcgaccagaacacccucuaccacaccgagaacgccuacgucuccgucgucuccucccacuacucccgcaaguucacccccgagaucgccaagcgccccaagguccgcgaccaggagggccgcaucaacuacuacuggacccuccucgagcccggcgacaccaucaucuucgaggccaacggcaaccucaucgccccccgcuacgccuucgcccucucccgcggcuucggcuccggcaucaucaacuccaacgcccccauggacaagugcgacgccaagugccagaccccccagggcgccaucaacuccucccuccccuuccagaacguccaccccgucaccaucggcgagugccccaaguacguccgcuccgccaagcuccgcauggucaccggccuccgcaacauccccuccauccagucccgcggccucuucggcgccaucgccggcuucaucgagggcggcuggaccggcauggucgacggcugguacggcuaccaccaccagaacgagcagggcuccggcuacgccgccgaccagaaguccacccagaacgccaucaacggcaucaccaacaaggucaacuccgucaucgagaagaugaacacccaguucaccgccgucggcaaggaguucaacaagcucgagcgccgcauggagaaccucaacaagaaggucgacgacggcuucaucgacaucuggaccuacaacgccgagcuccucguccuccucgagaacgagcgcacccucgacuuccacgacuccaacgucaagaaccucuacgagaaggucaagucccagcucaagaacaacgccaaggagaucggcaacggcugcuucgaguucuaccacaagugcaacgacgagugcauggaguccgucaagaacggcaccuacgacuaccccaaguacuccgaggaguccaagcucaaccgcgagaagaucgacggcgucaagcucgaguccaugggcgucuaccagauccucgccaucuacuccaccgucgccuccucccucguccuccucgucucccucggcgccaucuccuucuggaugugcuccaacggcucccuccagugccgcaucugcaucuga

SEQ ID NO: 98681 - RNA, 1701 nt, Artificial Sequence
  derived and/or modified CDS sequence (opt2) from hemagglutinin__InfluenzaA__ACO95426
augaagaccaucaucgcccucuccuacauccucugccucgucuucgcccagaagcuccccggcaacgacaacuccaccgccacccucugccucggccaccacgccguccccaacggcaccaucgucaagaccaucaccaacgaccagaucgaggucaccaacgccaccgagcucguccaguccuccuccaccggcggcaucugcgacuccccccaccagauccucgacggcgagaacugcacccucaucgacgcccuccucggcgacccccagugcgacggcuuccagaacaagaagugggaccucuucgucgagcgcuccaaggccuacuccaacugcuaccccuacgacguccccgacuacgccucccuccgcucccucgucgccuccuccggcacccucgaguucaacaacgaguccuucgacuggaccggcgucacccagaacggcaccuccuccuccugcaagcgccgcuccaacaacuccuucuucucccgccucaacuggcucacccaccucaaguacaaguaccccgcccucaacgucaccaugcccaacaacgagaaguucgacaagcucuacaucuggggcguccaccaccccggcaccgacuccgaccagaucucccucuacgcccaggccuccggccgcaucaccgucuccaccaagcgcucccagcagaccgucauccccaacaucggcucccgcccccgcguccgcgacgucuccucccgcaucuccaucuacuggaccaucgucaagcccggcgacauccuccucaucaacuccaccggcaaccucaucgccccccgcggcuacuucaagauccgcuccggcaaguccuccaucaugcgcuccgacgcccccaucggcaagugcaacuccgagugcaucacccccaacggcuccauccccaacgacaagcccuuccagaacgucaaccgcaucaccuacggcgccugcccccgcuacgucaagcagaacacccucaagcucgccaccggcaugcgcaacguccccgagaagcagacccgcggcaucuucggcgccaucgccggcuucaucgagaacggcugggagggcauggucgacggcugguacggcuuccgccaccagaacuccgagggcaccggccaggccgccgaccucaaguccacccaggccgccaucaaccagaucaacggcaagcucaaccgccucaucggcaagaccaacgagaaguuccaccagaucgagaaggaguucuccgaggucgagggccgcauccaggaccucgagaaguacgucgaggacaccaagaucgaccucugguccuacaacgccgagcuccucgucgcccucgagaaccagcacaccaucgaccucaccgacuccgagaugaacaagcucuucgagcgcaccaagaagcagcuccgcgagaacgccgaggacaugggcaacggcugcuucaagaucuaccacaagugcgacaacgccugcaucggcuccauccgcaacggcaccuacgaccacgacgucuaccgcgacgaggcccucaacaaccgcuuccagaucaagggcgucgagcucaaguccggcuacaaggacuggauccucuggaucuccuucgccaucuccugcuuccuccucugcgucgcccuccucggcuucaucaugugggccugccagaagggcaacauccgcugcaacaucugcaucuga

SEQ ID NO: 98682 - RNA, 1701 nt, Artificial Sequence; identical to SEQ ID NO: 97831
  derived and/or modified CDS sequence (opt2) from hemagglutinin__InfluenzaA__ACO95437

SEQ ID NO: 98683 - RNA, 1701 nt, Artificial Sequence
  derived and/or modified CDS sequence (opt2) from hemagglutinin__InfluenzaA__ACO95448
augaagaccaucaucgcccucuccuacauccucugccucgucuucgcccagaagcuccccggcaacgacaacuccaccgccacccucugccucggccaccacgccguccccaacggcaccaucgucaagaccaucaccaacgaccagaucgaggucaccaacgccaccgagcucguccaguccuccuccaccggcggcaucugcgacuccccccaccagauccucgacggcgagaacugcacccucaucgacgcccuccucggcgacccccagugcgacggcuuccagaacaagaagugggaccucuucgucgagcgcuccaaggccuacuccaacugcuaccccuacgacguccccgacuacgccucccuccgcucccucaucgccuccuccggcacccucgaguucaacaacgaguccuucaacuggaccggcgucacccagaacggcaccuccuccgccugcaagcgccgcuccaacaacuccuucuucucccgccucaacuggcucacccaccucaaguucaaguaccccgcccucaacgucaccaugcccaacaacgaggaguucgacaagcucuacaucuggggcguccaccaccccggcaccgacaacgaccagaucaaccucuacgcccaggccuccggccgcaucaccgucuccaccaagcgcucccagcagaccgucauccccaacaucggcucccgcccccgcguccgcgacauccccucccgcaucuccaucuacuggaccaucgucaagcccggcgacauccuccucaucaacuccaccggcaaccucaucgccccccgcggcuacuucaagauccgcuccggcaaguccuccaucaugcgcuccgacgcccccaucggcaagugcaacuccgagugcaucacccccaacggcuccauccccaacgacaagcccuuccagaacgucaaccgcaucaccuacggcgccugcccccgcuacgucaagcagaacacccucaagcucgccaccggcaugcgcaacguccccgagaagcagacccgcggcaucuucggcgccaucgccggcuucaucgagaacggcugggagggcauggucgacggcugguacggcuuccgccaccagaacuccgagggcaucggccaggccgccgaccucaaguccacccaggccgccaucgaccagaucaacggcaagcucaaccgccucaucggcaagaccaacgagaaguuccaccagaucgagaaggaguucuccgaggucgagggccgcauccaggaccucgagaaguacgucgaggacaccaagaucgaccucugguccuacaacgccgagcuccucgucgcccucgagaaccagcacaccaucgaccucaccgacuccgagaugaacaagcucuucgagcgcaccaagaagcagcuccgcgagaacgccgaggacaugggcaacggcugcuucaagaucuaccacaagugcgacaacgccugcaucggcuccauccgcaacggcaccuacgaccacgacgucuaccgcgacgaggcccucaacaaccgcuuccagaucaagggcgucgagcucaaguccggcuacaaggacuggauccucuggaucuccuucgccaucuccugcuuccuccucugcgucgcccuccucggcuucaucaugugggccugccagaagggcaacauccgcugcaacaucugcaucuga

SEQ ID NO: 98684 - RNA, 1701 nt, Artificial Sequence; identical to SEQ ID NO: 96666
  derived and/or modified CDS sequence (opt2) from hemagglutinin__InfluenzaA__ACO95459

SEQ ID NO: 98685 - RNA, 1701 nt, Artificial Sequence
  derived and/or modified CDS sequence (opt2) from hemagglutinin__InfluenzaA__ACO95470
augaagaccaucaucgcccucuccuacauccucugccucgucuucgcccagaagcuccccggcaacgacaacuccaccgccacccucugccucggccaccacgccguccccaacggcaccaucgucaagaccaucaccaacgaccagaucgaggucaccaacgccaccgagcucguccaguccuccuccaccggcggcaucugcgacuccccccaccagauccucgacggcgagaacugcacccucaucgacgcccuccucggcgacccccagugcgacggcuuccagaacaagaagugggaccucuucgucgagcgcuccaaggccuacuccaacugcuaccccuacgacguccccgacuacgccucccuccgcucccucgucgccuccuccggcacccucgaguucaacaacgaguccuucaacuggaccggcgucacccagaacggcaccuccuccgccugcaagcgccgcuccaacaacuccuucuucucccgccucaacuggcucacccaccucaaguucaaguaccccgcccucaacgucaccaugcccaacaacgagaaguucgacaagcucuacaucuggggcguccaccaccccggcaccgacaacgaccagaucuuccucuacgcccaggccuccggccgcaucaccgucuccaccaagcgcucccagcagaccgucauccccaacaucggcucccgcccccgcguccgcaacauccccucccgcaucuccaucuacuggaccaucgucaagcccggcgacauccuccucaucaacuccaccggcaaccucaucgccccccgcggcuacuucaagauccgcuccggcaaguccuccaucaugcgcuccgacgcccccaucggccgcugcaacuccgagugcaucacccccaacggcuccauccccaacgacaagcccuuccagaacgucaaccgcaucaccuacggcgccugcccccgcuacgucaagcagaacacccucaagcucgccaccggcaugcgcaacguccccgagaagcagacccgcggcaucuucggcgccaucgccggcuucaucgagaacggcugggagggcauggucgacggcugguacggcuuccgccaccagaacuccgagggcaucggccaggccgccgaccucaaguccacccaggccgccaucaaccagaucaacggcaagcucaaccgccucaucggcaagaccaacgagaaguuccaccagaucgagaaggaguucuccgaggucgagggccgcauccaggaccucgagaaguacgucgaggacaccaagaucgaccucugguccuacaacgccgagcuccucgucgcccucgagaaccagcacaccaucgaccucaccgacuccgagaugaacaagcucuucgagcgcaccaagaagcagcuccgcgagaacgccgaggacaugggcaacggcugcuucaagaucuaccacaagugcgacaacgccugcaucggcuccauccgcaacggcaccuacgaccacgacgucuaccgcgacgaggcccucaacaaccgcuuccagaucaagggcgucgagcucaaguccggcuacaaggacuggauccucuggaucuccuucgccaucuccugcuuccuccucugcgucgcccuccucggcuucaucaugugggccugccagaagggcaacauccgcugcaacaucugcaucuga

SEQ ID NO: 98686 - RNA, 1701 nt, Artificial Sequence
  derived and/or modified CDS sequence (opt2) from hemagglutinin__InfluenzaA__ACO95481
augaagaccaucaucgcccucuccuacauccucugccucgucuucgcccagaagcuccccggcaacgacaacuccaccgccacccucugccucggccaccacgccguccccaacggcaccaucgucaagaccaucaccaacgaccagaucgaggucaccaacgccaccgagcucguccaguccuccuccaccggcggcaucugcgacuccccccaccagauccucgacggcgagaacugcacccucaucgacgcccuccucggcgacccccagugcgacggcuuccagaacaagaagugggaccucuucgucgagcgcuccaaggccuacuccaacugcuaccccuacgacguccccgacuacgccucccuccgcucccucgucgccuccuccggcacccucgaguucaacaacgaguccuucaacuggaccggcgucacccagaacggcaccuccuccgccugcaagcgccgcuccaacaacuccuucuucucccgccucaacuggcucacccaccucaaguucaaguaccccgcccucaacgucaccaugcccaacaacgagaaguucgacaagcucuacaucuggggcguccaccaccccggcaccgacaacgaccagaucuuccucuacgcccaggccuccggccgcaucaccgucuccaccaagcgcucccagcagaccgucauccccaacaucggcucccgcccccgcguccgcaacauccccucccgcaucuccaucuacuggaccaucgucaagcccggcgacauccuccucaucaacuccaccggcaaccucaucgccccccgcggcuacuucaagauccgcuccggcaaguccuccaucaugcgcuccgacgcccccaucggcaagugcaacuccgagugcaucacccccaacggcuccauccccaacgacaagcccuuccagaacgucaaccgcaucaccuacggcgccugcccccgcuacgucaagcagaacacccucaagcucgccaccggcaugcgcaaccuccccgagaagcagacccgcggcaucuucggcgccaucgccggcuucaucgagaacggcugggagggcauggucgacggcugguacggcuuccgccaccagaacuccgagggcaucggccaggccgccgaccucaaguccacccaggccgccaucaaccagaucaacggcaagcucaaccgccucaucggcaagaccaacgagaaguuccaccagaucgagaaggaguucuccgaggucgagggccgcauccaggaccucgagaaguacgucgaggacaccaagaucgaccucugguccuacaacgccgagcuccucgucgcccucgagaaccagcacaccaucgaccucaccgacuccgagaugaacaagcucuucgagcgcaccaagaagcagcuccgcgagaacgccgaggacaugggcaacggcugcuucaagaucuaccacaagugcgacaacgccugcaucggcuccauccgcaacggcaccuacgaccacgacgucuaccgcgacgaggcccucaacaaccgcuuccagaucaagggcgucgagcucaaguccggcuacaaggacuggauccucuggaucuccuucgccaucuccugcuuccuccucugcgucgcccuccucggcuucaucaugugggccugccagaagggcaacauccgcugcaacaucugcaucuga

SEQ ID NO: 98687 - RNA, 1701 nt, Artificial Sequence; identical to SEQ ID NO: 96666
  derived and/or modified CDS sequence (opt2) from hemagglutinin__InfluenzaA__ACO95492

SEQ ID NO: 98688 - RNA, 1701 nt, Artificial Sequence; identical to SEQ ID NO: 96666
  derived and/or modified CDS sequence (opt2) from hemagglutinin__InfluenzaA__ACO95503

SEQ ID NO: 98689 - RNA, 1701 nt, Artificial Sequence; identical to SEQ ID NO: 96666
  derived and/or modified CDS sequence (opt2) from hemagglutinin__InfluenzaA__ACO95514

SEQ ID NO: 98690 - RNA, 1701 nt, Artificial Sequence; identical to SEQ ID NO: 96666
  derived and/or modified CDS sequence (opt2) from hemagglutinin__InfluenzaA__ACO95536

SEQ ID NO: 98691 - RNA, 1701 nt, Artificial Sequence; identical to SEQ ID NO: 96666
  derived and/or modified CDS sequence (opt2) from hemagglutinin__InfluenzaA__ACO95547

SEQ ID NO: 98692 - RNA, 1701 nt, Artificial Sequence
  derived and/or modified CDS sequence (opt2) from hemagglutinin__InfluenzaA__ACP41963
augaaggccauccucgucguccuccucuacaccuucgccaccgccaacgccgacacccucugcaucggcuaccacgccaacaacuccaccgacaccgucgacaccguccucgagaagaacgucaccgucacccacuccgucaaccuccucgaggacaagcacaacggcaagcucugcaagcuccgcggcgucgccccccuccaccucggcaagugcaacaucgccggcuggauccucggcaaccccgagugcgagucccucuccaccgccuccuccugguccuacaucgucgagaccuccuccuccgacaacggcaccugcuaccccggcgacuucaucgacuacgaggagcuccgcgagcagcucuccuccgucuccuccuucgagcgcuucgagaucuuccccaagaccuccuccuggcccaaccacgacuccaacaagggcgucaccgccgccugcccccacgccggcgccaaguccuucuacaagaaccucaucuggcucgucaagaagggcaacuccuaccccaagcucuccaaguccuacaucaacgacaagggcaaggagguccucguccucuggggcauccaccaccccuccaccuccgccgaccagcagucccucuaccagaacgccgacgccuacgucuucgucggcuccucccgcuacuccaagaaguucaagcccgagaucgccauccgccccaagguccgcgaccaggagggccgcaugaacuacuacuggacccucgucgagcccggcgacaagaucaccuucgaggccaccggcaaccucgucgucccccgcuacgccuucgccauggagcgcaacgccggcuccggcaucaucaucuccgacacccccguccacgacugcaacaccaccugccagacccccaagggcgccaucaacaccucccuccccuuccagaacauccaccccaucaccaucggcaagugccccaaguacgucaaguccaccaagcuccgccucgccaccggccuccgcaacguccccuccauccagucccgcggccucuucggcgccaucgccggcuucaucgagggcggcuggaccggcauggucgacggcugguacggcuaccaccaccagaacgagcagggcuccggcuacgccgccgaccucaaguccacccagaacgccaucgacgagaucaccaacaaggucaacuccgucaucgagaagaugaacacccaguucaccgccgucggcaaggaguucaaccaccucgagaagcgcaucgagaaccucaacaagaaggucgacgacggcuuccucgacaucuggaccuacaacgccgagcuccucguccuccucgagaacgagcgcacccucgacuaccacgacuccaacgucaagaaccucuacgagaagguccgcucccagcucaagaacaacgccaaggagaucggcaacggcugcuucgaguucuaccacaagugcgacaacaccugcauggaguccgucaagaacggcaccuacgacuaccccaaguacuccgaggaggccaagcucaaccgcgaggagaucgacggcgucaagcucgaguccacccgcaucuaccagauccucgccaucuacuccaccgucgccuccucccucguccucgucgucucccucggcgccaucuccuucuggaugugcuccaacggcucccuccagugccgcaucugcaucuga

SEQ ID NO: 98693 - RNA, 1698 nt, Artificial Sequence; identical to SEQ ID NO: 98679
  derived and/or modified CDS sequence (opt2) from hemagglutinin__InfluenzaA__ACP44192

SEQ ID NO: 98694 - RNA, 1698 nt, Artificial Sequence; identical to SEQ ID NO: 98679
  derived and/or modified CDS sequence (opt2) from hemagglutinin__InfluenzaA__ACP44203

SEQ ID NO: 98695 - RNA, 1698 nt, Artificial Sequence
  derived and/or modified CDS sequence (opt2) from hemagglutinin__InfluenzaA__ACP44225
augaaggucaagcuccucguccuccucugcaccuucaccgccaccuacgccgacaccaucugcaucggcuaccacgccaacaacuccaccgacaccgucgacaccguccucgagaagaacgucaccgucacccacuccgucaaccuccucgagaacucccacaacggcaagcucugccuccucaagggcaucgccccccuccagcucggcaacugcuccgucgccggcuggauccucggcaaccccgagugcggccuccucaucuccaaggaguccugguccuacaucgucgagaagcccaaccccgagaacggcaccugcuaccccggccacuucgccgacuacgaggagcuccgcgagcagcucuccuccgucuccuccuucgagcgcuucgagaucuuccccaaggaguccuccuggcccaaccacaccgucaccggcgucuccgccuccugcucccacaacggcgaguccuccuucuaccgcaaccuccucuggcucaccggcaagaacggccucuaccccaaccucuccaaguccuacgccaacaacaaggagaaggagguccucguccucuggggcguccaccacccccccaacaucggcgaccagaaggcccucuaccacaccgagaacgccuacgucuccgucgucuccucccacuacucccgcaaguucacccccgagaucgccaagcgccccaagguccgcgaccaggagggccgcaucaacuacuacuggacccuccucgagcccggcgacaccaucaucuucgaggccaacggcaaccucaucgccccccgcuacgccuucgcccucucccgcggcuucggcuccggcaucaucaacuccaacgcccccauggacaagugcgacgccaagugccagaccccccagggcgccaucaacuccucccuccccuuccagaacguccaccccgucaccaucggcgagugccccaaguacguccgcuccgccaagcuccgcauggucaccggccuccgcaacauccccuccauccagucccgcggccucuucggcgccaucgccggcuucaucgagggcggcuggaccggcauggucgacggcugguacggcuaccaccaccagaacgagcagggcuccggcuacgccgccgaccagaaguccacccagaacgccaucaacggcaucaccaacaaggucaacuccgucaucgagaagaugaacacccaguucaccgccgucggcaaggaguucaacaagcucgagcgccgcauggagaaccucaacaagaaggucgacgacggcuucaucgacaucuggaccuacaacgccgagcuccucguccuccucgagaacgagcgcacccucgacuuccacgacuccaacgucaagaaccucuacgagaaggucaagucccagcucaagaacaacgccaaggagaucggcaacggcugcuucgaguucuaccacaagugcaacgacgagugcauggaguccgucaagaacggcaccuacgacuaccccaaguacuccaaggaguccaagcucaaccgcgagaagaucgacggcgucaagcucgaguccaugggcgucuaccagauccucgccaucuacuccaccgucgccuccucccucguccuccucgucucccucggcgccaucuccuucuggaugugcuccaacggcucccuccagugccgcaucugcaucuga

SEQ ID NO: 98696 - RNA, 1701 nt, Artificial Sequence
  derived and/or modified CDS sequence (opt2) from hemagglutinin__InfluenzaA__ACP44236
augaagaccaucaucgcccucuccuacauccucugccucgucuucgcccagaagcuccccggcaacgacaacuccaccgccacccucugccucggccaccacgccguccccaacggcaccaucgucaagaccaucaccaacgaccagaucgaggucaccaacgccaccgagcucguccaguccuccuccaccggcggcaucugcgacuccccccaccagauccucgacggcgagaacugcacccucaucgacgcccuccucggcgacccccagugcgacggcuuccagaacaagaagugggaccucuucgucgagcgcuccaaggccuacuccaacugcuaccccuacgacguccccgacuacgccucccuccgcucccucgucgccuccuccggcacccucgaguucaacaacgaguccuucaacuggaccggcgucacccagaacggcaccuccuccgccugcaagcgccgcuccgacaaguccuucuucucccgccucaacuggcucacccaccucaaguucaaguaccccgcccucaacgucaccaugcccaacaacgagaaguucgacaagcucuacaucuggggcguccaccaccccggcaccgacaacgaccagaucucccucuacgcccaggccuccggccgcaucaccgucuccaccaagcgcucccagcagaccgucauccccaacaucggcucccgcccccgcguccgcgacguccccucccgcaucuccaucuacuggaccaucgucaagcccggcgacauccuccucaucaacuccaccggcaaccucaucgccccccgcggcuacuucaagauccgcuccggcaaguccuccaucaugcgcuccgacgcccccaucggcaagugcaacuccgagugcaucacccccaacggcuccauccccaacgacaagcccuuccagaacgucaaccgcaucaccuacggcgccugcccccgcuacgucaagcagaacacccucaagcucgccaccggcaugcgcaacguccccgagaagcagacccgcggcaucuucggcgccaucgccggcuucaucgagaacggcugggagggcauggucgacggcugguacggcuuccgccaccagaacuccgagggcaccggccaggccgccgaccucaaguccacccaggccgccaucaaccagaucaacggcaagcucaaccgccucaucggcaagaccaacgagaaguuccaccagaucgagaaggaguucuccgaggucgagggccgcauccaggaccucgagaaguacgucgaggacaccaagaucgaccucugguccuacaacgccgagcuccucgucgcccucgagaaccagcacaccaucgaccucaccgacuccgagaugaacaagcucuucgagcgcaccaagaagcagcuccgcgagaacgccgaggacaugggcaacggcugcuucaagaucuaccacaagugcgacaacgccugcaucggcuccauccgcaacggcaccuacgaccacgacgucuaccgcgacgaggcccucaacaaccgcuuccagaucaagggcgucgagcucaaguccggcuacaaggacuggauccucuggaucuccuucgccaucuccugcuuccuccucugcgucgcccuccucggcuucaucaugugggccugccagaagggcaacauccgcugcaacaucugcaucuga

SEQ ID NO: 98697 - RNA, 1701 nt, Artificial Sequence; identical to SEQ ID NO: 98633
  derived and/or modified CDS sequence (opt2) from hemagglutinin__InfluenzaA__ACP44247

SEQ ID NO: 98698 - RNA, 1701 nt, Artificial Sequence; identical to SEQ ID NO: 96666
  derived and/or modified CDS sequence (opt2) from hemagglutinin__InfluenzaA__ACP44258

SEQ ID NO: 98699 - RNA, 1701 nt, Artificial Sequence; identical to SEQ ID NO: 96666
  derived and/or modified CDS sequence (opt2) from hemagglutinin__InfluenzaA__ACP44269

SEQ ID NO: 98700 - RNA, 1701 nt, Artificial Sequence; identical to SEQ ID NO: 98692
  derived and/or modified CDS sequence (opt2) from hemagglutinin__InfluenzaA__ACQ44554

SEQ ID NO: 98701 - RNA, 1701 nt, Artificial Sequence; identical to SEQ ID NO: 98692
  derived and/or modified CDS sequence (opt2) from hemagglutinin__InfluenzaA__ACQ44556

SEQ ID NO: 98702 - RNA, 1701 nt, Artificial Sequence; identical to SEQ ID NO: 98692
  derived and/or modified CDS sequence (opt2) from hemagglutinin__InfluenzaA__ACQ45338

SEQ ID NO: 98703 - RNA, 1701 nt, Artificial Sequence
  derived and/or modified CDS sequence (opt2) from hemagglutinin__InfluenzaA__ACQ55359
augaaggccauccucgucguccuccucuacaccuucgccaccgccaacgccgacacccucugcaucggcuaccacgccaacaacuccaccgacaccgucgacaccguccucgagaagaacgucaccgucacccacuccgucaaccuccucgaggacaagcacaacggcaagcucugcaagcuccgcggcgucgccccccuccaccucggcaagugcaacaucgccggcuggauccucggcaaccccgagugcgagucccucuccaccgccuccuccugguccuacaucgucgagacccccuccuccgacaacggcaccugcuaccccggcgacuucaucgacuacgaggagcuccgcgagcagcucuccuccgucuccuccuucgagcgcuucgagaucuuccccaagaccuccuccuggcccaaccacgacuccaacaagggcgucaccgccgccugcccccacgccggcgccaaguccuucuacaagaaccucaucuggcucgucaagaagggcaacuccuaccccaagcucuccaaguccuacaucaacgacaagggcaaggagguccucguccucuggggcauccaccaccccuccaccuccgccgaccagcagucccucuaccagaacgccgacgccuacgucuucgucggcuccucccgcuacuccaagaaguucaagcccgagaucgccauccgccccaagguccgcgaccaggagggccgcaugaacuacuacuggacccucgucgagcccggcgacaagaucaccuucgaggccaccggcaaccucgucgucccccgcuacgccuucgccauggagcgcaacgccggcuccggcaucaucaucuccgacacccccguccacgacugcaacaccaccugccagacccccaagggcgccaucaacaccucccuccccuuccagaacauccaccccaucaccaucggcaagugccccaaguacgucaaguccaccaagcuccgccucgccaccggccuccgcaacauccccuccauccagucccgcggccucuucggcgccaucgccggcuucaucgagggcggcuggaccggcauggucgacggcugguacggcuaccaccaccagaacgagcagggcuccggcuacgccgccgaccucaaguccacccagaacgccaucgacgagaucaccaacaaggucaacuccgucaucgagaagaugaacacccaguucaccgccgucggcaaggaguucaaccaccucgagaagcgcaucgagaaccucaacaagaaggucgacgacggcuuccucgacaucuggaccuacaacgccgagcuccucguccuccucgagaacgagcgcacccucgacuaccacgacuccaacgucaagaaccucuacgagaagguccgcucccagcucaagaacaacgccaaggagaucggcaacggcugcuucgaguucuaccacaagugcgacaacaccugcauggaguccgucaagaacggcaccuacgacuaccccaaguacuccgaggaggccaagcucaaccgcgaggagaucgacggcgucaagcucgaguccacccgcaucuaccagauccucgccaucuacuccaccgucgccuccucccucguccucgucgucucccucggcgccaucuccuucuggaugugcuccaacggcucccuccagugccgcaucugcaucuga

SEQ ID NO: 98704 - RNA, 1701 nt, Artificial Sequence; identical to SEQ ID NO: 98692
  derived and/or modified CDS sequence (opt2) from hemagglutinin__InfluenzaA__ACQ55361

SEQ ID NO: 98705 - RNA, 1701 nt, Artificial Sequence
  derived and/or modified CDS sequence (opt2) from hemagglutinin__InfluenzaA__ACQ63223
augaaggccauccucgucguccuccucuacaccuucgccaccgccaacgccgacacccucugcaucggcuaccacgccaacaacuccaccgacaccgucgacaccguccucgagaagaacgucaccgucacccacuccgucaaccuccucgaggacaagcacaacggcaagcucugcaagcuccgcggcgucgccccccuccaccucggcaagugcaacaucgccggcuggauccucggcaaccccgagugcgagucccucuccaccgccuccuccugguccuacaucgucgagaccuccuccuccgacaacggcaccugcuaccccggcgacuucaucgacuacgaggagcuccgcgagcagcucuccuccgucuccuccuucgagcgcuucgagaucuuccccaagaccuccuccuggcccaaccacgacuccaacaagggcgucaccgccgccugcccccacgccggcgccaaguccuucuacaagaaccucaucuggcucgucaagaagggcaacuccuaccccaagcucuccaaguccuacaucaacgacaagggcaaggagguccucguccucuggggcauccaccaccccuccaccuccgccgaccagcagucccucuaccagaacgccgacgccuacgucuucgucggcaccucccgcuacuccaagaaguucaagcccgagaucgccauccgccccaagguccgcgaccaggagggccgcaugaacuacuacuggacccucgucgagcccggcgacaagaucaccuucgaggccaccggcaaccucgucgucccccgcuacgccuucgccauggagcgcaacgccggcuccggcaucaucaucuccgacacccccguccacgacugcaacaccaccugccagacccccaagggcgccaucaacaccucccuccccuuccagaacauccaccccaucaccaucggcaagugccccaaguacgucaaguccaccaagcuccgccucgccaccggccuccgcaacguccccuccauccagucccgcggccucuucggcgccaucgccggcuucaucgagggcggcuggaccggcauggucgacggcugguacggcuaccaccaccagaacgagcagggcuccggcuacgccgccgaccucaaguccacccagaacgccaucgacgagaucaccaacaaggucaacuccgucaucgagaagaugaacacccaguucaccgccgucggcaaggaguucaaccaccucgagaagcgcaucgagaaccucaacaagaaggucgacgacggcuuccucgacaucuggaccuacaacgccgagcuccucguccuccucgagaacgagcgcacccucgacuaccacgacuccaacgucaagaaccucuacgagaagguccgcucccagcucaagaacaacgccaaggagaucggcaacggcugcuucgaguucuaccacaagugcgacaacaccugcauggaguccgucaagaacggcaccuacgacuaccccaaguacuccgaggaggccaagcucaaccgcgaggagaucgacggcgucaagcucgaguccacccgcaucuaccagauccucgccaucuacuccaccgucgccuccucccucguccucgucgucucccucggcgccaucuccuucuggaugugcuccaacggcucccuccagugccgcaucugcaucuga

SEQ ID NO: 98706 - RNA, 1701 nt, Artificial Sequence; identical to SEQ ID NO: 98705
  derived and/or modified CDS sequence (opt2) from hemagglutinin__InfluenzaA__ACQ63239

SEQ ID NO: 98707 - RNA, 1701 nt, Artificial Sequence; identical to SEQ ID NO: 98705
  derived and/or modified CDS sequence (opt2) from hemagglutinin__InfluenzaA__ACQ63244

SEQ ID NO: 98708 - RNA, 1701 nt, Artificial Sequence; identical to SEQ ID NO: 98705
  derived and/or modified CDS sequence (opt2) from hemagglutinin__InfluenzaA__ACQ63257

SEQ ID NO: 98709 - RNA, 1701 nt, Artificial Sequence
  derived and/or modified CDS sequence (opt2) from hemagglutinin__InfluenzaA__ACQ65691
augaagaccaucaucgcccucuccuacauccucugccucgucuucgcccagaagcuccccggcaacgacaacuccaccgccacccucugccucggccaccacgccguccccaacggcaccaucgucaagaccaucaccaacgaccagaucgaggucaccaacgccaccgagcucguccaguccuccuccaccggcggcaucugcgacuccccccaccagauccucgacggcgagaacugcacccucaucgacgcccuccucggcgacccccagugcgacggcuuccagaacaagaagugggaccucuucgucgagcgcuccaaggccuacuccaacugcuaccccuacgacguccccgacuacgccucccuccgcucccucgucgccuccuccggcacccucgaguucaacaacgaguccuucaacuggaccggcgucacccagaacggcaccuccuccuccugcaagcgcggcuccgacaacuccuucuucucccgccucaacuggcucacccaccucaaguucaaguaccccgcccucaacgucaccaugcccaacaacgagaaguucgacaagcucuacaucuggggcguccaccaccccggcaccgacaacgaccagaucuuccccuacgcccaggccuccggccgcaucaccgucuccaccaagcgcucccagcagaccgucauccccaacaucggcucccgcccccgcguccgcgacauccccucccgcaucuccaucuacuggaccaucgucaagcccggcgacauccuccucaucaacuccaccggcaaccucaucgccccccgcggcuacuucaagauccgcuccggcaaguccuccaucaugcgcuccgacgcccccaucggcaagugcaacuccgagugcaucacccccaacggcuccauccccaacgacaagcccuuccagaacgucaaccgcaucaccuacggcgccugcccccgcuacgucaagcagaacacccucaagcucgccaccggcaugcgcaacguccccgagaagcagacccgcggcaucuucggcgccaucgccggcuucaucgagaacggcugggagggcauggucgacggcugguacggcuuccgccaccagaacuccgagggcaucggccaggccgccgaccucaaguccacccaggccgccaucaaccagaucaacggcaagcucaaccgccucaucggcaagaccaacgagaaguuccaccagaucgagaaggaguucuccgaggucgagggccgcauccaggaccucgagaaguacgucgaggacaccaagaucgaccucugguccuacaacgccgagcuccucgucgcccucgagaaccagcacaccaucgaccucaccgacuccgagaugaacaagcucuucgagcgcaccaagaagcagcuccgcgagaacgccgaggacaugggcaacggcugcuucaagaucuaccacaagugcgacaacgccugcaucggcuccauccgcaacggcaccuacgaccacgacgucuaccgcgacgaggcccucaacaaccgcuuccagaucaagggcgucgagcucaaguccggcuacaaggacuggauccucuggaucuccuucaccaucuccugcuuccuccucugcgucgcccuccucggcuucaucaugugggccugccagaagggcaacauccgcugcaacaucugcaucuga

SEQ ID NO: 98710 - RNA, 1701 nt, Artificial Sequence; identical to SEQ ID NO: 98470
  derived and/or modified CDS sequence (opt2) from hemagglutinin__InfluenzaA__ACQ65713

SEQ ID NO: 98711 - RNA, 1701 nt, Artificial Sequence
  derived and/or modified CDS sequence (opt2) from hemagglutinin__InfluenzaA__ACQ65724
augaagaccaucaucgcccucuccuacauccucugccucgucuucgcccagaagcuccccggcaacgacaacuccaccgccacccucugccucggccaccacgccguccccaacggcaccaucgucaagaccaucaccaacgaccagaucgaggucaccaacgccaccgagcucguccaguccuccuccaccggcgagaucugcgacuccccccaccagauccucgacggcgagaacugcacccucaucgacgcccuccucggcgacccccagugcgacggcuuccagaacaagaagugggaccucuucgucgagcgcuccaaggccuacuccaacugcuaccccuacgacguccccgacuacgccucccuccgcucccucgucgccuccuccggcacccucgaguucaacaacgaguccuucaacugggccggcgucacccagaacggcaccuccuccgccugcauccgccgcuccaacaacuccuucuucucccgccucaacuggcucacccaccucaaguucaaguaccccgcccucaacgucaccaugcccaacaacgagcaguucgacaagcucuacaucuggggcguccaccaccccggcaccgacaacgaccagaucuuccucuacgcccaggccuccggccgcaucaccgucuccaccaagcgcucccagcagaccgucauccccaacaucggcucccgcccccgcguccgcaacauccccucccgcaucuccaucuacuggaccaucgucaagcccggcgacauccuccucaucaacuccaccggcaaccucaucgccccccgcggcuacuucaagauccgcuccggcaaguccuccaucaugcgcuccgacgcccccaucggcaagugcaacuccgagugcaucacccccaacggcuccauccccaacgacaagcccuuccagaacgucaaccgcaucaccuacggcgccugcccccgcuacgucaagcagaacacccucaagcucgccaccggcaugcgcaacguccccgagaagcagacccgcggcaucuucggcgccaucgccggcuucaucgagaacggcugggagggcauggucgacggcugguacggcuuccgccaccagaacuccgagggccgcggccaggccgccgaccucaaguccacccaggccgccaucgaccagaucaacggcaagcucaaccgccucaucggcaagaccaacgagaaguuccaccagaucgagaaggaguucuccgaggucgagggccgcauccaggaccucgagaaguacgucgaggacaccaagaucgaccucugguccuacaacgccgagcuccucgucgcccucgagaaccagcacaccaucgaccucaccgacuccgagaugaacaagcucuucgagaagaccaagaagcagcuccgcgagaacgccgaggacaugggcaacggcugcuucaagaucuaccacaagugcgacaacgccugcaucggcuccauccgcaacggcaccuacgaccacgacgucuaccgcgacgaggcccucaacaaccgcuuccagaucaagggcgucgagcucaaguccggcuacaaggacuggauccucuggaucuccuucgccaucuccugcuuccuccucugcgucgcccuccucggcuucaucaugugggccugccagaagggcaacauccgcugcaacaucugcaucuga

SEQ ID NO: 98712 - RNA, 1701 nt, Artificial Sequence
  derived and/or modified CDS sequence (opt2) from hemagglutinin__InfluenzaA__ACQ65747
augaagaccaucaucgcccucuccuacauccucugccucgucuucgcccagaagcuccccggcaacgacaacuccaccgccacccucugccucggccaccacgccguccccaacggcaccaucgucaagaccaucaccaacgaccagaucgaggucaccaacgccaccgagcucguccaguccuccuccaccggcgagaucugcgacuccccccaccagauccucgacggcgagaacugcacccucaucgacgcccuccucggcgacccccagugcgacggcuuccagaacaagaagugggaccucuucgucgagcgcuccaaggccuacuccaacugcuaccccuacgacguccccgacuacgccucccuccgcucccucgucgccuccuccggcacccucgaguucaacaacgaguccuucaacuggaccggcgucacccagaacggcaccuccuccgccugcauccgccgcaccaacaacuccuucuucucccgccucaacuggcucacccaccucaaguucaaguaccccgcccucaacgucaccaugcccaacaacgagaaguucgacaagcucuacaucuggggcguccaccaccccggcaccgacaacgaccagaucuuccucuacgcccaggccuccggccgcaucaccgucuccaccaagcgcucccagcagaccgucauccccaacaucggcucccgcccccgcguccgcaacauccccucccgcaucuccaucuacuggaccaucgucaagcccggcgacauccuccucaucaacuccaccggcaaccucaucgccccccgcggcuacuucaagauccgcuccggcaaguccuccaucaugcgcuccgacgcccccaucggcaagugcaacuccgagugcaucacccccaacggcuccauccccaacgacaagcccuuccagaacgucaaccgcaucaccuacggcgccugcccccgcuacgucaagcagaacacccucaagcucgccaccggcaugcgcaacguccccgagaagcagacccgcggcaucuucggcgccaucgccggcuucaucgagaacggcugggagggcaugauggacggcugguacggcuuccgccaccagaacuccgagggcaucggccaggccgccgaccucaaguccacccaggccgccaucgaccagaucaacggcaagcucaacggccucaucggcaagaccaacgagaaguuccaccagaucgagaaggaguucuccgaggucgagggccgcauccaggaccucgagaaguacgucgaggacaccaagaucgaccucugguccuacaacgccgagcuccucgucgcccucgagaaccagcacaccaucgaccucaccgacuccgagaugaacaagcucuucgagaagaccaagaagcagcuccgcgagaacgccgaggacaugggcaacggcugcuucaagaucuaccacaagugcgacaacgccugcaucggcuccauccgcaacggcaccuacgaccacgacgucuaccgcgacgaggcccucaacaaccgcuuccagaucaagggcgucgagcucaaguccggcuacaaggacuggauccucuggaucuccuucgccaucuccugcuuccuccucugcgucgcccuccucggcuucaucaugugggccugccagaagggcaacauccgcugcaacaucugcaucuga

SEQ ID NO: 98713 - RNA, 1698 nt, Artificial Sequence
  derived and/or modified CDS sequence (opt2) from hemagglutinin__InfluenzaA__ACQ65758
augaaggucaagcuccucguccuccucugcaccuucaccgccaccuacgccgacaccaucugcaucggcuaccacgccaacaacuccaccgacaccgucgacaccguccucgagaagaacgucaccgucacccacuccgucaaccuccucgagaacucccacaacggcaagcucugccuccucaagggcaucgccccccuccagcucggcaacugcuccgucgccggcuggauccucggcaaccccgagugcgagcuccucaucuccaaggaguccugguccuacgucgucgagaagcccaaccccgagaacggcaccugcuaccccggccacuucgccgacuacgaggagcuccgcgagcagcucuccuccgucuccuccuucgagcgcuucgagaucuuccccaaggaguccuccuggcccaaccacaccgucaccggcgucuccgccuccugcucccacaacggcgaguccuccuucuaccgcaaccuccucuggcucaccggcaagaacggccucuaccccaaccucuccaaguccuacgccaacaacaagggcaaggagguccucguccucuggggcguccaccacccccccaacaucggcgaccagaacacccucuaccacaccgagaacgccuacgucuccgucgucuccucccacuacucccgcaaguucacccccgagaucgccaagcgccccaagguccgcgaccaggagggccgcaucaacuacuacuggacccuccucgagcccggcgacaccaucaucuucgaggccaacggcaaccucaucgccccccgcuacgccuucgcccucucccgcggcuucggcuccggcaucaucaacuccaacgcccccauggacaagugcgacgccaagugccagaccccccagggcgccaucaacuccucccuccccuuccagaacguccaccccgucaccaucggcgagugccccaaguacguccgcuccgccaagcuccgcauggucaccggccuccgcaacauccccuccauccagucccgcggccucuucggcgccaucgccggcuucaucgagggcggcuggaccggcauggucgacggcugguacggcuaccaccaccagaacgagcagggcuccggcuacgccgccgaccagaaguccacccagaacgccaucaacggcaucaccaacaaggucaacuccgucaucgagaagaugaacacccaguucaccgccgucggcaaggaguucaacaagcucgagcgccgcauggagaaccucaacaagaaggucgacgacggcuucaucgacaucuggaccuacaacgccgagcuccucguccuccucgagaacgagcgcacccucgacuuccacgacuccaacgucaagaaccucuacgagaaggucaagucccagcucaagaacaacgccaaggagaucggcaacggcugcuucgaguucuaccacaagugcaacgacgagugcauggaguccgucaagaacggcaccuacgacuaccccaaguacuccgaggaguccaagcucaaccgcgagaagaucgacggcgucaagcucgaguccaugggcgucuaccagauccucgccaucuacuccaccgucgccuccucccucguccuccucgucucccucggcgccaucuccuucuggaugugcuccaacggcucccuccagugccgcaucugcaucuga

SEQ ID NO: 98714 - RNA, 1701 nt, Artificial Sequence; identical to SEQ ID NO: 98692
  derived and/or modified CDS sequence (opt2) from hemagglutinin__InfluenzaA__ACQ73386

SEQ ID NO: 98715 - RNA, 1701 nt, Artificial Sequence; identical to SEQ ID NO: 98705
  derived and/or modified CDS sequence (opt2) from hemagglutinin__InfluenzaA__ACQ73387

SEQ ID NO: 98716 - RNA, 1701 nt, Artificial Sequence
  derived and/or modified CDS sequence (opt2) from hemagglutinin__InfluenzaA__ACQ73555
augaagaccaucaucgcccucuccuacauccucugccucgucuucgcccagaagcuccccggcaacgacaacuccaccgccacccucugccucggccaccacgccguccccaacggcaccaucgucaagaccaucaccaacgaccagaucgaggucaccaacgccaccgagcucguccaguccuccuccaccggcggcaucugcgacuccccccaccagauccucgacggcgagaacugcacccucaucgacgcccuccucggcgacccccagugcgacggcuuccagaacaagaagugggaccucuucgucgagcgcuccaaggccuacuccaacugcuaccccuacgacguccccgacuacgccucccuccgcucccucgucgccuccuccggcacccucgaguucaacaacgaguccuucaacuggaccggcgucacccagaacggcaccuccuccgccugcaagcgccgcuccaacaacuccuucuucucccgccucaacuggcucacccaccucaaguucaaguaccccgcccucaacgucaccaagcccaacaacgagaaguucgacaagcucuacaucuggggcguccaccaccccggcaccgacaacgaccagaucuuccucuacgcccaggccuccggccgcaucaccgucuccaccaagcgcucccagcagaccgucauccccaacaucggcucccgcccccgcguccgcaacauccccucccgcaucuccaucuacuggaccaucgucaagcccggcgacauccuccucaucaacuccaccggcaaccucaucgccccccgcggcuacuucaagauccgcuccggcaaguccuccaucaugcgcuccgacgcccccaucggcaagugcaacuccgagugcaucacccccaacggcuccauccccaacgacaagcccuuccagaacgucaaccgcaucaccuacggcgccugcccccgcuacgucaagcagaacacccucaagcucgccaccggcaugcgcaacguccccgagaagcagacccgcggcaucuucggcgccaucgccggcuucaucgagaacggcugggagggcauggucgacggcugguacggcuuccgccaccagaacuccgagggcaucggccaggccgccgaccucaaguccacccaggccgccaucaaccagaucaacggcaagcucaaccgccucaucggcaagaccaacgagaaguuccaccagaucgagaaggaguucuccgaggucgagggccgcauccaggaccucgagaaguacgucgaggacaccaagaucgaccucugguccuacaacgccgagcuccucgucgcccucgagaaccagcacaccaucgaccucaccgacuccgagaugaacaagcucuucgagcgcaccaagaagcagcuccgcgagaacgccgaggacaugggcaacggcugcuucaagaucuaccacaagugcgacaacgccugcaucggcuccauccgcaacggcaccuacgaccacgacgucuaccgcgacgaggcccucaacaaccgcuuccagaucaagggcgucgagcucaaguccggcuacaaggacuggauccucuggaucuccuucgccaucuccugcuuccuccucugcgucgcccuccucggcuucaucaugugggccugccagaagggcaacauccgcugcaacaucugcaucuga

SEQ ID NO: 98717 - RNA, 1701 nt, Artificial Sequence; identical to SEQ ID NO: 98705
  derived and/or modified CDS sequence (opt2) from hemagglutinin__InfluenzaA__ACQ76294

SEQ ID NO: 98718 - RNA, 1701 nt, Artificial Sequence; identical to SEQ ID NO: 98705
  derived and/or modified CDS sequence (opt2) from hemagglutinin__InfluenzaA__ACQ76314

SEQ ID NO: 98719 - RNA, 1701 nt, Artificial Sequence; identical to SEQ ID NO: 98705
  derived and/or modified CDS sequence (opt2) from hemagglutinin__InfluenzaA__ACQ76317

SEQ ID NO: 98720 - RNA, 1701 nt, Artificial Sequence
  derived and/or modified CDS sequence (opt2) from hemagglutinin__InfluenzaA__ACQ76318
augaaggccauccucgucguccuccucuacaccuucgccaccgccaacgccgacacccucugcaucggcuaccacgccaacaacuccaccgacaccgucgacaccguccucgagaagaacgucaccgucacccacuccgucaaccuccucgaggacaagcacaacggcaagcucugcaagcuccgcggcgucgccccccuccaccucggcaagugcaacaucgccggcuggauccucggcaaccccgagugcgagucccucuccaccgccuccuccugguccuacaucgucgagacccccuccuccgacaacggcaccugcuaccccggcgacuucaucgacuacgaggagcuccgcgagcagcucuccuccgucuccuccuucgagcgcuucgagaucuuccccaagaccuccuccuggcccaaccacgacuccaacaagggcgucaccgccgccugcccccacgccggcgccaaguccuucuacaagaaccucaucuggcucgucaagaagggcaacuccuaccccaagcucuccaaguccuacaucaacgacaagggcaaggagguccucguccucuggggcauccaccaccccuccaccuccgccgaccagcagucccucuaccagaacgccgacaccuacgucuucgucggcuccucccgcuacuccaagaaguucaagcccgagaucgccauccgccccaagguccgcgaccaggagggccgcaugaacuacuacuggacccucgucgagcccggcgacaagaucaccuucgaggccaccggcaaccucgucgucccccgcuacgccuucgccauggagcgcaacgccggcuccggcaucaucaucuccgacacccccguccacgacugcaacaccaccugccagacccccaagggcgccaucaacaccucccuccccuuccagaacauccaccccaucaccaucggcaagugccccaaguacgucaaguccaccaagcuccgccucgccaccggccuccgcaacauccccuccauccagucccgcggccucuucggcgccaucgccggcuucaucgagggcggcuggaccggcauggucgacggcugguacggcuaccaccaccagaacgagcagggcuccggcuacgccgccgaccucaaguccacccagaacgccaucgacgagaucaccaacaaggucaacuccgucaucgagaagaugaacacccaguucaccgccgucggcaaggaguucaaccaccucgagaagcgcaucgagaaccucaacaagaaggucgacgacggcuuccucgacaucuggaccuacaacgccgagcuccucguccuccucgagaacgagcgcacccucgacuaccacgacuccaacgucaagaaccucuacgagaagguccgcucccagcucaagaacaacgccaaggagaucggcaacggcugcuucgaguucuaccacaagugcgacaacaccugcauggaguccgucaagaacggcaccuacgacuaccccaaguacuccgaggaggccaagcucaaccgcgaggagaucgacggcgucaagcucgaguccacccgcaucuaccagauccucgccaucuacuccaccgucgccuccucccucguccucgucgucucccucggcgccaucuccuucuggaugugcuccaacggcucccuccagugccgcaucugcaucuga

SEQ ID NO: 98721 - RNA, 1701 nt, Artificial Sequence; identical to SEQ ID NO: 98692
  derived and/or modified CDS sequence (opt2) from hemagglutinin__InfluenzaA__ACQ76326

SEQ ID NO: 98722 - RNA, 1701 nt, Artificial Sequence; identical to SEQ ID NO: 98692
  derived and/or modified CDS sequence (opt2) from hemagglutinin__InfluenzaA__ACQ76336

SEQ ID NO: 98723 - RNA, 1701 nt, Artificial Sequence; identical to SEQ ID NO: 98692
  derived and/or modified CDS sequence (opt2) from hemagglutinin__InfluenzaA__ACQ76347

SEQ ID NO: 98724 - RNA, 1701 nt, Artificial Sequence; identical to SEQ ID NO: 98705
  derived and/or modified CDS sequence (opt2) from hemagglutinin__InfluenzaA__ACQ76365

SEQ ID NO: 98725 - RNA, 1701 nt, Artificial Sequence; identical to SEQ ID NO: 98705
  derived and/or modified CDS sequence (opt2) from hemagglutinin__InfluenzaA__ACQ76370

SEQ ID NO: 98726 - RNA, 1701 nt, Artificial Sequence; identical to SEQ ID NO: 98692
  derived and/or modified CDS sequence (opt2) from hemagglutinin__InfluenzaA__ACQ76376

SEQ ID NO: 98727 - RNA, 1701 nt, Artificial Sequence
  derived and/or modified CDS sequence (opt2) from hemagglutinin__InfluenzaA__ACQ76383
augaaggccauccucgucguccuccucuacaccuucgccaccgccaacgccgacacccucugcaucggcuaccacgccaacaacuccaccgacaccgucgacaccguccucgagaagaacgucaccgucacccacuccgucaaccuccucgaggacaagcacaacggcaagcucugcaagcuccgcggcgucgccccccuccaccucggcaagugcaacaucgccggcuggauccucggcaaccccgagugcgagucccucuccaccgccuccuccugguccuacaucgucgagaccuccuccuccgacaacggcaccugcuaccccggcgacuucaucgacuacgaggagcuccgcgagcagcucuccuccgucuccuccuucgagcgcuucgagaucuuccccaagaccuccuccuggcccaaccacgacuccaacaagggcaucaccgccgccugcccccacgccggcgccaaguccuucuacaagaaccucaucuggcucgucaagaagggcaacuccuaccccaagcucuccaaguccuacaucaacgacaagggcaaggagguccucguccucuggggcauccaccaccccuccaccuccgccgaccagcagucccucuaccagaacgccgacgccuacgucuucgucggcuccucccgcuacuccaagaaguucaagcccgagaucgccauccgccccaagguccgcgaccaggagggccgcaugaacuacuacuggacccucgucgagcccggcgacaagaucaccuucgaggccaccggcaaccucgucgucccccgcuacgccuucgccauggagcgcaacgccggcuccggcaucaucaucuccgacacccccguccacgacugcaacaccaccugccagacccccaagggcgccaucaacaccucccuccccuuccagaacauccaccccaucaccaucggcaagugccccaaguacgucaaguccaccaagcuccgccucgccaccggccuccgcaacguccccuccauccagucccgcggccucuucggcgccaucgccggcuucaucgagggcggcuggaccggcauggucgacggcugguacggcuaccaccaccagaacgagcagggcuccggcuacgccgccgaccucaaguccacccagaacgccaucgacgagaucaccaacaaggucaacuccgucaucgagaagaugaacacccaguucaccgccgucggcaaggaguucaaccaccucgagaagcgcaucgagaaccucaacaagaaggucgacgacggcuuccucgacaucuggaccuacaacgccgagcuccucguccuccucgagaacgagcgcacccucgacuaccacgacuccaacgucaagaaccucuacgagaagguccgcucccagcucaagaacaacgccaaggagaucggcaacggcugcuucgaguucuaccacaagugcgacaacaccugcauggaguccgucaagaacggcaccuacgacuaccccaaguacuccgaggaggccaagcucaaccgcgaggagaucgacggcgucaagcucgaguccacccgcaucuaccagauccucgccaucuacuccaccgucgccuccucccucguccucgucgucucccucggcgccaucuccuucuggaugugcuccaacggcucccuccagugccgcaucugcaucuga

SEQ ID NO: 98728 - RNA, 1701 nt, Artificial Sequence; identical to SEQ ID NO: 98705
  derived and/or modified CDS sequence (opt2) from hemagglutinin__InfluenzaA__ACQ76389

SEQ ID NO: 98729 - RNA, 1701 nt, Artificial Sequence; identical to SEQ ID NO: 98692
  derived and/or modified CDS sequence (opt2) from hemagglutinin__InfluenzaA__ACQ76401

SEQ ID NO: 98730 - RNA, 1701 nt, Artificial Sequence; identical to SEQ ID NO: 98705
  derived and/or modified CDS sequence (opt2) from hemagglutinin__InfluenzaA__ACQ76405

SEQ ID NO: 98731 - RNA, 1701 nt, Artificial Sequence
  derived and/or modified CDS sequence (opt2) from hemagglutinin__InfluenzaA__ACQ76408
augaaggccauccucgucgucaugcucuacaccuucgccaccgccaacgccgacacccucugcaucggcuaccacgccaacaacuccaccgacaccgucgacaccguccucgagaagaacgucaccgucacccacuccgucaaccuccucgaggacaagcacaacggcaagcucugcaagcuccgcggcgucgccccccuccaccucggcaagugcaacaucgccggcuggauccucggcaaccccgagugcgagucccucuccaccgccuccuccugguccuacaucgucgagaccuccuccuccgacaacggcaccugcuaccccggcgacuucaucgacuacgaggagcuccgcgagcagcucuccuccgucuccuccuucgagcgcuucgagaucuuccccaagaccuccuccuggcccaaccacgacuccaacaagggcgucaccgccgccugcccccacgccggcgccaaguccuucuacaagaaccucaucuggcucgucaagaagggcaacuccuaccccaagcucuccaaguccuacaucaacgacaagggcaaggagguccucguccucuggggcauccaccaccccuccaccuccgccgaccagcagucccucuaccagaacgccgacgccuacgucuucgucggcuccucccgcuacuccaagaaguucaagcccgagaucgccauccgccccaagguccgcgaccaggagggccgcaugaacuacuacuggacccucgucgagcccggcgacaagaucaccuucgaggccaccggcaaccucgucgucccccgcuacgccuucgccauggagcgcaacgccggcuccggcaucaucaucuccgacacccccguccacgacugcaacaccaccugccagacccccaagggcgccaucaacaccucccuccccuuccagaacauccaccccaucaccaucggcaagugccccaaguacgucaaguccaccaagcuccgccucgccaccggccuccgcaacguccccuccauccagucccgcggccucuucggcgccaucgccggcuucaucgagggcggcuggaccggcauggucgacggcugguacggcuaccaccaccagaacgagcagggcuccggcuacgccgccgaccucaaguccacccagaacgccaucgacgagaucaccaacaaggucaacuccgucaucgagaagaugaacacccaguucaccgccgucggcaaggaguucaaccaccucgagaagcgcaucgagaaccucaacaagaaggucgacgacggcuuccucgacaucuggaccuacaacgccgagcuccucguccuccucgagaacgagcgcacccucgacuaccacgacuccaacgucaagaaccucuacgagaagguccgcucccagcucaagaacaacgccaaggagaucggcaacggcugcuucgaguucuaccacaagugcgacaacaccugcauggaguccgucaagaacggcaccuacgacuaccccaaguacuccgaggaggccaagcucaaccgcgaggagaucgacggcgucaagcucgaguccacccgcaucuaccagauccucgccaucuacuccaccgucgccuccucccucguccucgucgucucccucggcgccaucuccuucuggaugugcuccaacggcucccuccagugccgcaucugcaucuga

SEQ ID NO: 98732 - RNA, 1701 nt, Artificial Sequence
  derived and/or modified CDS sequence (opt2) from hemagglutinin__InfluenzaA__ACQ77601
augaagaccaucaucgcccucuccuacauccucugccucgccuucgcccagaagcuccccggcaacgacaacuccaccgccacccucugccucggccaccacgccguccccaacggcacccucgucaagaccaucaccaacgaccagaucgaggucaccaacgccaccgagcucguccaguccuccuccaccggccgcaucugcgacuccccccaccagauccucgacggcgagaacugcacccucaucgacgcccuccucggcgacccccacugcgacggcuuccagaacaaggagugggaccucuucgucgagcgcuccaaggccuacuccgacugcuaccccuacgacguccccgacuacgccucccuccgcucccucgucgccuccuccggcacccucgaguucaacaacgaguccuucaacuggaccggcgucgcccagaacggcaccuccuccgccugcaagcgccgcuccaucaaguccuucuucucccgccucaacuggcuccaccagcucgagaaccgcuaccccgcccccaacgucaccaugcccaacaacgacaaguucgacaagcucuacaucuggggcguccaccaccccuccaccgacuccgaccagaucuccgucuacgcccaggccuccggccgcgucaccgucuccaccaagcgcucccagcagaccgucauccccaacaucggcucccgccccuggguccgcggcaucuccucccgcaucuccaucuacuggaccaucgucaagcccggcgacauccuccucaucaacuccaccggcaaccucaucgccccccgcggcuacuucaagauccgcuccggcaaguccuccaucaugcgcuccgacgcccccaucggcaagugcaacuccgagugcaucacccccaacggcuccauccccaacgacaagcccuuccagaacgucaaccgcaucaccuacggcgccugcccccgcuacgucaagcagaacacccucaagcucgccaccggcaugcgcaacguccccgagaagcagacccgcggcaucuucggcgccaucgccggcuucaucgagaacggcugggagggcaugauggacggcugguacggcuuccgccaccagaacuccgagggcaccggccaggccgccgaccucaaguccacccaggccgccaucaaccagaucaacggcaagcucaacaagcucaucgagaagaccaacgagaaguuccaccagaucgagaaggaguucuccgaggucgagggccgcauccaggaccucgagaaguacgucgaggacaccaagaucgaccucugguccuacaacgccgagcuccucgucgcccucgagaaccagcacaccaucgaccucaccgacuccgagaugaacaagcucuucgagcgcacccgcaagcagcuccgcgagaacgccgaggacaugggcaacggcugcuucaagaucuaccacaagugcgacaacgccugcaucggcuccauccgcaacggcaccuacgaccacgacgucuaccgcgacgaggcccucaacaaccgcuuccagaucaagggcgucgagcucaaguccggcuacaaggacuggauccucuggaucuccuucgccaucuccugcuuccuccucugcgucguccuccucggcuucaucaugugggccugccagaagggcaacauccgcugcaacaucugcaucuga
